United States Patent Application Publication US 2014/0057251 A1 - sequence listing, part 186

SEQ ID NO: 381265 - DNA, 5489 bp, Cannabis indica
aaaaaaaaaaaaaacttgatcgaacattacttggtatgatactgactccctttttggtttgatcggcgacatgaaaagaagtcggcaattcaagcgagttgcagtttcacccaaacctaagaaatccattcccatccccaccgccgaccagattcggtcgtctcagagattagaagccgacgccaacccacctcagctatcccttcataaattaccgatattgcccttttccttcttccaaattgattccctagaccttgccccacgattgctcggaaaatttctcaagagagatgaagtcgttcttcagatcaccgaggtcgtctcctgttttctcatttctctgcttgtttcaaaataattaattcagttatcttagcaagtgtgaattaatgtgggtctgtgtgactcattatttatttatctatttcaggtagaagcttatagacccaatgattcagcttgccatggtcgatttggcattacagcaagaacagctcctgttgtaagatttgaatttgttttacttattaacatttgaaaagaaaagggtataatattttgaagttgattttgacccaattgagaatattcattgtacaatggcgacagtttggagcaggtggacatgcctatgtctatctttgttatggtcttcattcaatgctcaatgttgtagctgacaaggaaggtgttggagctgctgttttgattcgttcttgtgctccaatttctggtaagtaatcctgctcattctccaatttcagtggcagaaataaaatttcgagtttgtcaaaatgacaatattggaaagtgaatttagcaaaatgaaattgttcttgtaattggcagcaatatgttcctttttgtgggcatttcatataagctttgatgaattgttaaaagggattatcttcaaaaaagagagtttatcattatgacatgatgatttgattgcaggaatcgagattattcagcagcgtcgaggtcagaagactgataagcctgttcttcttagtggacccggaaaggtttgtgtgtcatcttctgtcttctttcatagatcattgtgtttgaattggaaactataatgtgttctttatgaacatgtgactgatgatctttatctttaggttgggcaagcactgggcctttcaacagaatggtccaaccatccactcttcaatgctggtatgtttttaaccaaatatgacattaccaacttactgaatgagtacaactatgagttctcaaataagctattcggtttgatctcttcactgttggtttttggccaggtggattggaaattttggatggtccagagcctgaaaagattttggttggtccacgtgttggcatcgattatgctttaccagaacatgtaaatgcactgtggagatttgctattgctggtacaccttggataagtgctcctaaaagcacactcaggccaccctaacacaccaaaacagattgttcttttccctttttttggagtatgattcatgtacaacggtaactcatcctgcagcttaaatatgaattgttagagattttataagccttttttcgaatagcagagggttttataattcaatattgtaaatacaccaaactcccttttataatgaagaaaatctgctcatgccattgtcccttgtattatattgtgaaatgtggaacaaacggccttacttgaatgacgatatacaccttatactacatagtacataccactatatactccattttaatgttttcactttcattcattcatacaacaattcattgctctctctttacagaaagtatgaacaagtcactcatttaattttgtcgctaattcatttacttgtgcatgttattaaggcatgaaaatgcacttttacaagtagaaatatctaaaaaaaattaaattttaattatatatttttatgaattaatagaaaatatatggtttcaatttaatttgtttgatattgtagaagaggtaattttgcagagagaataaagaaatgatataaaggaagtccaaatccattggatgatgatttatgtattatgtagtctctcacttaagggccaactaccatgaggggattgcagaaacgttggaggcagcttctccaattctcatcactaattaatgagaatgagaccatctccaagtaacaatttttatatttgacacaaaaaaataagtaaaaaatgtgttatatttgacataaaaaataatttagtgatatatttacatcaatttttaactttgtgccctcatatacaattgcaaattttaaaattttaaataaaaatgtacataaaaaacgtttatcattaattttattatctaaaataatatatttatctatatactccataatttaatgctataattaaaaatactaatagaataataaacatagcatactagtaacccataaacttttcttggtgacgtggacatcaatgtttgacacgtgacaagaaggatgatgtcacagagttgagtagacccgaaacatagcaatcgacctaggaggggaccctagtcctacgcccaggttgactccgggagctatgggatgaaagttcgaactttaataacttgaatctaactcactatctttcagtattatgtaccatggagacatggagcaatcaaatccaagctctaggagttgagattgcatgaaacggcaacccagaagcgaacctggacacctagggaagaccaaccaattcaatgactttgattctccattagcagaccaagcattgtagatggtatcaaagcataagccatcataaaaggtgacatcaagaacaacttgatcttcaagagtagtcacttgctctttcaagaccttgacttgatctctaagattagtagtaactgaggtttgttcatcgagtgcaagacgagaagacttttcaacatccaaagtcttcttctgagcgatttctaggctcttcttcaagctactctctcgcgatttggcaccactagccacttcttgaagattagtcaactcactctccagagaatcaatcttcccattcaaagcagtcatgtggtcttctgcaatagtagcacaatcttttacagcctcgagcttctcagcaagctcaaccattttcttctgtttgttatccacggtgtaagcataaccaacacaagcctaaagacaagaacataatgtcaggtgatgttaaacaaaagacagttaagctagaaggagacaagaacaaaatatttaccccgaaaatgttagtgaaacatctttgagcaataacatgcagaggtttggtactgaccaaattctgcaatgggatattcttagccttagaaccaatcaaggcatcaccatgtgcaagaagccaagagtcctgcgcatgcagctgctccgttaaatctgaacccgagttcggaactatagtctcagcctcatctaaagagatatcgattagagatctctcatcaacaccagcagtactaaacttctctttgctagagtcttggggaggggagcgacatcaacatgtttactcctctttctaatttcttctttgaagcaacagaagtagcatgaataccttgaacaacttccctgatcgaacgatcagattccttcggtattagaatttttcgtcttgagtttgaacaagatgccatagcagtcaggaagctcatattgtatgcaaagaaaaaagacaagtggttagtacaatagaagaaaagcaaaacaacaaagttcaacattcacaacatggagcatcaactgcctactgattccccatccttctccaaaatagttcgagtggaggtaaattctccatcttcctggtctaagaacacatatattctccctaaatactctgtgtcattgcaaactatggttgaatcttctgacattatttgagacaagatgacagttgcactttgagcatctgcatcatcctgctcgaatggaattgtccaagattcatcagtaaagcaagtgtcagcatacactcgctagtaggacattatcattccaaccttttgaagattctcagtattgaataaagttcttctgtctctctcccatgcatcaatcttattcggcatggcatcgactctcctcttcatgtcaatcaaaggagcaagtcttttaaaagggccagtcttttagaaagttatgtttcttaatggaagaacaagattataaaagtattcttggtggtaaaggtcacagttagttttggtaatattttctatgtgtgggttgaattgatggaagtgatagaagccttcttatttttgagttggacttcttttcaagtcacaaaagaagtttattttatggggagttgggataggtaaatttctcagggaataaaatatgaagaaggtggcaagtatcctatagccatttgaatttatttggtagggacaaactctaaaaaaatttgctattgatatgaatcatggacgcaagggcaagtaagcactcgcattaatgtggaatctcgaccaagcactgtaccaagtgttctgggagccattgggactgccatattgtggcttctggacaacaattttaggaaagcaataatcatcctgaattagttgggcttgatgttcagtaagagtgctaagcacaagaggtcttaacttaaaagctcgatctcttggatcatcactttcaatagcagctttaagaagctcagttgctattactttcccaccacacgccatgtctaagctctcagacttgggcatagttagcttagttctaatgaactaagtcacatggggatcatactcatcaggcaatcttctacttctcttcatcctagccatgacagtttaacaatacaagttgcttacaattcaagaaaagtcttatttggttgtgaaaaaatttaagcgatttcaaaggaggaaattttcaattcattaggatagtattttggaatttagaggtcttagagaaaataattcaagggttcttaggagtttgagaatctttggagtaagatcaacagaggagaaaagaaaaaaaaaacaacgctaaaaatagaagaagaaaaaatctaccttggggatgaagaacacttgaagacttgatgaagatgaaattccaaggactttttacgaaggtttgggcgtggagaaaaaatgggaagaataaaaaatttaattgaaaactctcgtatttataagtgagttcaacctcctaatcctagagaaattgtgagtctttaaaatttaaagctttaaaggaagaggtaaatgataaaaaaaaagatataaatatatcttttcccttctccattaagcttaaatttcaaacttcctatataaataggaatagtaatttaaatataaaagataatatagcattatcaaatagtattaggatttaaatccaattaatcctaataccataaaaaatacaagaaaatttcaaattttcaaagaaaaagataaaagataagtgaaa

SEQ ID NO: 381266 - DNA, 2904 bp, Cannabis indica
ccttctatgaaagttgtggttcaaatgttggaaggagaagaaaacctaaccattccgccgaatcctttcggctctacaggtccaacaaaaacaattgagttaaaatctatacccgaattggagtgagtatcatgagatattagtttaaaaatgttctctacatatgaaagtttcattgtctatcaatattaattcaagtgttttgtatattaaaacaaaattagcaagattatgacttgtattagctttgtgttttcaaattacaataagagcaatctttttctttattttatattttaacaccggttttatgtatttctttgagggcaagcacaagaatttagctatatatatatactacattaccattgtattagctatatatctctctttcaaagaattttttatgtggctctgtaatcgacatgatgacggtcttatgatgcacgctgcgtccctcttcgaagttgtcttgaagtgcagaaatgagatgattcagggacggaagccaaatgtgataaaggcacactactacaaaatgagtttttagcttcttttttcaactcattttataaaaagggaagttaaagggtgtaaaaatatccgtttattgaaaattgacctttaaaggcggttttttttttataaaaaccgtaggtatagaattgtattataccattagagttggttagaaagtaaaagaccttaggtgatgttgcttgattcttgggtgtcgcatcttcgttgattctgaatagagtcgtggtgtttagtgaagtgatgctgcttgattcttgggtgtcgcatttctgcatacagcaacttcatggaagagttccttcacagtgataataatatcacacccgtaagatattcttatagagaaataagaaaaatgaccaaaaattttaagaacaaattaggtgaagggggttatggtactgtattcaaaggaaagcttcgaagtggtcgtattgtagcagttaaggtactgaaattgaataaatcccaaagaaatggacaagatttcatcaatgaaattgctacaattggaagaatacatcatgttaatgtagttcatttgattggcttttgtgtccactcctcaaagtatgctattgtatacgatttcatggctaatggatcactagaaaaatatatcttctctcaagaaggattttcctctttaagttgcaatcaaatatttgaaattgcacttggtgtggcacgaggaattgaatacttgcaccaaggatgtcatatgcaaattttgcactttgatatcaaacctcacaatattcttttggatgaaaattttactccaaaagtatctgattttggattggcaagattatgcccattggaaaataacacaatatccttgactacagcaagaggaaccttgggatatatagctccggaacaattttacaaaaatattggaaggatttctaacaaagccgatgtttatagttttggaatgttattaatggaaatggcaagtagaagaaaaaatgtgaatgcaattgctgaaaattcgagtcaaatttattttccttcgtgggtacataatcaattaagagaaggaaaatttataaaccaaacaacagatatagatatagatacgatggatttaaaaatcacaaaaaagatgattatagttgcattatggtgcatacaattgaagccaattgatcgtcctacaatgaacgaagtcatagaaatgctcgaagcagaagttgaatctcttgaaatgcctcccaaaccatctctaactatgttaagtgagaagcccaatgatgatcatggtcaagagacatcctcttcatcaacaatgttaccattcactctataaagatgagttaattgatcctcaatcgaacaatttacatctacaagaagttgtttttattgctttatatatgtataaatacaattatgttatactatgttgtaccttcttaatttttttttttcataaatgtttattatgttctacaagaatcatcttattacaaaggttaaaaattcgtattttatattctcaactccgaacccttgtttagggggagctgaggttggtatttgtgttaaattttggtttaaagttagagttctattttggttgaatgatgtgtttctcatggggagtttcattgtatggtgtggctaaccttgttttgcaggtacatcttagttaaaaatattttaattatttaaagtgctaaagaaaaagattgtacattcatttttttggcaatttagttgtcaaaatgtgtgttgaactttgatttaaaattagcattctattttagtttaatgatgtgtttctcaaggagagtttgattgtatggtgtggctaactttgtcttgtaggtacattttagttaaaaatattttgattatctaaggtatcaaatggggatattgtaaagtcatttttttgacaatttaagtgtcaaaatattttttactgtaatttctttatgcaattaatatttatttgcctacattgatttcgtgtctttattggtcttttctttcaaaggaaagttttctttttaactgtttcttttcttattttggaaacttatttctcttatgaaaagttgattttatttgaaaattttgaccctaactatgtcaactgagaagtgtaataataatcatggtcaagagacatcctcttcatcaataatgttaccatttactctataaagatgagttaattgatcctcaatcgaacaatttgcattaacaagaaattgtctttattgctttatacatcatgtacaaatacaattatgtatgttgtaccttcttattttttttcataaatatttttaattatgttctatcagaatgcattacatgtaatattacggtggcgtttggttggaggta

SEQ ID NO: 381267 - DNA, 1120 bp, Cannabis indica
tgtattattattattattattattattattattattattattattattattattattattattattatgataagatttttgtgtattattcatttcaattagttggcttagtatttaaaatatactaatttttattttaattatgtagtttttttagaagtttaagaaggaagtttttttttaaaaatgattataaatttaaaactatgtttatgacaagataaaaataaaataccaaatatctttataaaattttgggatgcaaataatatttttggagtaattttagaccaatttaaaaggttgaaagtacaccacaactttgcattcatagaatgtaacctctctttatccgaattttgaaaggccatatccataggattggaattttcaaagctctctcccaaaagttaaagcaaatttttgtgaaaattgaaagaaacatttagatttgataatgtgtgtggattgtttgttatgaatgtgtaatataacggtttaaatttaaggttcacactattcttggttgaaaattttgaaggaaaaaacaaaaccaatgttaagatgttggatttttttttttttaataaattgtgatttcaatgttgtcaaggtcggacttaattcaaatttggtttggaccttagatttaatttcagtcttaggtatttaagactttactcggacttaatttagacctaatttggacactttatatttcaacacttttttgttttagaatcatgcttttcatcctcactaagagtagttccacgtgactcgatagattattttggttaggatgaaaaatatttttctttcttagaaaagatactttgaccgtttagcaaatttgaaaaaagaagaaatatgcacaataatgataatttgtttttttattatcttaattattgaaagcgttattttctaatttttttctaatacggttacatttttatctttcgagaagataaacacgagactcttttatagtattttagggtaaatattattaaataaataaacaaacctctaattacctaaataaagccaatagttattaaataataataacatctaccgttccattaatttttttattttattctttaaaatatat

SEQ ID NO: 381268 - DNA, 4788 bp, Cannabis indica
acattttcttgtagtgagatctgagttcttatggactccgtctctcccttatattgtttatttatttatttttttcaaaaaataaatcaattattttgaatctattttctaatagataagtgatttattgtatattttttttttgttttagtgctaatttatagtatgtggtggtgaatctattttaattatttttttcgtcagtattgaaccagggtaataagtaagaacttattaagaagtgttccatatatatattggtattacaaaaaaattagcatttgtatttacagtatatacgtcagtttcaagaatcgatgtaattagattaaatatcattttaaaaaacataatctaagcttttttgtagcagcaaacaggtgaaatctattttaaataaagataagtttagttttaattaatttaatttcttattaggtaagtctatgccaaatttatatataatttatgtctgcatatattattactcattaaaaaaatgtagctagtatagatttcaaagtttaggtattaatttgtgactatgatggggttgtataattgaatctaatttgttaatgaatgtatatatatgatgattaatgttagtagctagctaggactcatatttaaaaaaagtatcatataaaattataaatgtattcaaataattttaggtgagaagtttattatttatgatatttgataatgtaagaaaatgctgggaataaataaaaaaaaagacacaaacttaattagatgagttaagtttgacagttaattcttgcattagaaagaattatatagttaattgaaaacttgaaatggattggaatggatttatttcaatacaatagatcgttacattatttaggcgtttttataaaatagtcgatccaattcaatccaatctaatccacaaagagtagacatccgcacttgggcggattggaaaattcaaaatctgcacttgtgcaaattagatgttgattgacatgtaaaagtaaccgatcgaattcaatccacgcatctttataaaaaaattaaaaaattatatatataattaatattttaatgtaaagaaaataacaatttaaaaatctaatacaattatatttcaaaacttaatatgtcaaaagtatattcgattcttacatataattttttttctacatacaacttaaaataaaagtaaatatttcgttatacatactagtttttttttcttcctttgaatttgttatttcatttattttaatgtgttgttgttgatataaaataattataatttgttttattttattgttgaaagaaatattttttttttataaatattaaataatttaatattaaaaagtaaccaatccaaaataacagatccaatttgcacttttgcggattagattgaatcagatttgagctattgtgcggattgtattggatccaaaaaatgaaatatgtacttagtgcggatcgaatacactatgagtaaaatagtgcgaattagattgaatgaacacgcctaatattattgcttttgtaaattgttatttttttcttaagttgaaagtagaattcaacctagcatattattattaatttattattataaatattaatactccatctaattccagattatacgtcaatattatatcatgtttgcacgtatatacataataattatgtaacatttaaaacgatgaaatagcctaactctcctcaaatgacgactgcattatattttttggaccaacgaattaagtttgaaactttgactgaaactcatctgagaaacaaacaaacaaatctatacagtgcacacaaattacgtcggtcaattgttttgattggtcaaccctaaataaaaaagaagtaaaattcatcataatatataaatgcataataaaacagctattatgtctccatgcgttgtactgcattatttagaaaaatgatttcctttcttcgtctctatcaaatatccctattgagtccatagtgccgacttccaaaaaaaacacaaatacataaaagtctagcccacaacacatttgccacatatgaatgagagtcactttttgaattctgaagctggccccactttctctctcttgttaaatcacccactgcctatctgccacgtggcacagataacaattcaaactctccttgattttgtaacgtgggttgaccactgaatcttattacttccagagaagaatgaatagtagagaagaaattataattgtattattgttgtctaccatatcctactgttaatattattattgttcaagtaaatattattttggactctattttgtaaaaagtattgattagactccctattttgttaaatgacaaaatgaattatattttaaaatagtaaaaataagatcttaaacttaatttttaataattttattttttaactaactttaatttctaacatgaacacatacagaaaatataaccagttttatcataacatctctagatcagattattattattaagttttattttgacaaaaaaatcagttcaatattttatttgtacaattttaaaaaatacatagtctattttatcatttaacaaaacaaaatatttaattagtaacttttgcaaaatacatgatctaaaatattatttatctttattgttccaactcaggttaacttttagtaagtattactaactaatcacaaaataacatatttagaaaatattagtcaccactaatacccaataacaatgcttataaattgtatgtaagattggcaaaccaagtgaaataactaaaccgctatatacttatataataaacaaatgccgctttctcttaccaaaggcaaacctaattgggtttcattttgttcttatcttatataataatacttacctctctttctctctctctctctctctctttccatatatagcagtagagccaaagcttaaagcttttatatcatattcatttttggattttgagatcaaatggaagaaattgaagtaccaaaatatttcatgtgtcctatatcgcttcagataatgagagacccagttacgacaatcacaggcataacatacgacagagaaagcattgagaagtggctctcaacgacattagttattacttcatcatcatcatcaaacgacatgattacgtgtccagttacgaagctacctttgccgagagattctgatctcacacccaaccacacccttcgacgcctcatccaagcttggtgcaccataaacgcctgcaacggagtggatcggattcccaccccgacaccgcttttagacaagaggcaagttcttaagcttttgagagaattagttggggctaacaataacaagtttatcataacgttgaagaaaatagtagctcttgccgagcagaatgagaggaacaggaggctcatggtggaaggtggtgtaaacaaagccatggctttatttcttattaggtgttttaaagaaggaaataatgtggttggaattgaagaagctcttcgtattctacgtctcgtttggactcctaatgatgaagttaaggcctttgtgaacgaaaacagtgattttgttgattctttggcttggattttaagctgtagcagtgaaaaagatatgagatttgaggtcatttctgtgcttaaaatggcgattgaagttgcgaattcgagtcgaatggagcggttaaggcttgaaatgttcatgaacataacgaaaaaagtgttgggtgagagaagtgtttcacatcaaacaattaaatcagctctccatgtgctaattgaagcctgtccttggggaagaaacaggatgaagataattgattcggggcggtttttgagttgattgaactcgagttaacgaaaccagaaaggcacacaaccgagatgatcatcaaccttttggcgcacttgtgctcttgcgccgatgggagagcgaagctcctccagcacgcctgcggcatagcaatggtgtcgaaaaagattcttagggtttcggaggcaaccgatgaccgagcgattcacattctttctttgattgctaagttttcagcaacgaatgaagtgattatagagatgttaagggttggggctgtgacgaagctttgcatggtaatgcaagcagattgtgctccttacttgaaggaaaaggctacaagtatactaaggttgcactctaaagtgtggaatgattcgccttgtattgctgtgtatttgctatcaaggcatcctcggtattaatataatttaacattaatttactataatttttggacctgattgtacagttcttattgtaaatttttcaattaatgatagattatatatatattctagaggttctataattttttcaagtagaaattaatcaaaggcttgtttaaattttgaatgttatgtttcaaattaatggagaaagcataagatgttatggtttgagcattgctattgggtggtgcttaacatttttttagaggtagtgatttgttattagctactgatattctctctaaaaattattatattaaattatataggacatacttaattacaacaataacgatatgacaatgaggatggtgttaagtaggggtgttcataaaatagtcgatccaatccaatctgcacgattcaatccaatccaatccaatccgcaaagtgcagatatccgcacttgtgcggattggattagattggaaaattcaaaatccgcactaatgtggattgaatgttgattgacatgtaatctaatccaatccacacatat

SEQ ID NO: 381269 - DNA, 769 bp, Cannabis indica
atcctatatgcaatatgttaaaatagaagctcataatacaattattattattattgtcaaacaaagactttcctatggttgcctcactaatatgggaatatacacaagctcttacaacactagactaaaaggaaaaataaaaagaaaaatatacaattagtatatataacaagagtaaaagaacaattgtcttttactcaaaaaaaaaacaaaaacaaaaacaaaaacaattgtctaattgagactaaaaagaaaaaaaaattacagtgattcattcattagtgtcacagttccaagcatcaatacccaactgaaaacaaaaggaaaaaaatcatctccacacaatcctacataaaatttactcaacatgattaaaaataaacataatatacacaccatgactctaagttcaaatacataaaacacactaaatcttttaaactaatcaataggaaagatccaactacaatagaaatatatgaaagtaagttcaaatatagcaggaaaatgattgaaataaaataacatcacataattcaaataataagtaagaattttagccaaaatgataatatccttacactattttccatccggaaaatttcaccttcctataggtacttatactaacaaattatcaatacaaaaagaatgaggctaaacccactacaatactgtaagggctcgtttggaacgtcgtattaagtcgtattgtattttattgtattatattgaattgcattatatatcatatttttatataatacta

SEQ ID NO: 381270 - DNA, 4062 bp, Cannabis indica
ttgaaaagcacggataaatacaggtcaggctagcacggcacgcacaaacttacaacactactcctaatatcttctctattctattctttaaaatatctcactaaaactctacttttttattttgcttcacacatttacattacactatacatcaggttctttataactttctctattatttaaatattatatctttattaatatttaataaaacacacaaatgattaaaaataagaatttcactatttattgagctatagagaatagttttttgcgagtttgaagtaagatataataagcgtttaaagcatttgatggagttcaattttgaattcttaactattctatttaatttttttactattataaatcacttattgtatgtattcttaaacttgcatctctcgaaactaattcaaagaatttagatgagcaattaataaattttacttaaaacttaaatttcaatcttgtacaaaattaaatacaaactaaaaaacaaattgaaatagtcttgtcgtttgacatgtatgttgtgtgagtttggagttgttgagtgtcgttctttgtgatctttggttcaatggcgtctaggagtcgggtggtggatgatttgggtaacaggtgggcaaatttgactgtggaagaggaagaggaggaaggttttctttaagatcaggaggaaggattggccgatgattttgatggtaggtggtgtttggtggggagatttctatcggatagaccgacggattttgatacagttcgaaacgtgatggcgtctctttggtgcccagggaaaggaatgtacgttaaggaattggaaactaataagtatatattttaattctttcatgaaatggatatcagtagggcgttggaaggaacaccatggacgttcaataaaattcctctgattatcgaaagattgaaagaaggtgataatccaagatcatgtgctttgaatacaatggagatatgggttcaggtatacaatcttcaaacggggtttaggagtgaacatgttttaagggctgttggggcgtatataggcaagttcgtgtcttcatgtccaaagaattttgctgggatttggagagattatttccgagttcaggttttgataaacatcgatagacctctgaaaagaaggatgaagatattcaagaataaaggagaatgatactgggctaattttaagtatgagagagtgccaactttttatttcatttgtggtattatttggacactctgagaagttttatcatagactgtttgatgaactattggagtccattgttaagccatatgggttgttcatgaaagccccaaatcgtagacaaggaaggcaaataggagcaaggtggcttcgtgacagtatgggaaaacctgttgaggggctctccgatgactcttcggcggctggaaattcacaaatgagtcggcgtacaaatccgagaatcatggagatggatgtgggaagcagcggaaatcaaggggtaataaatttgatgtagaagagaatctgccatggagaaaaatcagggagagaataatggtgttacaattatagcagctaattttggtaggagttttgaatttcaaaaagaaggaatatatatatgactctaagaggagacgtacgtaagaaattgagagggagggccagctggaaggtttggaagtgggccaaaatggagggagtgagttggtgggccgatccattaataataatcataaagtaatttatgacaatgatattgttatagacccaaaggaagttaatgaggagaaacaagggggtgaggagggggacatgaacgaagctagtgaggaagttggtagttttaaaaaaaacttgttattggcggattcttgtgctggggcccgccaagaacaatgagtttgttaagttggaattgccgtgggcttgagaacccgcggactgttcaattcctaaaagaaattatttttcaaaagagacccaatttgcttttttttttgtgagacaatttgtaagaaagaaagagtggagtatgtaagagttatgtttggctttgaaggtagttttgttgttgaagctcagggtcatagtgggggtcttgctatgttgtggaaaaggtaagaggatggtaaaattcttagtttcagcaataaccatatcgacttggaggtgcagttggaaggttatccactattttgtgcgactggcttctatggtgaacctcaaaggaatttgtgggggaactcgtggcaacttattagacagttggctggaatcggttttaccatggtgcttattgggaggtttgaataatgtccttcaccttagtgataaaagaggaggttgtccctatcctagatggttactttagggatttcaagatgtggtggcgtactgtaatctaattgatatggagttagtgggatatccgtacacatgggagaaggggaagggtacttcggcgtgggttgaagttaggttggacagagcacttatcaaccaggattagaacatgttattccctgatgcaaggttagaaaatttagaaatcttagagtctgatcattgtccaatatggttgaatcttaatttgtttaaaagagtgttcactaccaaaaagtttcggtttgaaaatgcttgggtgcgtgagcctatgtgtaggaaacttgtccaagataattgggaaacacctggttcaaactctttgtctttaaagattaagtgttgtaacactgctttggtcgaatggggaaaggagattacaggaaattttaaagagagaataagcaactgtaacagagtaatgaagctgttaaaaaatcgaagagatgtcgaatcagtaaagagatataaggaagcccaagatcggttatttgaagttcttgctcaaaatgaggttttttggaaacaacgctcaaaacaaatgtggttgcaagcgggtgaccagaataccaaatatttccattcttgtgcgagtagtagacggaaaactaatcagatttaatgtttaaaaaataacaatggagcttgggtggattcggatagtgggctggctggtgttgtggaagattacttcagggagttatttgctgccaccaacatagattggagtagggttacggactgtgtgcacaaccaggtttaacatagtatgaatgaggatcttactactcccgtggaagccaagaaagttcgaaaagctctatttcaaatgcaccctgacaaatcgccttggcatgatggtttcaatcctggattttatcgaaaattatgggacattgtgggcaaggatgttattcagttagtacaactttacttttggtgaatttcctattcatttaaaggaaacaaatattgtgcttattttgatgaaatccaaacttgaaagcatgagtgagcttagacccatagcattgtgtaatgttgtttataaggttgtttccaaagtgttggcaaatagattaaaagttgttctccccaatgtgatttctgaaacccaaactgcttttttacctggaagactaatcactgataatattttagtctcctttgaagttatgcattatctaaaaagaaagcaggttgggaaagatggttttatgacactaaagttggatatgagtaaggcatatcatcgggttgaatggggtttcttacaggccatgctgaggagattggggtttgatgagcatttgattaagctcattatgcagtgtgttagctctgtttcttatatgattactgccgggggtcatgagattgggcctattattcctaccagaggattaagacaggatgaccctttttcaccctatttgttcattctgtgtgcagaaggattcccagctttgataaaagactatgagaggctagggaggattagggggtgcaaggttgcaagtgtaaagcccgcttagttaatttggaaattatcagttgattgtgattaattatgaaattatttatagctatttaaataatttattactgttatttatgttattcagtagcttgcatattttgcatttccggtgtccggtattttggaactcggcgtt

SEQ ID NO: 381271 - DNA, 648 bp, Cannabis indica
tttactagcgagtaagaaattaaagaatgagacactcactggcgattctgaacaaagctgcagaggtactcgataagctggatgaccgatccattccttatgctaccgtccttaactcggtcattgagctgagttgcaagcatcgcgtgctgagtggaaactgcatccgagatcaagagtctgtacctctcctgcgagcttccgatgtgcttgatatctaggatctggacgagcggcttcaagttcacgtcgccgccgacaatagcgggaatagcgttgggcgttaagtgcaccggcattattaacttcttggagagaaaccctaagcgcgagggtgagaaagagttgagcgtatacttctgtgaattagggatccaaattcaattcaatggaaatcgaattcggagtgggtcagagtttttggagaaagaaatggaagaagatgtctaagttttggagattttgaattggcgggcagggccgcacttaaccaaaaaaccgactcagaattgagaaattttatatatatattgcctagagcggagcgggtgtcttattttctgtttgggtattttagttatttaaatgggaaatttcaattttggccttaataaattttaatatcaaaatttagaccctccactaatt

SEQ ID NO: 381272 - DNA, 1227 bp, Cannabis indica
aaataaaaaaactatatataattctaaaccaaccggtgactaagagaagtgttgaagaagcagggaatgccatgccaacctacatagtcctctatgcaccaactaagaatcacaagcttctgtttgccttaaaactcctttcttttgttgttgtttttcccaatttctcttcactagtaaactgcagtagaatgtcagcacctgttatgaatggggtctgatcctcttcgaactcttcgcttgttcgattgatttggatcaaacgtaactgaaggagcaggcgccaaaaccagctttctttgcaaatcttcaaaagcaacggacttgaatatatgcagatcaccgagaaatggtattttcaccttgtcccatctgagagccaaatctttgctaccaagggcagaagtgttttgtggttgaagagctaagaaaccaatacaaagaagaagaagaggaattactctattaggcaaaaggcccatattttcctttgttacttgacaaaacaaaacaagagagacagaagaaagacaaatagggtactctatactttgaagcaatgatgagggaatgagtttttgtgttatttggattgtgttgtttgttttgttttgtttattttttgttttcctttccctttcttatggttcattcctgtgagaacaagccaacggtatatgccttttatgggatttgaaagacaaaaagcacaataaagtataagatagaaggagagagagggcccaaaaaacaagtagggaagtttaagattcatttcaatcataagcctgccatggaagcaatataaggctgttttagaagactcttcttctgacaggtttgaacaaaaagttggtttggaacactatcacttgggaagccaagtatctttttagtttgatttccccccacatatctcaatcatttgccttgagactcttttttaccaaataaagaccaagttgccacatcagatcactcttgctgatgtgtacattcaacatatcctataagcaactcacttttgttaatatgttgctttttggtaaatttataatttatataaatatatatggctcatctgaatctaatacagctcctgttttgctcatcaaagttctgaagggctatagaaaccttcctttgtattgcatatgttctttaaagtatgatattatgatatgactaatattaattgacatctatactattttttttttttttatt

SEQ ID NO: 381273 - DNA, 3313 bp, Cannabis indica
gttacgtacattttcaattataaatttttatttatagtatatataataaaaaaaaaaaaaataggacattttttttaaaaaaaaaagaaaattaaagcttaaaaatatagagaccttgtgtaatggcctaaattgccgaacatctgaatgaaagatgttcatcattttacatttcatcatctgaagttctattcagatgataaagtagtacatctgtagcaaagttaaatatttaacacttatataatgtgctattatgtcaaaatatataaggcacattagtgtatagttgagatatattggcggtaaaacttttcaattttcacatgcatatcctgataagcttaacccttcaatataattttgaaggaaaatgttagttttggattacatctgaattcaagttcagcgctcttaattaatatgactgtattaattaattgtgatgttgattggcattgtatcctaatgaccgtcggtttactattggcttaaaattataagaagctaggaattgtatcacgatcaaaagcagaatatcataaccttaccaatccaaaagctgaattggtcatagagatagagcttctttctaagattggaatccaacaactacatcctccaactatctagtgtgataaccacagtacaatctcctcatgtctcccaatctagaacttcatttaagggccaagcatatgaattgaatttatattaattttatttcagagagattgttgaacaagcagctattagtcaaacacagtccaccacatgaccaaaaactacaaatatactaactaaagctttttttatacttgtgaagcaacttagtttagcttccttaattagtcacactcggagtgtcggtattttattagttgattaagtatctgtttatttgttgttcatttgtacactgtagctattagattcagtgacatgatcctgttgaattagttctgtataaagagcaattgttctgattattcaatacacgatctcttattctaaatactagttacaaattctccttacatatattcagtttgtacatttgagttatcgtttaacaaggtcaataaaatggcaaaatggactttcattatgtacaatagtactatatttaatagcattatatatgaatgggcattggtctctaccaccattttgaggtggcaccttaattaatatgagacctgagatttagaggtggcacattgattagtagttatttatttaatttatagtgatatagcacctagaaaattgctacacaccactagtgactgttagtactaaattttcaaaatttagcaaattagcaaagcatgcgtaaagcatcacaaatttgaaacttgtaatttgatagaatatacttgctaattagttatataaaaaaatgtactaactaataattaagaatatatgtaattatatgtgtggtaatcgttaagtctatattagtgtaattgttttagctggagacgaactttgatatattttttttttcaggtataataattctaacatgattgttttaataataaagtacataatacacccacaaagctgacgattttgtcaaataataaataaataaatcccacacgattttgaatagctgagaaaactcaaaataattacactagaattactgttttttctttatgatatattgaaacgagttaaaaataattgttattgatattttccactggaatagttgttattttctatcaatttttgaaataactcaaaatagttattcgttgttattcttagaaaatttccttccaaatttaattttccactaatatgaggcggaccaaacgggaaacccagtcacaacaccactcatattattcttcccggccggaactccaaccacagaagacgaccccatcgacgcagaagacgaagccgcgcacgatcgatactccgacttcgttttcactgaaagattgataatcccgttcctttccccattctggtctctcaatctgtaacttaagaaatgtaagtaattctccggtaggtacccaccggaaaagtcggacaccggaaccgaagcagttccgacgagtctatttccgatcgccgttctgcagtgtacctcgacggtcaatgccgcagcgtggtggacggccggtaagtcaaggacgagtttctcattccagtttgggttgctaccgcctttggtatcgatctcggttgtttggaaaacgtttctgctattggatcgaacgatgacgaaggcatttttcttgatgaatctattgtcgatcctgaggctttcccctgataagatagtgatttcgatagttggcgatgatgatgatgatgatgatgaggaagagtaagacttggccattgtagacgtacgtaagtgatgaattttgtgaagctctgaggtatatgtatttatgttagaaaattaataattttataggtttgtttgggaggaaggttaatggaaaaaggagagaaagagaatatgtggttcatttttatgaactgctacgaaagttcctaacaaacgcggtcttttttaaatatgctcattattaatctactcattaattattaaagacctaggctatgtttggtaggaaggagggagagttgaatggatggagaatataaaaaagggagaggagagtaataatccatataaaaaagagagaggagagtaataattcttttatgttgtttggtaggaaggatatggattgattgaaggataaatatataattattaaattataaaattgttattttatccctataattattttttaataggaatattcttttttaataatatttattgaggatatttatgtaatttacaataattgaataaggagagttctcatccttccattattaaagagattacaaattagaaatttgagtggatttgctattcttttagtttttctttctctccttcaatccctcttgccaaataaaggatttgttatctcctcccacctctctcccacctctctccctcctctcctcttcatccctccacttctccctcctaccaaacatagtgttaaaggtggtgtttggttcaccataactctaatggataaatatgctcattattaatccatatgtaacatggttacgtattaaataatgtattctttattataatcacactttattataataaaaaaatatggaaattctatagtgtattcctttaaaaaggatacatcgatacatctctatctattttagtatctgaaataattttttaattaaattttttctcattgtcatgtaaattatacttatt

SEQ ID NO: 381274 - DNA, 1732 bp, Cannabis indica
aaatattctcaattcggtcaactcaacccatgaaaagcggctatgctgatgcgacctcagaaattgagtaatccatctattagtggttgagatctctagggaggcacttcatgtgggacttatgggtatttgttttggtccaagatataccaatatagttcctcttgctatatagccaagaatgttctttattgtaagaattctagattttggaatggggtgtctccctaatggctattctatacaaacaacaacaaaagagtaaatactggcaatatctcatatttacacactattggcattgtttgcaataaaaatttggagcaacaaatttggccagtgaaaatgtcatatataggcgtccaccctcgtggcgatacattcaagaaagaaactagattgatgaagacatcctctctacatggaagtgtgaggcctcccataggatgatcaaatcgaattcattcttctgcttgataaagaatctcttgaaatgataaggctcgttaaagtaggatatatagatcagaaatctcttcattttctttccatctccaacatagcctcttgagacatcagctgctcggttagcatttgaagaagtgtttgacactagcaacgccaggcaaacgaaatctcattgttataattagaagaaaagtggaaaagatatcgaaagtgatgaagaaataagaatgttgcagacttgacttgctatactaaaccaaatttcatgtttatattaatgtagtataatgcaagagagaaatgtgaagtgaatggttgtacactaatttaagatcaacaacataaatgatcactgtcaatatattcaacaaaataaaaagaaaacataaaagatcagtatatatttcaaagaaaattaaaccaatcagatatttactatttatgataaaatatagttgttgattataaatttttgctgagagtacatggataatagtgtttacaattacatagtatttttctgtccaaaaaaatgattcatcgaaataatgactcactattgatatcaatacatctgagatcgccaaatgtagttcagattcgggagttttgaaattaatttgagatgatttattgaattgtatgtgtaatgcatttatctcgttccagcggtaaagatcgttatttttgaactgtaaaacaaaagatataaattagttaggaaatagtaaatattagttagtgaatgaattataataacatatactaagttatgtgatatatataatgcataaaactagaatatgtaaactacctatttctcagcttattattacctctaattaggaattggtttattgacgattgcgaccactttttcaccgagttctaaaagttagtagttgaggtagtctgtcgtaattggacatgacgaccatagcctgttggtttactcgacctctaagagtgttttggaggctatgttcgactaccgagaaaattttcagaggcttgtctgcttctcctcacgggttgatgtcgccagttaaataccagatcagtcaattctttaccacaagtctgtaaaatcacaaaccaagacttgtcatcaatctaagttatgctgaaatcaaagggaggattgatgtcgccagctgttatctcattgttcctgaaatcacaaagaaaaaaaaaaccaaaatgaaaaaaaaaaaaaaaaactagttaaaaaaaaaaactcagcaactattaaaaacaaaaataa

SEQ ID NO: 381275 - DNA, 3589 bp, Cannabis indica
aagagaaagaaagaaaatcatacatctttaagtcttacactattcttattcccaaagtcatgttgttggtgcattttctaagacctttgttggttcttttccacccaaatgaaatgaaagaaagaattttgattacaaatacaatcacaacttacaatgaactctacatcattggttcttttccacccaaatgaaacgaaagcaagaattttgtattacaaatacaatcaaaacttacaatggactctacatcatagtttgcaatttacagtatgttttcaagattaatacaatttctcaactcattccttctcaaaatgttagaataactaaaaaaagccaaaaaacaataaacaatgtccaactcaaacaacccttaaaatttacaagtatatttatttctttcacactccaaacaccatttctaccttttcttaccaagaaacttcataaatgactacccaacacgcatattcttgaattgttttcatagtattttccgaaacacaaattttaatccaaaaatcaattctttattggtctatacatcacacaacaaatcattattaaatcatcattaattttctcaagcacttcaacaaaactttctagtaagaacccaaaacttaaaaaaacaaattttctcaaactcaaagtcaaaatacttacaatgtataaactcaaaacgtgttccattcaaattcatactcggtcaataaccgtgttcaactcgcataccaacatagatatatattataaaaatgtaatctttattcagaacaagtatcaaagaaaccatttttatttttctcaagcttcatcaatgaaattttctcgagaaaatcatatgggtaaagagaaaacgacccaagaagaagaagaaaaagactacattgatcaactcccagatgaaattcttcttacaatcttcaacaaaattctcgatgccaaatccctaatccaatgtcgaacgatttcgaaacgtttcaattctttaattccccaaatcgattcaatttacctaaatctttctcatcgaaaaattccccaaaagaaaccttttttcaatatccccaaatcgattcgatttctacagagcattatttctcctaataaaaccaaatcgagattgaacaacaacactcggaatattctccattaccaacctgaagaagctctcaagaatttcaatcacgtcaaatccctaaatctcgagattccttcttctgaagagaaaaacgacaagtcgtttttgaaatgggcagcagagttcggaaccagtttaaagagttgcgtaattatcggggctaattcgataagcaaaaacgacaatgaaaattcgcaatctcgaattgaatctcagccgttgattttatccgacgaggaattgaagctgcgaatcgtgtggatgatatcgtctttaatggctgcttcgtcaagacactacatgttgaaacgcatcgtcgtagattttccaactatatcgaacgtcgtcgtttcggatgaggagaaaagagggaaggtttatatgggagcggagcaactcagtgagttgagattgaactcggtaaacgacgagtttaaattgtcgttggaaaggagtgttatacctgatttgagaatgaaagtgtggtatgtgcctaagcttgaattggggtgtgggcttgtgatgagtggggccactcttgtggtgattaggcccatggtgagtggtgatcaggcccaggcccaggcccatgatgataatgatgtgtttagaaatgggtttgattatgaaaatgatgaagagaagaagattgtgggtgaagctattggtgagatgattaagatgaagaagacttatgttatggaaatgacctctttttaattatatcactttgttcaatagttttttttttatttttgtgatacgaaaattgattatttattggaaattctttgtaagtttaaactaaaaaatttacataattaaaatgtggtgtttgtgtttcatatgaattttgttgtagtgattaatatgtttttttttttagatttatttagattcgatctaatcatatattaggttttagattttattatctgattcgatctaattaatttcaggcatccaatcgatctagcatctattggatgatagattggatcggttttattaattggatgtatttattggtttaatttcggtttatccaatattttaggttggatcatcatatccatctattcttaaagtccaatataatatgtattggattggattaggtccattcaattttttttaaaaaaaaactaatataatatttttaatatttaatttttatatatacatatattttacgtataataatataaaatctaattactcatttaaactaaatgaaaatactaattagttcgatcggatattagatacattaatttgttagacacttcatccaacatccgatcaaatctaattggatatttaaaaataacatcttatctgagctaatcacaattggatatccagtacttggcggtcaattgcaattagatcagtcagtttttattgaattaaatcaatttatgacatcccctgtagtgatagttgaatttgattttgagctataatatgttttacttttagtaaaaaaaagaacgaaaaaaaataatattattttaaaccttatatattacaaaaattatcgattagtcttttgataaatatcaaattggaccttaaattttcataaaagatacaaaatactaaaataatattttaagctcaatttttgacaatttttttaatataaccaacataaaggaaaatctagcatgaacaaatacaaaaaatatcaccagtcttatcataacatctctagatcaaataattattaagttttatttaaacaaaaaaaataactgaaagtattattttgtactattttaaaaaatacaaaatacaattaaatagttcctaataactcttgcaataaataaactctaccaaaaaaaaaaatcgtaaacgacatgaaaagtcataaaacgacaacaaaaactaaaaacgacaaaataaaaagcatcagtgtcttcgtcgtcgtcaagctcagttggtcaaaccttactgagcagccagccatggaggttgatccagcagtagaatccgaaccagaaatcgttaacttcggcaaatctataatagttccaagtgttcaggagctagccaagcttccattactctaccttcctccacgctattcccattgctttcaacaatctccgatcaactccaatgatccattgtcgattccatcaatccctattattgatctccaccgtttgggtacgacggaattcactgattctgaggttcagagattacactcagcttgtcgagagtggggatttttccaggtaaggaagaaaccattttgccaatttggctataatttcataaagtttgctactttactcagaagaacccattttccctattggaattaaatgcatttttagaacccatttgcccatttgaattaaatgcattcttccttatgagcattggtattttttcatattagctgtaaaaaaagtttttttttttttt

SEQ ID NO: 381276 - DNA, 1739 bp, Cannabis indica
gtttattttagttgactgtgggttaattatggttattaatttgggatttttatattaatatttggccattagaatatagatcaacaaggccagtgctttgcttattagttttgtatgtcggtgaatcaccgcttctgtatattatttttaaattttaataatatatatatttatatttgcgtgaattggtgagttgttataagttgctttcaaaaaaaaaaggaaaataaacaataaaaagaaaaaatcaagaagatttgatgatgattcagagaaaggcacacttacgaaaaagataatactattatttttcttctgagttactgcatcatcaaggtttcccaatttacatacttttgcggatgattcacgggatttttcaagatgaagaaggttaatctgcagttttaagtatcaagtatattataggtgggatatacaaattgagtattgttactcgatacttgttatgcttagcatattatatagttagtgtcttatgattgtttagtgatatttctttaaaattattttcttaaattatataatattcaatacttaattacattaatagcgatatcacattcaaaaaaaatgttagtgaccatcttttaacatttctctattctacacattttaatttaatatataatataaaaatcgttaatcaattataacatgacatatcaatataatagtgttaagcactttaatagtaatgttctttcaaaataattaaattaatatttatgaatatgatacccaactgcaaactaaggagaaaatttaaatatgtatcttgtgagtattgggctaggaggattggaacctaggggtattttagtagtttttttactttatttttcaaactatatcatcaaaatactatttttatttttttattttacatctttagagtaccacttctatcaacttctttaaattttctttacataatatttaaatacttttatattaattaaagtactaaaagaaagtaaaatgtttgggatgttctacatgatgaaaccgtgttattactttccgtaatgttaggatggacaatcactgcctatagtttccactctttgttggacaatttggggagcaaagaatgataaaatttggaaaaataaagccaccaaaccaatgtctcttttatttttgcatttgctgttagctaccttgaacaatgaaaatctgttcaactttagatttggagtcatcacggactggtttaatggccggggatagagatgagcgatggtgcgtgcctaaggctaatgaaatcaaggtaaatgtagatgcatcaatttttgagaacaatcaaggctttggttttggattgataactagaaattaatgagcatggatttttgttggaaggagtaactaaactctgtaatggggttgtctgtcttaaggtagcagaagcgattggcgttagggaggctttgagctggataaaatagaaacgatagcgatccgtgactctcgagaccgattgtttagttgttgtttaagcaatttgaagttctattgatatgatctctttatttagtcaaattattaaagagtgtcaaaactagtttgtggacatgaaatatttcttttattcgtttgctagagcttttaatttatatcctgataatagttttagtataaaagatgttccaactgatttgcttttatgtttggtatcggaatttgaaggttaataaagattgattatttttttt

SEQ ID NO: 381277 - DNA, 3540 bp, Cannabis indica
gtagtagtgagtagtgagtagtgtagtagtgagtagtatagtaatagtagtacggcgaacaagaaggagaagaaacttaccccaaacgacaaagcctaaggagacgccgatcatatatatatatataactcatcatcatcatcatcatcatcatcatatatcatcattttctattttctacttatactacaagtatttggatctatactatattattattactataataatgatgagatgatgagaatatatatatatatatattagagttgatagatcaaatatccttatttgtttgtgtgtttgtttctcaatacattataatttatttattaagtaataataggttttgcatatatataaataataaatatatattaattgttttattctttatgtatagtaccccaccagaataagcagaagcagaagacacagttgaattgcatgtatgtaggtccagactctcagacatatttggctttatataatcatcacttctcttctcttctcttctctctcatctctcattaatgctctcttctctttctaatgaaattacaacttattaattacttctattctaattgctacctatatatatagagaaaaacaacaacaaccacaatatctaatctaatacatgttagaccgaaattaaaagtaatgaaattggaacgaattaccgatagaataatctggctgagtcgcagataatgtcgctttctttaagacatttcgcggctctacccgaagtgtgcacgacagtctagcaaccacgacgtccctaggataaaacagtctttgtatacgtatgatattttttgcaccgaactatatcgctctgttacaccctaaagtttgctttgagaaaaatcgtaaggaagaaagaaaaaaaaaattaatgttgaaaaagatgtgctcttctgttgttctgatacgacttatatagaagtcgatccaaaaataaatggtaagaaaacggtaatgttatcgttcgtggaggaattggatcgttggagtaaaaaacggatcattgactgatcacgttttactacttctgatcatgtgttaaaattaattaataaataaataaataataaatctttacttaattaaataatttttctttaaaaattaagtgacacctcacccgcgccaatccaattcggcttgggtcggtggcggcggcgacgcgcgtatggtggtccagtgtgtgagttctaacccatgcgcacaaaattggatactcctcggaatcccaacccatatttcaaacttacactagttatacatttcaaataaaatatttctatgccatgtaagatttctatactcacacattttacttttttattatatataatttgtacattttaatttgtttgaatttgagtttgacttttactatttgatgatagatattattaattacgatcggatcgactactcatacttacgattgatggatcgagtatagtatagtccgaactataaataaataaatagtgtatacgtactgatcataatcaaaaatacaaattaaatcaaattaattgtataataatataagggtatcgatatgttaatagggtaggtagagcattaattggaaagcatctgattttgctttaaaggcaatgaatttatggaatgcaatgattacaatatattagatgggccgggggttgattctgcactgcatgcatctctctctctctctcccctttaattttcatgagaattttcaaactttctttctaatcaatatatatatatattttaattaatttgttggtcaacgtaccctggactccaaaatgaatgtatattcacacgtacacactctcgtaattaataattaacaacaaacacacactaaaactaagaacattattattggatatcattattgtccaaaactttttatgagcgaagtgctataattattggttggccattagaaccttgttattaggcactagtagtgtttagtaccttctcgacatgtcacgttgcgattggctagcgatactccctaaaagctattatattaaattatgtgagacttgatacttagttgatcaaccaataacgatattaacacatataggagggtgttaggcaccactggtactttttagcatttctcttagctatatattacttgaaaattattttttaagttacatgagactcgatacttaattatactaataacaatatgatactaaagagactactagactaataatatcttttagcaattttctaaaactaatgactatacgtagtagtagtagttgacgtgtcttaaatacttaaaaagtactacacatcgtgcatcatttgctctcatcataattccatgcgttcttcttatttcatttcaaccatgaatcatcatcatcacatatatatatactaattccgagagaaataattgaatgcatgtttgtttaattgcagtactactactactgcatatgcattcaacacacacgcatgcaaattatatatatttattttgtacataaatgtatataaaaaaaaaaagctttcattcttagtgactctctttaattttattaaaataaattaaataaataaagttcaatattaaattttaccaataataatcctacatcgcagaatagtaatgtgaatacgctttagcttttctctttgaaaaaatgagacccacttatgcctttctttcatttagttcttagttaatatatgcttattaattttttttaagacattgctattaaacagcagtggtgcctatagcacctttaagacatattatcttgcgtggacaatacttcttaaaaattattatattaaattacatgggactcgatatttaattggactaataacaatattaccacgtatgaaagtactaagcactacgggtgccttttagtattgctctaatttttaatattaactatattaaagagcctaaaacctagctaggtatttatctcatcatcgtctacattaattaattcatgcacatgtcctcttattcctccccaattaattaattcttattattattaattctcattttaccaattattatatttatggcctacctagagctacttcctatacatatccacaaaaattcaacagtattagtaataacttttctttttctttttgttatttttaatcatatgtaataagtttttgttctgataattaatgattcatcatcaaaatgaatagctgaatttaatgctaatttaataaagagaaatgctaaagcgcaccagtagtttttactgcctagcactctcctatatgttaatattagtccaactaagtatcagtttctatataatttaatgtaatagcttttaagtacactacaagaaatatcacatttgccagcacatttttgtactggcaaaagttagtattgcgctggtaaaatagaatttacttgtcatgtgttggcaaatcaatgttagtattagaacttttgccagcataaaatgaaaagcgctggcaaagatgactttt

SEQ ID NO: 381278 - DNA, 1238 bp, Cannabis indica
taatcattttgttggtttcttttaattattgaacatttatatagcctactttttatatccttctttctttaacgtttaaattttcaaagcaaaaaatgtatttatttctgtttactttgtatgtgaatatattttcaatacttttgcaatctcattaatgttaattttcgtagaatactatttttatttctgttaactttgacgtattttgatgtatatttaacaagttttgacgtattttgacatatatttaacaagttttgacgtattttagccatttgagataggatacagtgtcaacgactgactaaaatagggtaacttttgacgtaatttttgacttaaaaaccgtcgagatagggtaattcattatgtatgcttaactaatcttgacattttaactgctgagataacttatacttagtggttaattacgacgacgcgcttaagcaagagaaataataatatatatattattttaattttactttaaatatgcttgtatttacggtatttacaaatacaaataacaatataatattatctaataaaatacctattaattaaacaaaagactcataatatattatgttagaaaatagttgaagtatgacaaacattatattttccagcaaacaaaaaaacaaaaatatcctaagattatattggcatatactcagttaagtagttgatttattattcacgcacaatattaacctcatttattatattttcaatcttacaatgacatttacaatatcaaaattaatatcaaattttatgttagttttttagttattcaaaattgatccaattcgaatgcacagtaataggttaattactcacatatttcagaagatattttttttttagttttctgccataattaagtctctcattagctcccttatgaaaaatctcacaggatgctatcaagttgcctagcacctttcatatacatatattatatatcaatctttaatctataaaagaaatgttgaaataaaataattttcaatttcagccttattaccttaattggaaacaaagttatgctctataccttttctctcatactattcaaagtattatgtatgccaaaatgcacttaacaacaaaatgagttttcaattaaaaattttaattcatgatttattaactttataaggtttgtatcttagataaagttaaaataaaattaaggctaattagtaattttttcccctgaactttgacat

SEQ ID NO: 381279 - DNA, 4762 bp, Cannabis indica
acacccgctacttttcggcttgtccataaactccacatttgtatccttcttaggtcctatgaaattgttgctttgataccaagttgataagaacaacctgctcaattcagatcagtagcaaaaattaaaggagaataaaacagggatgatggataaaacgacagaattggctttgtattgaatactcaggactttgagaacctggttctctcccaaatggttataaaagacttaaaatacttcacacccctcaagagaaaactatctagccttttattacaaaatcagtgtaccccaaaaagagctacgccttacccgagtacccttcctagtcttgcgagaataaacgtaagtgatggctggtctatcatactagtctagtcaaatattttaccataatgttatttgatgtagtggtaacaatattcctaaaaggaggtcataagttcaaagttccattctttaattttaattttttttatgattgtaatttgtagggatttgaatttagtaattaatgtaaaatatgataattttaaaatttattttatacacaaatatttattattttattttttattatagctaaatttgtaattttcatcaaaatgttaaaatctactgaaaataaacattgttattaggtattattgtctctaacaccactatgaaatgtcatattgtagttgtctataatttaaaaaacaaaataagtgaaatttgatattaaattttaccgatagttatataacaaattataaaaaatgctaagcaccaaaatacagataaatcgctccacttaaattttatttcttaattcacctctgatcaggttgaagcatcgtattccactcaacagaatgcttttgtggtgagacaataacttatatgcaaattggaaataatgaaacaactagatcaaatcaaactactatcactttttgtatcattattttacaggttttgtgatttatgtaatattgtaaacagtaatcaaaacacaaatttgttctgttctttgcaccgatagattaataccaggaacgtttttatttttttataaataactatcgtgagtaatattgagtataataaattcccccaaacaaaaattgtattttaagaaatcataaacgcctagtttttgctgcaatttagtaattaacaaattaatcttggctattgtgatttccatcaatctcttttctaactttgaatgtcatgaaaaaacctgtagaaagacaagaaagtaaatgtgtaagaatgtatttatatatttatttatacatattatatacatagagagactaatggattaggttttttttttaaaaaaaaaatttttaaaaaaaaaaaatacacactaatgtaatgtataacatgatttctggatacataattttgtcaattcaataacattcattaacattcttcttaactatcttttactgatcgttcatagaattaatgtacaacatttgcctatgaatgaaagggcatgacagattcataaatgtccaaatacaagacttggaaattttgatacgatgatagttaattccaacttgagagtagtctctctcatctctcgtctgcaccatccataaacttacaaaaacagttgaactgacgttaagagaaagtcacctaccagcatattcaacttgctttagttaaaagttcaatgtcagttccaacttcaacaatcttagcgtctttggaagtctttgctgctttagcaatgttatccacatcaaaatctaaggctattcttttaacaagaccatcaagcatctgttataaaaaatggacaataatgcgacatatcaatagcaagttcatgaatgtttggtccaaatgaattaaaatgataataaataataactaaaagatataagattaccaatgatccaattgcaactaaaacacggaactttgaatccacttctaaattttcctcctctgcaatctgcagataccaaaatggacaaaaaataatgtcatactgcataagcatcatgattcaaatggattaaagaaaacgacaccatctccaggaagggaaatcccatatgaaaaattcattctgaaaaaaacaaaatattaaaatcttaatttaaatttcaatgggagtgaatcccatctaacaaacaaatagattttaataaataaaatacctctaaatatcaacgtaatattactgcaataaaagggggaatccctccacattggaatcaggcagtaaaatatataattaggataggatcccttacagcgtcactattaagagtgtaacgtacctcaagagcagcagaaagaacttgagactgaccttcttgatccttcttatcaattagcaacacagcatagctgtcaaatgcccaaaagagaacaaatatcaggagtgaatgcagaaaacctcacagcaccactaaaataaacccaaaaaaagaaaaactgaaaaggaaacaagatcaacaattaactgctaatatggctctatcaaaaaaacaaatacaaataatattgcctgatatttggagtcaatatagtactcttgttccttcggacactcgataacgaacatagaatgcatttggtatggaagaattataattctggatgggataggaccaaactggatagatttttttatttttttttatttttgaacaacagactggatagattaagtcagagtcctatactaaattcggtaaattgcagatgaactgtaaaagtaaatataaaaagagaatttaattaaaagaaacttaatattaaaatctttatttgaatttcattggctgtgaatcccatctccataaaagaataaaaaataaaatagatttttataaataaggtaactctaaacattaacataataatactgcaataatgtgtgagtctagagttcccatatttctgtggcatagatattcccaagaaggcaagaactagattctatgagcacatgcgcatcaaatactctattgtctttttaactgccaaatgtagaatggggatcaaatatctctgtaatttctcagctgatcctacaagcatgacctttttttcctcttttttcttgatggaacaaaagttcaacatgaccttacttaacaacaacaatcagatgataataacacacttactttagtatcaaggttgaataggacaactgcaaatttttatttggagatgaataacaactggagaatgcatcgagaacctgcaaaactcatttatatataattgtactcatacaatcctaaaccagatgagcattaataatatagaaacctcaacgcgatgtctttgcaaccagttgaagaagctagatttcttgaatagattggtgacaagacgaatgcttgtcaagagattagcaggaagtgaagggttctctgtgaccctttttattatttccatcaatgtatctgtaagagacaaaatcaacgataaccataagcatataatatatcaataacatttacttttgcataagcaagaatgcatcaggataattttgccataaaagtttagaggaagggcgggagtcaattactagcttcagtaccattttcagcttcaacgtgtttgaggaacaaagttgccccatctgggtgcagcacgaccatcctgagagtatcaatgactaccaaaaaacaaaaaggacaaaccgaaaataaaaattacataatgaaatctcgctaactggttatacaatttagtcactctaaaatagaactttcaagagcacaggtaacaattcagttcagtattgtgcatttaacataacagccatacacaaagtactccaaacttcaaaagttattaactgaaatatgcaaaactatacactagcccattaagcaaagagaatgcttgtagaaagtatctgcaatgcatttaaggatgagtcagggccactgctcgttcacagcagcaacacaatatttggctaaactcttagttatcagcaccttgagcaatgaatttttgtttaagccaaattaaattattttagctatttctataatttttttacttccaacctcacttcccattctacagcatctataattcttttctaaagagaacaaagtcgcatataattgcagcaacacaatattttgctaaactgtgagtcatcagcaaccttgagcaatgaatttttgtttaaaccaaattaaattattttagctatttctatattttttttacttccaacctctcacttcccattctgcagcatctataattcttttctaaagagaacaatgtcgcatcaaaccattcaaccgagccaactcaacccaaccaattttttgcattaaagagttatgttaagagtagggcatggctcattggtctgaaaagtaataggccatataattatgggatgattatggtttgggcacactctaactctatataactcaacccaactcatttcttaagagacattccaaatttgagacaactttcatacataaaatatattttacatttacaaaatatatacaaatatatattttacattttcataaataaattatattattaagataaccttaaaaaatgaattaaccaaaacacatcactaacaagtaatacatagttaccctactacttctaccaacaagtctaacatgagaatcaatcactattattaacttttctagccacacaatgatattacccttaccaccttagactttttttaaagcactatatctacatacatatatatatatat

SEQ ID NO: 381280 - DNA, 4879 bp, Cannabis indica
agaaacatccaatttgtatttttcttatttttgtaggcatccttcacctaaaaaaggagagatccattagtttattttttacattcagaaaactacccacaaggttagagctctctctttagtttctctctctagaaactagagcttaaacacttaagtctttttctattattcttgtgagaaataaaaattcgaagtagacatactgtcagaaacatccaatttgtattttttctatttttgtaggcatctttcacctaaaaaaggaaagaccaattagtttattttttacattcagaaaactactcacaaggacgttagagctctctctttagtttctctctctagaaactagcgcttaaacacttaagtctttttctattattctcgtgagaaataaaaattcgaagtagacgtagctctattaccatcgcgacatagggagtgaactacaataaattttgtgtctctctaaattatttacttaaaccaattaatcatctaaccaatctagcgagctgatgttgaccactttttagcgttcacagcaaacacttattatatttctttttctttcttttctatttttctactattaacactaaaattattttatactattttttttaattaatcatattttataaaaatattaattgatttcttttaacttttactattaattagagttttatgaaaaaacaattaagtatttttataagattctcttacttatatatagatttttatgatatccttaccctccgtccagctgcttggcataattattttacttatatttacattttgctaataaagcaaagttaaaacaactgtcaattgctttattaggtaaatattctactttaatgtctaattaattatgtacaaggaaggaggttaaagggtcacaataagcaacttgagtcaataactgggacccttttataacaacaacatccatgatttaatcactcaaataggaacacacagtaaacaccactaagtatatattgactacatgcaatctaattttaaattttattaattaagactttgatttgattgaaagaggcaaagaaaacgtactttagaagagtaaacacaaaaatgttaataaatttacatttttagtctccgttcgttccattataatgaaccatatatagccaataattttatttatttatttattttgagaaaacttgcaacattaaaacttctaaactcaataggaaaaaacttaaagaaaaagagtatcagaacatatcattaattataagagtatatttataaagtagtactgatacaattagggtgaccacaccatcaaatataatgatcattcaaggaaaaaattaactttactaaagtgtgtgcaatactattagtaatcctaagacataccaataaaattattacaatatacaaaaatatctctaataatgcactctaaataggattgatcggtcttattattagggataacattaaaaacagtaaaacaaaacaacaccttattatcgccaaggcgaagagcaagtaagaatcaagagtagatattcaaagcttcaactccatcaggagataaacatcattctaatttcaagtagcaaaagctaagaccgaatttgaagtcatcaaggaccaccatcctgatcccatttttagccaactcattacataacccaacctcacaattaattttcaccatcccagtaatttagaccatttaacaactccaaaaatattagcagaaatgaaacactccaaaaatattcttactccaataaaatagaaggttgttatccaaactaacgttttcattgaaaggaccattgcaaataaatatttgatgcacgtaaatttatacattcctctcctaatataatttgtacatgacaatatataccatgcatatttttattaattttccctcattctttgaatgattaaagttaggcattttctttattattatttattctattttaacgtatttaactactgacagaaatcactattacaaaaataattttttcgacgtttttaaacagtcgtttaaaatattcctgtcggtttctataaccatggtcaatacaaccatcgcaaaacgagcaaaataagcgacagttaaaaactttcgctgatgtagacttcccgacagttttaaaccatcgggaatgttaaaaaaagagaaaaaaatataaaattttctgccattaatggcaaaaaaatctgtattttctcctatttttttcttacattagttttataattttatctaaattaaaataaaataactgattaattttgttacaataacaagtaactttaaaacacattaaatttatacaataacaaaataaatatatataataaataaaaaagtatataaataaataaatgtatatataccgagcttggagagagagagaggtggtggtggtccgatgtatgagacgaaaataagagggacaccgacgggaggtggtggtggtttgacgtatgtgacggagaggagagggagaccgacatgaggaggggtgggtggagatcagggccagccctaaaatttagtgggccttaggggaaaaaatatttttgggccctcatttagaaaaaaaaatgtgatatttttcaaaattaataaaaaaaaaatgtgtaattttaaaaggggataaatttttttttgggcccctgagctaagtgggccctaggcacaggcctagcccgcctatgctcagggccggcccttgtggagatcgatggacgaaagagacgagaagaaaagaagatcgagagagggaggaagaaggcgagagaggagggcgatggtgcggaggcgtgggtggggttttgggagttaagatttttgttttagggtgtaggaagttgagaagaaataggtgggcatgtggaaaataaaaaaaaaagtaggtgggtacgtggaaaatgtggcgagaagtaggtgacgattttttaatgagtataagggtccattaaaaaattgtattttattaaaaaaaaacgtcgcctattttgtttactacgattttaaaccatcgggaatactaaatttttctcaatagttttaaatagttacttaatttttttaatttttttagcgatggtccccaaaaaaaattattttttaggaccgtcgcaaattctaatatttggagtagtgaatattttataatatttatgtatatcttaaatgaattgtatttatctttcaatatgtatatacataaatatatatttgattgattctttaggatatatttggtgtctaatttttctaatttaagaaagtatgatataaatggtaagtttctaataaagaaatcaaatattttaagttttattctttttcagtcgtgtttcgtatgttagtttgattctatattgattttttaattgatttgatgagatattatttgaagaaaatcgaaataaaagtaaaggaaacttgcacttataattgacaattatgtaggtacataataaaatttttttgagctggttcaagatctattttagaaaagtttcctatgaattgcgggtgtgtttagtccgtgcatgagttatataatatgagtatattgtctgtaaatacttatgttagtagctagggttggttatctctttcatatctttgtattttattcatattttgtaaaaagagtgtccttgttttgtagatgagagttagtttgactctatctctacgtatatgtctttgttattgctttgagtctataatcaagtcaacaaagatgaagaaataaagtgcaaaccttcggaaaaaggttttttaagctttcgagagaaaatattttaagtcttgccttgagagaaagcaaacactcttcaagtagatcgaaggagttcaaacacttaaagtttcagtaaggttcatttgtgaagatagaatagatcaagcttaaggcatataacaagatggaatctatttaagaataagttaaaaaaaattatatttttgagatcttactaatgaatcttactcgtaggtgtaccctcatggactagtaacaatctacaagaattgttaattctacttataaaaatcttgtgtgtttttattttctttacacttttattcattgctgattttttcttctgcagtgacagaatcgtgttctgtagctatagaatatctgtttgaataccatatttattatttcctatttaattaattgattagttaaataataaattagtataatattaaaatatgaaattttatttagtattagactgggtgactaaactcttaatgtgatcttgaatttttattatgttattattttttaatcttgtgtgatgtttccttttgtagagggaagatctacagttggtcgaccattggtaaatgattctaaggttaggatgaaccccgactgtttttaatagtcggggtaatgtatcgtcattggtctatataattgtcacttatttgactgtcgcaaaactgggtagaatagttatgactattactaagagtcggcaaaaactattatcgattttaaaatcatcgacaataatgctcactatagtcgaaggttttaaatagtcagctatagtgtttgttgacttcgcttttagccaacgatagtgagtcaaattaaagcaattgagaataattaaatagtagaacataaataatataaagtaaagaaaataccatatttatagaggttcgacctcttattgatggtaatagcttactctcttttggttatattgatttgtgagaagatgaacaagaatgtcttgatctttctcgaaagctcttacaaagatctctaagggtgcgtttggaaagccacaatgtaattggatttgtgtgtaa

SEQ ID NO: 381281 - DNA, 2830 bp, Cannabis indica
attacaaaccttaacgtggtacaaattattattgtattattagtaatctaataaagatggataacttattttctttttgtttatgagaaaaaattaacgttgcttttagttttgtaggggaaaattagtatgtggattggattccatccttggtggtgtgaattctcccctttataccacaaactgataatgacacacaccatccattctcccattgggaacgttctattaaatatttctttcttcttttttttttaataaaaaaattaaaattaaagaaatgaaaatgtgtatgcgtggcctaagcatacccagtagccagaaaagaagccctctttaagcatagctagaaactttcccaaaaaaaaaaaaaacatagctagcaactagtattactagtagcacccatgtcaatttagacccacatcaggtaaacgacaaagttggtgactttcaccatttttctttaccttcattcactgtattattttttctttattattttttttgttgagaaaagctaaaaagtactatctagcactactccctactttaatctttaatatgttatatagccattgaaagaattaattattagattccacttaatttagtttagtacatatttagtcatttgtgagacagtatcttttaagagaaatggtaaaagatatctttataacatattctattgtacaatttaatatggatttctatttatttaactttaattatgattattaaaaaacaactataatttatttatttaactttaattatgattataaaaaaacaactataatttatagacgctatctaataataataataataatagatatcatgataacaacaatgctgtaaacaaataaatagaatagtattttttagtatttttattggtagtttggtattaaggtgtctagcattattaccagtatcattcaatatttggttatctacaatcttttactaaaataaaataagtagaattaattattaaattatactaataatttttttaacacccctaatgtatttttaataatatatgcttttccaaattttttttttttttttttgggatagaattgctcctctatttgattgaacgtttcagttactcaaaataaaaatctctctttctctttctctttctcttcttttctttttccgctagctattattgtcttctagctctgtactactactactacgtgtgtttaggccaaccccttgattttgccaactgggtttttggttggtattgttttctatacatttaggcaattaaagtaagctttagtctttgaaaactctttcactgcattcattaactggttaagagtttttctctagtaaagtttgaagctttttgccattattgaggggccatatggcttcagtcacaggcttcaggttaccacattttttggagttgaactcacagagtagtagacctttgtatcgatttcgagtccataattcagctggtactggtagggatccagctgtgttgtcttctgatctgactgtggttaatggggactctaactctggagttaggaaaagagagcttcaaattaatcatgggaatggaaggttaaagcctgaagttgaggataagaaaaagaatactaagcttgtgaaggatgatgttgaagaaagtttggaaccgtcttgggatgatggttatgggactgagactgtgaaagactactttgatgctgtagaggatatgattaagcctgatggtggtccaccacggtggtttagtcccatttcatgtgggcgccctttaaaagatgccccaattcttctgtttttgcctggtattagtttcctcaccatggatgattatgaactcttagttgattctaagtttacttttttacatacacagataaggggtgtttgcaagtggccatattctgggaaataagtctgaaaacgtagctatatcgtatgaaattactacttctaccttttaaaattttcattttaacatatgttcacaggaatggatggtactgggatgggactcaccttgcatcacaaagctcttggaaagtaagttacttttactgttatctttattctttagtaggctctagaataatggatcttctgtgattgtttaggtaaacaacttttgaaatgtcatatgagatatggtaaacccaaagtttggtataattagcataagtggcatcctcagagcttacaataaattttttaacatagtgaaaccttaagaacatattcaaaacttccctccagtgtttaagaatattctttcataaaaatgagtgatttgttttccatggcatggtcatggactcatggtcctaccttttatcactttctttttcttttgtcatccacgtccaagttttcataatgatttttctatgggaattattctgttgttgctcaaagtggggtagataattccaattgtggggaatcatttccctgtttgaaattcatttttgacactcagatttgctgtcgttatatgaaactattaaaggattctgatgttcctatattataatgcaggttttttgaagttcggtgtcttcatattcctgtttatgatcgaacaccatttgaaggttttaatcttctctatgcctgtgatttgctatcttggtttctttacgatcttgtccttattttgattcttaatactgataccaggaatcgcttttcatgtttgttttaatatgtagttgcgacttgtgactaacttgttaaggattttcttctgaagcattcctggattaatgcagaactctttattcctcagctcaaaaacaaagtgttt

SEQ ID NO: 381282 - DNA, 2402 bp, Cannabis indica
gctttatactattggagcttttttgttcaatttgttattatgaacacttttgtatagagcaactgtactgaactagaaaactaatttggagttgtgtaatgcctgtcttatttagatttaatggaacaaagatgttagagagcttgaggaacaagcggttagtattcgcaggcgattcattgggaaggaaccactgggaatccctcctatgtatgctttcggctgctgttcttaacaagtcttccatttacgaggtgaacgggaatccaattgcgaagcactcggggttcttgatcttcaagtttgaggagttcaactgcaccattgaatactatcgatcaccatttctagttgtccaaggccatcctccggctggtgctgctgcagatgtgaaattcacaatgagagtggatgaaatggactggagttctgtacattggaaagatgcagatgttttggttctcaacactggccattggtggatttatgagaaaactatacgagagtaagttacaaaatcaatatttataaataaagtttatgacaaatcaggcagtgtttttggtggggaagacccgattaattcttatttttcttatgtatgagcaggggaagttactttcaggaagtggggaaggtgaataagaatatgagtgttgaaactgcttacaggaaatcaatcgagaccgtgatcgattggattgatgatcaagtgaatttgaacaagactactgtcttcttccgtacctattcccctgttcatttcaggttctttttcttctttgatttcattcatgatattcatttagtacttggttcatttctaactaagattttttatatcagaggtggagaatggaacactggcggcggatgtcacttggaaacacttcctgatttggattcagttcccatttcaccagaatcacattttagtactactgctaaagtattggcagagagattgaacaaaactcggttaatggatttagttgtgttaaacgtgacagaaatgacatcaaggagaaaggatggccatccatcaatttattacttaggggccgagaatggactggcccctctcagccatcaagactgcagccactggtgcttgcctggtgtgcccgattcttggaatgagcttctatatgccatcttcctcaagcgagaattgattcgagcaggaaatgctacaagtcctagcgaatctccatcgtaatgttgtgtaaattctcactgctatatcagtttcttatttattctcattgtatcttcaaatgctgagaagtgagagtcgcagatgttactcggccatgaaatcaaagcttggaaaggtgaaaacgccgcaagatagtaaatcattggtttgatcttcatgggtgtgattcttctcaacatgtttctcaaaagggtacagttctttttgcttctacttttgatgtcagatatagaaactttcaagtcttggtacagtttagaagaaatatgtatacagtaatacgtaatttcactcttgtattctttaaacaaaaagagatataacgtacataaatttcagtaaatcgtgtaagaaaaactgaaccaactgaaccattgttgagaatcaggtaaatttgagtcattttagggggggtctactcagctgtttgcatctcaatcttatggtatgtcgcattaattaaagtcaatttttggttcaacgactaatttttttttttttttgggtttggtatagagaactttggtttggatttatatttatttatttatttattttgattgggatgagtaggatgccataattggaatttcacaacacgattgggacactttttctacaacaatacatgcaattcacgttgttcacaaagaattcaagtcaaattgacatgattgttgctcttgttattttacactgtccagcaccttgtcaaatagaacttggaaagtgactgtgttgtgaattgaaagatttgtttgcttatatagagggtgttttctattacttttgtttcaaaattttacaaaaatgaaagtaaattttgcgtttttgaaattttgcttttcaaaaacaaaaatatgttttatagttacttctgttttttaattttaaaaatagaaaaaatcgtgctctataatttttatttttattttcatttttaacttttatttaagttaggtctaggttcaggtttggagccgggatcgtagtccatgtttgggattggggccgaggccagaattagggtcccaaggtccaagttaggataaaagtctaaaatatttattaagaaaaaaaaattgtttaaaaaatttttgaaagtgattttttattttcaaaattttcaaaattttaatttttaattaaaaaattaaaaagtgaaaatagttttataaaacat

SEQ ID NO: 381283 - DNA, 1249 bp, Cannabis indica
tattatgccttttatccatttttgcatctcccaggaagctacaaaccgttctccaaaacttttatgaaggaaacttaagcaaagtattctctatagactcagatatcatctcctgaagtcgaatatgaaagaaatcagaatgtaatcctcagcaaaataaatagataaataaaagaaaaacaattataacaaagacccatcatgattcatgaccccttggctaaaggtttatttttgaagaatcacaatctgattacactttccatatgagacagcatatgataccattgaagcagtaaaggttcatcaaaagagaataatataaatctttctacttctcctaactttctataataccaataacaaaaccaaacagcaagcaataacaaagaaaatcgtaaatcacttcattacaccaagctagctacttcaaaagggtaataaaactataatatttaatagccaaaccaaaccagatcatcattaaaactgatatatcaaaatcacaactaaataaaaatccacaataagttagctaccattagtaaaccagatgaaacttcaaagactaatcaaaacaatgaaaaaaagaatacccagaaaagtaaatgaaaattgaagtcaaatcaagctggcaaagtagaagtcagctgaccccttataagaaaattattaaaacaacccagaatgaaaaagagatgttatgatcttcattcctcacaaccccatgaattgaaattgcagatcccaaaataagaacagtaatttctcaccctttaaagggagacatttgagacaagaccacctgatgtttgaccacctagacggatatagaacatgggctttgcctctttccttgggtataacgattaacagggagagaatccagacacagaggagaatcaccactcacaaaggaagcaaatcactttcctttttttattttatgaaaaaaatatatataattatcgaataaatatgatttgattatgttaataataatagtacaaataaaagtacttactttgatttgtattttgtagtgtttattggttgaggggccggtgttaaaagtgggcattcattccaaagtagttggcaaccgctaacctcatatataggtatggagtcgtatttgactcactaatttcattaaattatgaaccccaaatatctgcactccacaaaaatatacaatttgtaaatgaaagatattatttttgttttttaaatttattttaatttttta

SEQ ID NO: 381284 - DNA, 2759 bp, Cannabis indica
taataaaaatatattttttggttcaaaaccgtgtttgggtgagagagaaagtctaaacttgatgtgcttaagttaaggggttttgagagaagagaaggcaatgagtgagtgggtctaagttttggtactaaatttagacaagtgtggcctggttttatgctctacccacatttgccttaacattcatttatgtggatacaatttcatattctaattcttaattttagtggtttattacaatttaaatatatttactatgattaattattaatcttatatataagttaaactagagtataatctcatgagtataagttaagatatataggaatatgaggatggagtttccaactttacccatgaatatttttgtaattatggaaagttgtaacgtttgtcaattaatttgattatatattatggtctaatttataagttaattaagagagattaaattaaaagtgcatttaattagaaagactttctatttgcactaattgagagtaattctaatgctaattgttgaaaatttgctgaataacattcaaagaaaagttattgattttattgaaatttatatggctatttattgaaacaaaatccatttacactaatttaaaggtaactataaatttataatgcaaatgaccatacattaattgggattggtgagaagttcacaatcttttgtattaaaaaatgaaaaaataaatttggactatttttttctcataatttttaacacccttttaactttttaagtgatataacacatgagattataaaagagcttttaaagtgtttaaatataagcattaataataataaaaaacatttaaaaaaatcatctatcgatacatttagttagtgacaaaagctggtatccacttaagtctaaaattactattatcaatataatttttttttaataaaatgttacaaacaaaatcatgtaaaatgaattgaataaaagtcagtcactttcgttataaaagttaaaaaaaatcaccttgcaagttaatttcaaaactctgcatgaaaaattgattggggggacttggtagttggtgctgttttatgagcacaaaatccaaattggggtgaagctatattcttaattccattgtatatagggccaaacaatagtgcaattgggatagaaaattctgtggacctcttcaaactcattttattttaattttatttttatttttatttatatatacttgtttatatatactgtattctgctgaaaaaactcagttgctgactataatgatcaacttctcctctagataatatgaaagagacatagaaatatggccaaataagttttgtaaaataataaatgaaaagaaaagaattatagatttttaattttgggtccaattctaggtatgcatggttggagttgtacacttttttggaccacaataatcatcatcatttgttgaaactgattaaaaaaattaaaaataaataaaaccatatttgttctagactaactcagactgagcccataaaaattggcaccaaattgaacttttataattggtcaaatttgtttgtataaagatatctgaaaaacccctaattgtgtttttcttgttaaattaatttttaataaataagttaatttgtagtaaaacaccattaaatgatattcaatcaaatataaaagtcaaaagttagaatttgattagactttgagattatggaaagaagaagaaaaaatagagattgtattagttgcgtatatgtctaactttgctaatctaataattcaaacagaaggatttttggattatttgtatatatattttagctagagacaaattatagcttcatcatcttatcttaacctagcctaaactaacctaaccttaatttggttatataacaaaatatatatagactatataaaatgttagggaagagtatcataagtgggtttcatcgtatcactacttgtgaaaatgtcatgttttgaggccaaaactagcaaaacgactttgtacaagtacataaaatgtattataactgaacatgggggacccatttaaagggcacatcataaatcataaaatgaataaaagcatatgacacatgaggtgttgtagtgagttggagacaatgggttttaaaaagtgtatacaatagctttattctaaagccaaagaggcccattttaggtgtttgttgacttaattgacttctaaattgtaagtgcattttcattgttgtttgggtttttaatgagttgaaaatctacttttaaaataaaccaattgtaataacttgataaaaaaaattctcaaagcttaaaacagaagtaaataactaaatatattcaattactagtaacgataatatattaaacagaagagaataatatattaccagtaaagataagtacacacatccattttctgcaagacacattttgcacatgcttcttagttatgccactcaaattcataatattataaaataaaaataaaaaataaaaaataaaaataaaaaataatttacagtataattatttaaatttaattttcggttgtaaataaaatttaagtttaattttggcggcaataatacttaaattatatttttgaaactctgtaaatacatgataattaaatgttaagtaaattatcacgtgacaatctctaattggtccagataataattttttttcaaaaaaaaaaaattaatttaaatataccaataaaaaaataacacgtgaataatgattt

SEQ ID NO: 381285 - DNA, 1600 bp, Cannabis indica
taatatatttaaaaaataataacaccaaaatttataagaggttcggccctatgataatggtaataatctactccccttttacttgtattacttcgaagaattatcaagatcacgaggagctagccaagtgatgttcttaataatcttaaggaaaagtttacaattatttagacagcataatggttgtttagaaaattagaattcggatcccttagtagtgaattggcttaactaattatggaggagaagaaatacattaaattagtttccttgaaaaaataagaataaaagggaaacaaaactaatttcctaatatttgttaaccccatcaaagtagagatttaaatgggagatatttatggaaaaaattcctaaaaattgtgcttcagtcgttttcaccctgtgcgggcttcactatcacgctagaagctactcgaatggtaatattttacctgtttggattttccatgtcgatctttagactcattcttggacatgaatcaccatgaacggtacattaagggagataccgtctgtacagtatgagaatgttttttacatgtcattcatattgatgccacatcatcttgtacaaaattgagataatatttgccccccaagttcgcgtggaaaccatttgctcatatgtggacttattcgacctctggggtgcttgaatgggtgacatttgtctagatctcgttgtcttccttattccgattgatcacgaggtaagaagatccggctgccctttcgtatttcaagcatttattaccttgcttcaaaaaatggacattgatatgcgcactgatggttgtactttctaataagtattgattgtacttttttgattttatagtactaaatcgggtacacatcggaagagttgtttctgataatcattataccatatgccaagatcaccatatgtatatatattaaactgaaagtaaatagatgaaaagaacatttacctctcaaagtgttggaaatattttaccaggatctagatttactaacaagtatgttttattaacatcctgatatgaatttctaaaacaatgaaataaacacatataaagtttaagaaaccttacattgggtgcagcggaataatatgtctccttccgctcagatctctaacccttgtatcctgtctgtcgcagagtatcaccaagatctgagcccgaatgtccttctcttcagtttggattcttcacaatcttccagactatgattgagataccacttgatgtgtgtgggcactcactctatcactcaaggtttcgaaaaattgaagaagaaaagagggagagagaggttcggctatagactataggataggaggctcaatttttctgaaggcaaaatttctgattttcaatctcttaataagtgtgagccatcactatctatttataggtaagcactaggtttaggttaggaattattgggcattaaaataatgaaaatattaattggaaaaacctcattaagtggtcggccatgggttaatgggccccactttggtattttgcaatttttacaattttcatttctattttcttcaaaaatgccaatttttcaattctaaccattt

SEQ ID NO: 381286 - DNA, 2237 bp, Cannabis indica
ttttttatagttttcatctttctttgagttttcgtctttcttctcacatttgattgaagacaatgcagttactctcttcaatgaaccagttaagccaattctgacttgaaatgtttgagaacttaaaaatgatgtctgaaattcattacgaaatataaattccaaagtttagccccatatgcaatattgaaaaggatgcaacagcaccatataatatggtacacatgaatgaagaaacaatgtatgcacagaacataccagcctaacaggaaactggattttatactcgaaatcaactgcttaactaaaccatactctacaaagtcataatttgaaaaaaccaagtaattcttccaattaaaattcagagaatgcaggcaaatagatttacactgctttctatcccacattatttaggcaacacattcacaagaaagctcttagcttctccacaactaatgaaaatcttattttgggtatatttgacctttaatctacacttgtctatactctattcaagcaaaccaagatcacaaaaattaaaataaaaacttctctactttcagcttaacatagcaattcagtttggaagaacataaaatgaaacaaactcattatcaaggggaaaaggtaacctgcaacttcaaacatgggttcctagcaataaagccatctgcagagactgtacacctcaatcctttatctgccatacaaaacaccccatatagaagattttttttcttacatccaaagtttacatttttttaggagcaaaaaaagagaagaagaagaagaagaagaagaagaaagacacaccttggtacagccaagctgctgatgtagatgccattttgctttaccccagtaaatatatcatataaatctgaccaaagtaaaaaaataatcagttactagaaaaactagagaaccccatttgagctaaaagcctaaatcgagataaagaaactacactcaaaactgtaagagcttctccattatcattattaaattgtaagactaaaatgaaataaagaaaaatgggttgtttgctatataataattactgttctgggttactcacaaattgtatgaaaatgatataaagctgagatttttatagtgttctggtacgcagctttgatgggtaagtgaagactaatatgaaatctttctagacaaaaggataaaacatgagaattttgaaagcttagaagtttattacctttctgggaatgaaaacttgaatggaattggaatgggtaaggttttggactgaattcgagtgagctgtgtccttgagaaaagggaaggtggtatattagattatagactgatacgaaggctttggaatgtgaaaatggataaagtatttgcttttgttaaaaggatagaagggatgttatattttttaaaatagtaaaattaagagtatgagcttaattttagatttttttttaatataactaattttaacataaattttaacagagacagaaaatataaataattttgtcataacacatttagatcgaattattattaaattttactttgagaaaaatcagttcaggatactatttgtactattttgaaaaatacatggtcattttatcatttaacaaaatagagggtccaattgttaacttttacaaaatacaaggtccaaaatgatatttacccataaagtaatatttagcaaaaaacaataaagaaaatggatttagtaatgccacaaaaatcggggtaagttgtggaataccttttatttgtatctattaatcaaaaatattttcatgttatatttcattaaaatgtacctatttttttaagtgggttgcccaataaactcttaccctgtaattaaatctagtacataatttacattaacctaaatggtataatggaaacatcatctataaagtaagtgtatcttaaaaaatataaaaattaaggtaaaaattaaaataaataaaataaaatgagtatacaatataattttctcgtaacaacctctttttcttgggtcttaacgtgtggagcttaagtatatttttttttagttaataaatttttagttttaagagtgtatacttagggtgtatgtaggtcggtttggtcggtttacgttacattttatttaacccaacataaagattggagtacaaaaatttaactacaacccgctcaattaagaaaaaaaatcaacctgcccaaattgagcactgatgtttattttt

SEQ ID NO: 381287 - DNA, 1631 bp, Cannabis indica
gggaagtgaatgttatattgatcccttttttgtgtttttggtgaatatgaatgctacctatttgagttgtgcttcattctcttgttgtcttgctttaattttactaaataaaaatccaatctttttgtactattatgtcaaattaaaagttcatactttcttgatgcaaagtagcttagccaattccttcctatggtttctcaaacttcataggagaaaaaaatatgcatattattaaccttggtatttgattgattgttaggtagtgctaaaagattaaatatataaatttattagggagtggatatagtcactaatggggtgtttgttacgtgagttggacttgaaaaaagtagagttaaacttttaaggagtgttcgaattaaggaaatatgaaactcgtgttgaaaagttgaaacacaaacacaaacccgtctgcgaaattggttccgaattacttaggtttaagaacgggaaaacatccgaacaagtttgtattggtaggaggtataatgaattgagttttacatagtgattttgtggatacaaactcttgaatcagattagttttagatgttgtttaatgaggtgcatataggtacataagtttagagatatctatacatgaagataagaagcttgttaaagatgattcaaactccatagtttctagtataaatagaaacaaagagctaaatttcattgggaaactccaatggagatcacaaaaatgagggattcaactgcagatcttgatgaaagaaattagaaaatatattacaattaacaaacagaaaaaacgacaatagaaaatgatcttgttgtaatgcctctttttcattctaaaaaacataaaagagatggtgctttttaattttaatgatgttcatttaggtgatggtaacactttattttttaatttgtaaaagtaaaatttttggttttaaagtgttttataattatttttgttttttaattttaaaaacataaaacaaaatcatttttattttttaaatttcaaaaataaaaaacataattttaatttttttttattttttaattaaaaaattaacttcaacctccacaattcataataatacaaaatatgaggcatgaaaagacatgtttcaataaaaaactcaaagacaatttgtttttactattttttaattaaaaaattaatttcaacctccaaacacatatatattgattggattagttgtgtatttatctaatattttaaatttagtattttttaatcagattagatttatctaatattttagatagtatttattggatcgagtacataaaaaaaaagtaaaatttttaacctaatctttatatatacgtgtatatatatattttgaatgaatatgcgtatatattttaaaatatagcaatataaaatttaattactcatttaaattaaataaaaatactaattatttcaattagatattagattaccttctccaatttttgattcgatccaattagatattagtaaataacaccataattcattcataatttaatatttaatatttgacagtcggttgtaattgaatttgatcgatttatgtaacccctacataggcttaggcactgtttggctaagcttctacttt

SEQ ID NO: 381288 - DNA, 2613 bp, Cannabis indica
attattattattattttacttaatttagctttaagatgtttggttttgagtatgaaccctccaaagactatttatggttttaataataataataataatttataaaatataagttgatgtatgtaagaggatgctaatttatggttgtggtttattatatatgtataggtgttcagatgaagtgaatccaagagcaaaaccttacaagttcacaaatcagaaattgaaagagttgggattggagttcactccaatcaaacaatgcctatatgaaacagttaagagcttacaagaaaaaggacaccttcctctaccaccaccaccaccttcaccttcttctccaaaacaattagattctattattagaatccaataattaatcttcttaattatcattattactaataggccttctgctctgttctggattattattttactctatctaatccacatatatataaacaaaaactataaatattgttgtttgagatgtttaaagaagcatgataacaatttcataataataatatatgtttgctgtttttgaaacttactatttctattgagatgagaatttaccatatcacccatcaaactcaaaatgcaaataatgtattttttttttccttattagattataacatgtgaagataaatatatatataaaatattaatgtaggtagcatcacaattttttctttggaaacaacctatataagattttgaagaaattggattcttcacaattggctggccttttggcttgtagtgataaagtcagaaaaatatattgaaaaagagataagatagtagatgaagacaacaaaataaagttggcaatatggcaacggaattatattattatgttaatattaaaaagaataataaactaaggtttattatataatattgtgaattgattggcaggataacacgccctcttcaaattgttataaaatttcaaaatcttcatttctttctttacaattatttatgataataacatcactaaggaagccagatttaaccatcttcaatgattggaatacaatttatgtcacatttaactaaataaaaaagaatgaattaattttacatttagggtaattttataattgtgcataaatgtataaagtacaaacttataaattcaagggtactataaaatcaaaagtatataaaaaaagattattaaataaataagaattctaaaggattcaaatcaatatgaaccacattttttttttttaaaaaaaaagccttcattcaatacaccataatagttgggataagttaaaaattacctatttttattacacattaactaaatataactttaaaataattttatttgataaatatctcttttataatgaaagtaccaaatataaccccacataacttatcaaaattagagtttttaaatatgacctataaaactgagtataaattaaaaaataataaaatcaaaattaaaatcaaaataagaaataaaaagtgagtatagagtataattttctcataataatagttgtggttaaattatctatatgagcaacaaaattacattgaattacaatttttgaaaataaataaccaacaaaaaaggataaaattcttttacattgattagggtaattatcaatctctcatcaattacaaacaccagtcataaacattagttagtggtaaattacacttaagaacttcaaaatcttaacccccatgataataataattggataaaaccaatatttggtgtaattattaaaaaaaaaaaaattaatcagtagtaaaaaggtaattacctacaattacttatagaatataatacacaatttttataacattttactgaagatgttctagtgaaagtttatgcatcttcttgtatgctgttctatatcttaataattatattctaacttgattgagaaatgttaggtaaaacattttattatatccttcctaacactcaataatcaatatcaacaactttgatatggcaggttgtttggtgagaggaaaaagataatccaattttcattttccaaagttaacaaaagagtttttggaaaaagaaaaaaaaataagctaatgtagaagtagttatactatttgttataatataatgaaaataaataaataaataaataaactattttaagattacttgcacactagcataattatttttataccagctaacttctgtgttactccattcctataaagtacttttatttaaaaaagatagcctgtaatacacatttcatagaggatagatcactcaactagagtcctcaatcaatgtggctaaagtccttatcatttctcatacttaaaactggctatataaatatatatcattcgagttcttcggctgaccttctttgaggcaactgcatacacactatgtcctctcttggaaggcaatacattgagccattgctctgctcgttggtcgccctttgttgacactcgggacctgttagtgacaaaaggtgtgttaccttttttgttcttgcgaaaaactagatatgcaattccagctaagtatactcctaagcctgagaatccaaatattccaagaaaaataacggctgcgag

SEQ ID NO: 381289 - DNA, 3581 bp, Cannabis indica
aaaaaaaaagaacacaaatgcaagtgaaaacgacatcccatctttctcatcaccaattaaaaaaaattatttattttaaatattatccaaaatttacgattttgacgtattaatttctcaggtgtcattgaactagatttcctagaaaaataaattttttataaaatgaattgaaaatttatagagagtagtgaagagaagagactattcaaatttatatttggtcacagtggttaagattaaaggaactttgtccttttacgccataaaagtgaatgagacaattctgatttccatacgattttgtagtaaaatcttttttttccttcttcttcttgtttttttaactttttttttatttcattttaatactaaagcatataagaattgatatattgatgaaatattaataattaatacacaatacaagtacttttcttcttcgatctactacaagatattgttaagaggaatttcagctatatattcctgcaaacaaagcaataatctctcttcaaatattatcttatattatatatttgattattattattattattactataactactaccataaatagataacatagtacaatatagcaatttacataggatattcccctttttttctttatttatatataaaaatataattcaaaatgttacaaaacccaaatatttttttctttttttctctcataatacaattaatgaaaatatatttcgaaaaaaataaaagaccccaataataacacaacactacttaattatattcaccacccccaacaataatgggcagaaataaagagccctacattaacaacacaggaaaaaggaatagctttacgacaagagtaaaaaacaaagatcattatgagagagagagtttttttttttttttctttttaatttttcaaatatatatataataatgttattatgaaaaaataaaataaaaattattattaccataacgtctctttactactattattactagcttagttactatactactactactactctccttcgccttcagtagtagcggacgacatataactcatagcaagcgacgtcgtttcatcagaaggtcccaacggcgtcgtttggaaatgttgtttacaagcttgacaagtgatttgtaaaattgttgagctgattttcttagtggcttgttctctaagcaactgagccttttctaactcagcttgagcttgttgccttatcctcttggcgttagtgaattccatctcagccatttcaataagccgtttagcttcacgccgagcttcctccgcgtatgtcttctcagccatagccaatttcatctcatcgttagccaaatctctcattctacaaacttccgccccttgattattttcaccaccaccggcctccaaattattattattagatccgatcgaaagcttcaaatgagtactagcgtaattctcttcagaagaattttgattcgaaacgccgccaacggcctctgatgaattagtagaaggaagaagctgaagctcaagaagactttgctggttcttaatgttgttattatttaagaacatgtttggtaataattcgttgggtttaggcaaattgatcatgagtaatcgatgatttcccttactattgctgaaattagcatcgctcgaagggctcgtactcgaagccgttcgagacgaacaacctgcagcggtggtagcggcggtggcggaggctggttgaagagcttgtagctcaggtcggacttgccttactgtgcaactatcttggtgttcgatgaagctctcaactctaattatgatataattaaaaaagacaaagggagaaaaccaacaaaataattatataattagaatattataataagagtttggtagtaatgattctagtgattagactagaaatggagttaattattagattaaaacttatgttcttgtagggttaccaacaagcaaaataatattatatttatttgtaatgatcgaacatataccttgaaaaaactcgaccacagtcgcaggaatggcctcgagtaccgcaagttttgagatgtgctttgtaatcggattgtacagcgtaacctttggaacacttatcacagacccactgtttatggttactatgctttcggcgaaagtgtttcttgataccaactaaatcacccaaagcatggcaaggatcatggtgtagacaactcggttcaggacaaacgaaaactctctttttaacttcttgagtttctctcttcagaagcttccatggcactttgtgtctccttctatgcatctgaagattttggtctctttgaaacccttggttacagatctcacaaacgtaacggtccgattccaatagcgtctttggcgataaggataccacttccgcatctggatctgttaattaatcaattaattcaagaattagctgagataattaattttaattttaattaaatttaatttaattacatacctggtgtgcctgctggtcttctttttcttttggtattggtattattgatgatgacaaccccattttcagaagaattattatgaggaaaaccatagtgagtttgatgatgatgatgatgatgatgatgaatatgatcagaagaagaagatggatcagcagcaacagcagcagcagaagaagaagcagtattgttgttgttttctagcatggagtggtattgtgtgagcaaattttttcccacttttctatatatttatttttattttttttccttttttttctttttgggtattttgtttgtgtgtttttaagtggagaaactataacacaaacccaacaaaaaaatttgtacagctggtagtgaagttagaataatagtgggtattcagctttactcatagagaaagaaaaaaataaataaaaagaaagtaaggcaaaagctcttgctttctgcaatcaactttctttaaactttaaggcttttttaagctttttttttctttaaataacttttttttttaattcattgacccctcaccttgagcaggtaaggttaaggcaagtcttgtatataaagccccccttagctagcttatacagtgaattggaatttagatagaaaaaaaaaaagtaggggggctatggctaagagagtgaaccaatcaaaatattaatatgagccccacataaacacagaatttggacagaaacaaaaaaacaatcctttctctctctctttctcttataacaaaacaaacagtcattattcataccatacacacactgtaatatttgcatgaatataaatgacagatttacacacaaaccccttacacgtgactttacacatcttcctcacgtgacagaagaaaaaaaaatatatacttgatctgctttctaaaaaaaagtaaagctggctggtaagtaattattattaaaaataaaatttggggttactaaattacaagtaagtgtctttcgtaaaccaaaaaaacttaaagtaactgtacattgttttctctttaattggtagagaagaagaagagagatattagtgttttttttttgttggtaagtgggtttcttctgaaa

SEQ ID NO: 381290 - DNA, 1269 bp, Cannabis indica
agttttacgtaaattgtgacttatggccttaagtcatcgagcaacaatttctactcaagtagattggcacacctgaattcagaattgatgcaagatcggtataatgatatacatgcatacaaattcagcgtaaatgtttttacgattgcctattagatcatatatcagtaagagcagtattggtgcacatagagttacactgaatatcgacggatatatgtttgacaacatagttaagtatgggttgacgctatcacatcggctagagtaccgagtatagactaatattatggtcaatcatattatcgtacgaactttctagacttacacgagtcggacgcaagataggatcgtgattaggtgtatgagcgtctggttacggtctggttatatatttatgcttatgcttttcttattgagtttatcgactcacaaatatatttacatgtgtaggtaagggcaagacaaaggatgagcagttgtgagtctaaaagtgcatgaagattgtatatatcgagacggttaggcctgaaatgttcgggtcttcaggacagttagactcatattttgatagtcgcaaggcgacattattatatgtaacattttataatagttgtaaaataaagattccagaattgtataactttatgttatctattataagtataatatttttttcaaaaatttacgttttttaataaactctttgattagtaaaaaaatgcacaataattatgagaaaatactgtagcatgcctaaactagtagggtgttacagtgatggtagtaatttggaagaagaatgaagaagataaaaaataatagaaaagaaaatctgatatagaggaggctccaatgttcgatgggttttgcggtttcaaatccgagattagggtttgttgtttcagatgtgagcaaaagaggatatcaagttaaggaggagaggtggtttttgggaaatgggttatgtcgccaacaggtggtggttgcccatcggagtttggccatctcaccgcttgggttccatctaggtgggcacaactcgtgagctagagagaaggagagtgaggggaggagagagaggtggacaaaacttaaactacccatactagcattataaaaccaagctaatcatactagtcttgtaaaacacaaccgaactaaccttacaaccaaggaatataacaaaactgaaatcataacaagatattttttttttgaaaatagcgtttataaataagactgaagttagacttcatggtcattaca

SEQ ID NO: 381291 - DNA, 2508 bp, Cannabis indica
taaagtttaaaattaaactcaataatatatatatatagacaaaagaaattaaaaagatattttaaaatgtcttttcagcaaaataattaagcatgtggtaagtaacactccttgtgcttaataataataattaatataatattaatggggaaaagtcaaactcttcactgccacgaaacaactcatttattaaagtttattgactgtccaaattcatatacagatacgaggtatgtactaattgaggaaaggattcagtgacattgtagaaagtccagctttataaaaatgttatgtgaagttacgaaatttagtacaaccaatgcatcatgcattcatgctaccgcggcggccccattgcatatatgaaatgctaaagggcatgacctagcactaatattgttaaccaattataatggttctaggggtgcccaaatctctatataatataatattgatgaatatttaatatagtcagatgattctaaggttcatactatacgtaaagtttgttcgtgtattttatttagttatatattaatgttcgagaattatgtggcacatgactcttaggcccattatgcgcaggcttgggtgatatatacatacagtttatatatattttcttctcattgtggaagctggagttcataaacgtaaataataccttaacatgtgcgcaaaacggaaaaaacatattccacactcttcctaaaaggttatgacccaaacctgggaaggtatatattaactgttaagtatataaatttggaatatttcatttggaaagaaaagcattttaaaataaaatccttttttcatttaagaaaagtttaatgacacatattaatcccgtcaatatgtgaatgttatttattatttatttttgtagagaaatatatgaatgttattataatgtaaaactagtgtttttttattctattgttttattcagaactgctaatatattattattgcagccacgagtagcttatttttcacaacgaatgatgtgctatatagtataggtcatacaatagataggactgtcttcacaaatataattaaaggaaaaccatatatattagtttatttcaacaaatcactaatatacataaagactaatgcacaaatcagatatctcatagttttaattgagaacacattgaaaaactacaaataaatccttgcctttttttatgtaaggttaaaaatcaagtttgaattgctttgtgtagtattccatttatattattttaataattcctttatatatataaaacaaatggaagaaataattaagcggggtgatatgtactaaccttactaggaatccttctgtcatagaaggcggagttttgttgcactgtgtcgttgaaagaatgatcagaatgaacataaatggagtaaagcccttcatgtcctttaaagaacctatcccaaaagggagccaacggtaaggctcctctcgccaagaacatgaaggcgattttcggggtgaaacggaaaggggtttttcgtaatttcggggacatggaagctctccaaagcaactcatcatcatccatatcatgactcacattcggcggtttcaaatactccgtcaacccaattcgagcaggtgtagtacgagaagaagtagtattcgaaaacaccgtttgtttgggtattaagagagatggtagtgtcggaggtgaaaaaatcaaaggtggattttgttttgagagaggaggagtagctgttgttagcagtagtggttgttgtcggtaatggaaattgatgagtggtaaatccttgatgtaaaaactgagagttatgccgagggctaaaccggagccgaagatgagaaagtgtgagatgagtccggggaggttcatttggagggtgaagtgcttaggaaatgaggttacagggtactccttctccggcttagtcgccatttttaatgaaagggtgattaaagtgaggaaagagaaatggtggtcagacacaattcacaaacaaacaaagagatttctagactacaaggaggaataaaggtagagagagaaaaccgaaaacgagtgagacttatgagtattatttttatttttttaaaggggtatattacgtcatattaaaattaataaatatgttaattaatattaatttttatatttataggcattatttagtttactaactcaatattttatggggaaaaaagaatatacaaaaaaggaaaaaaaattacaaaattactatgggccaccctttaaacatttatacagcccacatagaaatatttacaaaaataccacctcttctaaaccttcagccgcacggaacagaacgatcaagaacaacagccctcgatcattcaaagcaataacacaaccaaaatgaaaccgaaacaagagaaataccaccattaattctggcaaaatcaactgaaaaagaagacatgcaacgatctaaacagaaagtgacgaaaaaaaaaccagaaaaactgtgaagaaactgaaatta

SEQ ID NO: 381292 - DNA, 2892 bp, Cannabis indica
tgacaaagtacacataataacgtggttgatgataatcaaatatggccctgtttgaaattgtaaacgaataggaataaatgtaatatcctaatcttatataagattagtaagaaactggcataagaatcagtaatgagataactttcactacaaaacaagcttgtagctaagctctgttgttttttcccactgcatggaccaatttctttatcaagcctcagctgcagcataccaaatctgaagaaggatagtttgagttttataatatatactagtggccattgacatgttaagatgttccatattatttaccagtgagtgattggtatattgtattgatcttttggtgggaaatgttcttcattttacataatgaaatcattccactaaaagtggtggcgatttagttaaataggaaaatggttcgcatccacggcatttagatcttttttcttttccgaaaaagaatgctaattaaccaggttcacacatcctcatcaacaaaatgatacaatgatcagttacatctaagattataagagagttttcactccaaagaaaggtttcaataaaatccagttataagaaattgataaaagacataaaacaatagtactactacactaacacggactaactggggataatcaggtgtacctcctcctatcttggtgcccatgtgaggggaaggatttctggaatagtgtagatgcccttgatgccgttgcaaccttggcaattccaacagctattttcgatcagcttattgtttcactttattatttagtaaagttctgatcatctctaaattgcattaattattcaaatttgccaatttatagtagcctaataaaagggggtccgtttctccctttcttaggatgataatagaaacatgaatcatgtatcttttcccataaagtcaatattgcaaccgttgatcataacattctaaaattttcattatgtctttgcaggctattcgtccaaaagacggcatgtagggccccaagtagtaagggcaccagatgttctgaaaagtagttttgatggagctttgcccataaatctcatacatggaaaagtcctactatttgcgtttatgaatgctaaataataactgagtaccccagttgaatgacaatgtttttacagttattatgtaaataaagatctctttctcaaccactagcatagttcaaatgaaagacaccgtgactagtagttaatgactatagcaaaatctgagaccgcctcctatttcatcataaattataactgttttcactaatcataactaagatataattgcagcaacaatgaagaacatattgtgcatttagtaatatatagaaagtgttcggtggtgtttcagggttggaacctgaactccaaaagaccaaagccacagatctaactccacgctgagtacctgaaaaaaccgagaaagtagtatatcatgcttgagatacccaaatttccaataacaaaaagcatatcaatgtgtgcaaacctactgataataatcacatacaccctgtttgaaatattacgatggtaagagcgttgtactatactactatcgggttcatgtcatcacttattagattaagctctcgtgtcagaaaaagataagaagcttcacaaattcacaacagaatcagcattgagaaaatctctctgttagttacaggagattttggttatacctgatttcctgatttgttactgattaactccctcattttttcaaccgcatgaatggagcaagctctcagttcaacttcctcctcactacctggaactatttcactatcagcctcaattttgctagctaggattgagctatatttgagcacaccaatctgccgtagaacagctggaacaatataatccgccattatagtgatagagccaatgtcattgaattctccatatccttggccctggaatgcaccccatagatcagcagcaaatatctgggctcttttatacaagaatacctggtgtcctttgtagagtgagtggtcacgaaagcctgtacaaaacagaaatgtcaaaataccagcttatgtgaaacacaacctaataggaactttttaagcaattaaaaaggataccaggaaagtgactcgcaacaagagttacaagtttaacagctgatttttcactagactccacaaggttagatgctttgccaccaaagcttctctccagttcaaatccaaccttaaaaatttcaccccattagttaagatccaaaaataatagaatacagacaattagaaacgtaagccaaaagaatatctaattattatgttttggaagtcacctcatgcagcaaacgaatgcgttcatcctccaaggggagtggtctaggccattttaacagcgctcgtaattgaggaccttgcaaagcaaaaatgtctcatcagcttacaatacctaagaaagaccatggcctaacatgtgcttgaatgttttgcaaacttaactccttgtttgtgaatcaaatttaaatttctacaagaccttaaggagaacgaaaactaacataggctgagataagaaaaaaactcatactctatagacatttaatctaaaatatgtcaaagttggtgtaggttttaaaaacaagatagagttacatctgtaaatctgccacaaagattccatttttcctattgtgcttaacaaaccaagctttagaattagttaagtaattgaatgaaaaatctaactatgctgctgcagaaaaaaaaaagagtgattcagtagtaagttgtcacagattacagtctttaagtaagtaatctacaaccagaaacaattaccacctaatctagtttgtccctggttgagtttatttaagaccatacatttatataatgt

SEQ ID NO: 381293 - DNA, 1373 bp, Cannabis indica
gaaacgaaaaaaatgaaaaaaaacaagaaattatgaactttggattaattaaagaaatagaagaagatataaatacatacattaataagaaaagcataattagcttatgttaatttgtacaataaataaaattaatcatctctataaaaaaacataaataaaatcaataaaccccatcttcaaaaaaaaaaaaagtcaaatcattgaccttccattaatttcttccttcacaacctctcttcaaatttctttctttctcaaaagaagttgttaaaaacgacagagtaaatgagcaaaacgacaatagaattagaaatggcaaccgcagaagaggtagaaaaaagcgagagaagtaaccaaaacgacagcctcaagcactgaaacgaccttaaaaacgacgttttgaaaaaacgacacctgaataatattattgagtctcttccatttcataaagaagaatttcggtcgaaacgacgacgtattattattattatgattagttgttgttgttgtcgttttggatgatgatgttgatgatgatgatgattccttctttaacttcttgaaaaaattattcaatctcttctttcccatcatcatgatgtaaatgattttctttgggctattttcttggtatccaaacagtttggttgagttgttgttgttgtgaagagaagatgattgaatttatgggttaggaaaaagattttcttttcttgaatgacacggttttggttttgtgtattttaaggacaaaaaaaagagaaaatgatatgaattatataaaaataaaatgaagacggtgtgtttatatatagggtgagggtattttggtaaatgtagtggagaaggggtagtttggtaaatttaagaggagtggacagagtggggatgagtgggaattggttgttgagaatgagatgacttgatatttgattttgtcaaagtaaaaagtggtgttcttcttacgtgtgggagtgagtggaccctacctatctatttgaaataaaatagaaagtaatgattgggacctatttaaataaagagagggttaaaatgttcccttgagtcttatatcttatattgatattcgtgtaattaattatcgaaaaataaattttaagaaatatcgttaattaatcgtagagtgttacaataaaaaatattaggcattctcgatatcatatgagtattaaattttatataatttaatgtaaatttttaaaaagtaccgctaatcaattgcaagaaaatatatttagggccagtttggcacagctgtgctgtggggaaaagcagctgtagctgtgctgtgggaaaaagcagctgtagcagaactgtgaaaaaaagctgagctgagtgtttggtaaatt

SEQ ID NO: 381294 - DNA, 2692 bp, Cannabis indica
tatcttattaaatatatttataaactattctaattttataaaatttcatcaaatttaatattccaaacgaaggttagcgttatgatatattagaaggaataattaaggtagcgaattatatattcagcacatttttgctaacacgttataattcaacacactttttaaatttttttgaataattaaatattatatatgattctaaagagtataagcaagtatattggataaaaataaagagtcttatgattttatgtcgataatatttacatacagaaagataaagcttcggtactaaatagtacaacggattacttaaattcattgaaagctcaagtggaagagcttagtaagagaaacaaagagttggaggcacaagttctttcagcagccattataagatcaacctctgatgataataatattattaataataataaaaatgtgcccctgcttattattgattcttcatcaactaccactactgctgatcatgatggtgatgatcaaacacgaagagtgaatgttcggatacgacacgtgtccgaatcgacttctgaagaagctcaaattgttgatctgcaattgatgataacacagcagagagctaataattccataaatgttcaagttgaggattttgtacttaggattatggaattcttgaagagtgttaatcatgtaagcttgatgtctatggaagcaaatactcaattaactcaatcaaattccaccacttcttctctccatcgcttaaccttgagattaagaattgaggtatataatttattattacatgttattattattatttttttaagtttattgcaataagcactatttgaatatatatatatatatatatatatatataaatctcctttattttatgataatcatatgtgaaaggtaacttaggtgagaaaattttagaattgtgttatctatttaaataattattaggtctcatatcatttaaaatcatttttaagaaatatccttactcaataataaaggcctataaaagtactgggtggtgcccaatgctcttaaaataattaaggaaagagtcttagtcagaagtgaaaaagaatccctaattaataaatttactaattaggaattaaattggtttgtttgttttgtagggaaatgaatgggaagaatctaccttcgaggaagcagtaagaagggttgttgctgacttggccgcccaatagaaaaaagttttagccaatagaaactgtccacgtctcagtcagctaataatatcgatcaattctcaagtggcggcccgtcgttgtcaatgattccctctcactaatttcctaaattaatctcattcgggcccctccacttctgagctacctcaatatatatatatttatatatatgcatggcttaatttagattatttttttgttgctcgtagtgcaaatttttgcacgattttgatggcatccattttattatagaaacaataaaaattggatttgtatatgacatgtagatgtagtaaaacaaaacggttgagattttcttatttattattatatatgttatgtcctatacgtatttacataaatttaaaaatcggtgtgggtcgcccaaatggactgcgaaatttcaacatggtacttcacaagaagaaaagaccccgatcgacaatttattacttattaattattatataagtgtgtctatgtatgtaaatatatatatatatatatatatattcatttatgtgtggtaatggtggtgagtggggaatattataagatgcttcctggtccaagtacatcattctagtaaacaaaactttttcaagattttctaagtttggtggctacttgaaactcaaccacatgatccctcatccggggaccacatatatacgacaacaacttaatcataaataataaggatgttctcttttgtcttgtgtcaaatattcaccatacaaaaatattgctaaggaatatggtagcaattcaggtaaaacgatcgacaaattattattataggttattgttatcaattgttagatattagatgtatattagctgtaaaagaattagatatttagtagatatttagtctcctaactttgtatataaatatgtattattctatgaaatcaacacacaattcgaatcactattttctacatggtatcagagcattgtgattcgaaattcgaaattagggttctgaaaaaaaaaaaaaattagggtttgagtttagggttgttttttcgaaaatcctatttggagtgaacattgtttctcaccgcccacataggaggactgcccagccgccgatctacgaacccccgaagtccggtcgccggattcctcgcgcgtggggctcacgcgccgcctgaagcttctgcgcgtggggctcacgcgccggcgcgtggaggcgcgtgtgacggcgccttcgacggcgttctgttgccgattcttcactgggttcttctaagcccactcgcatctgttctaggttgtaattcggtatttgtttgtcttcttcgtgtttgggtgttcattctttggtgttcttttgttctttttctctgtcctttgtgtttgcttttgagattatggcagagataagatcagattcaaaatcagttgttgtttctgatgttgttcccgtaatgtctaaaatcacggatcataagttgattggt

SEQ ID NO: 381295 - DNA, 1859 bp, Cannabis indica
aaaaaaaatcaaatattaaagagattgattataaagagagtcaatataacccgctacattacataagtaatagtaacagtgacggacccgaaatttttactttgtgggggcttatttatcataaaaaaatatttatagctacattataattactcttactaaatttatctaattttgtgggggtttttctactattttagcctataattatgaaattaaaaaattaacatttaatttttttaaaaggcaatatttttgttagtggaggctatagtctccacatcaatcttaatgggtccgtccctgaatactaaattatgtttatatggtttcaaacaaaaaaaataaataaaaaaactatgtttatgtttaaatttagtggaagggtgaatttttttattaaaagcactcctatcagtgtctttataatagctgaaagttaaaatttttcgttcaaaacttatttttatccttttaatatcatctttatagtttagctataataaatttacataaatttcaataaaatgcatctcgacatgtagctataagagagagtgagctaaattttatttatttattttattactactttatttaaatttattaactttttataattatatataatgtataatataatatttttatgaatttatatattattaatgtattaaaaacatattattttaatgatgtagataaaaatatatagaagtgaatgtatagtataatatataagtgtgaggtaaaataaaaaaaataaaattttagcgagttattttgaaaaataaagcagaacaattattgtgagtggtgtgtatttatatattttttttgtaataatatatgtgtataaataataagtaatttccgaaggggccccactgcccaaaacaaccccatgggtcccactgcagtcttccacctctttattgtcctctttttctgacccacatcttgactaaaacaaaatactttgaatataagtaagagaagagaaattcatcaatcttttattataacttttctaattaatttttgtgtttgaaaatacatgttaaaatattttttttttttttattattcattatatttacaaaattattccattaaatttttaaaaaatttcgaataatttatttaataaaaaagaaatatttaaaaatttttaaacatacataaatttaaatattaaaaaaaaaaaaatttaagtactataaactatttgaaaatttttaaaaatttacagagataatactgtaattataacagatactattacaaaaaaattaaaaaaatatattctaacatgtaatttcacatgtaaaagttaaataaaaaaattgtaatcgaagactcttaacaaaaatgctaagagactttatggtgcgaaaatttaaaaggattccacactttctaatagtataaattattagagtcttttataatttgatttaataaataatgtaaaaacctactaactaatctcaatacgacataacagttaatgttgtttaataagaattctcaacaattaaagatatatattatatatcattttatggtataaatttatgagttttgatattggatctataatataataaggggacttttatttacaccccactaaattataaatacactccattattaaaaaaaatataaacttaaataatttttaaaaattactcttgatatttttttaattttttttctcacattattttatgttaattttaatatacttattttgattttattttcataattttttctaactcatgtatatctttttattattttttacttagaaaatttcataaaaaaattattttaattttttgtcataatat

SEQ ID NO: 381296 - DNA, 1508 bp, Cannabis indica
aaaaaaaataaaaaaaaagtaatgaggatgataaaggagtgggcaagttgattaatacatagatgacccctctattctatagtagtactgtgatgaaggacatgaattgactccatatctatttattgagagagaaagtgaaatgagtgagatgatttctacaaattgacacctttttattgtttgacccattcattcatttaatcatcaatatataatacacaactacctagctggcatatattatatataccaaccaaccaatcattcaatactttttgctaacttatttgccaacaacttcagtaaattataacctaatattttcactatacatacagtatatcactcctgacttcaaatggattataggcaaaaaaataataataataataaataaataatatttttaaaaattattgaaaaaaaatatgtatattttttaaaaaatattttttatttagacttttaaaataagtaggccttaggcgtgaacctaatctgctaatacctagggtcggtcccgtatacgcgaatacaccatgtgttttatgatgttgttcaatttagaaagagagagaaggagaaattgtaaaatagagtgagtaaattatgaacaaaaaaaattagttaagagggcaattgttaataactatatggaattagtaaaatatcaaaatataaagtgatactcagtgtgttttaaataatgcttgtacagtacctgtatttttaaaatatccatgacatcttaaactcaaattttatcaataaaattaatttattttcagttatatataattaaatggttaatttgaatctataactcattgattgaagatattttgatcatattggtaatgttttattgatcagttttgaatacagcatacaaaataagtataattttaatatttaaaagtatcaaatgaacattattgaaagtacatgctaccaactctttattttttaaaagtataaagtgtcaaatgagtatacacatatataatcattaatatattttaaagtaaataaaaaaaaataagaggttatatcacaggatcaaaaaaaaaaaaaatagattttattttagattttgtattttgtaaaaattcttattcaaattttttattattaaataagatattagatcgtgtattatgcgaaatgggatagtttcttaaatcacttaaacatttttaggattaggaatagaatagaaattgaaccacaattgttagagttatgaaattgaagttttaaggttaggaagataaatttttatagttaggattaaaaataatttaatcaaaattaagatcaagatatgattatgttctattattttgtaaaatataggtctaaattgattatcattaaataaatagatatactaattagtaatttttacaaaatatataggatgtgaaatggtatttacaaaaaaaaaatataattattatatgaaaaatacaattaacactttatttataaaaatacttccataa

SEQ ID NO: 381297 - DNA, 883 bp, Cannabis indica
aaaaaaaataaaaaatagaaaaaggcatcatatctatctatcaatctatccatttgggatttctagtgacgtggcccaatgaacgtgggcataccatgttgctcttcaagaacagtaatggtgtgtgtgtgttgttaaggtgaagactataaatatggaaccaaaatccatggtgatatgatatttttgtacgagtcaaattaaccttttcttccgggttggccattattttggtctttaagaagaaaaaaagaaaacaatctttcactcattggtgacactcactatcaacctctctctcaattattattattattattattattatattttttatatatatatacataactctctcttccaccacttccttagtgggagtttagactgggcattccattttaaactcagttttctttctgggtttttctccatttggcctctagttaaggttttgaagctgtttgagctttgttcttgtaatggcgttttgtgcattatcatttcctgctcatattagccgggcaactacaccagcaccttcagatcttcacaaatctagttctttctcttctcggttttattggggagcagatctgctgaggccatctcaatacaaggttaatcagtttttttgtgatttgtttctaaaccaggaaaaggaagaagagaaatgatgttaattatgtgtatgaaagaatacccatgttgtagaattgggtttctttccattgtctgaatttttagctttacttctcttgctttggtacttgttttgagtttgtttatgttttctgggtaaagcatgcttacataaatccaaaatgaaatatataaaagaaaattaatttggaatctcattatatctaccaaaaaataaaaa

SEQ ID NO: 381298 - DNA, 1339 bp, Cannabis indica
taaaattaatatttagaattttctaaaagaaattaagagattttctgtaactatattaactgtcatgtaattaaatttatttatgtaatgaaaatactaaaatacttaaataactcaaaaactgtaatagatagatatcctattcaattccttgttttttagctacatggtgatatcaataccatcagttgagatgttattagataattgatttttaaaaaatctatatttttatttgcttaataatttgagagctaaattataataattaatattgtatgttttgtttggtgcagtctcatcccacattatcatcagaggaaagatcaaaactatgtaaatgcttgaaatttgagaagctgagccttgaagcctgcaaagagcttgcaaagaacccgaaaatcccacccgaaatcacaattgaagctcttataaaacaacagtcaaaaataattctatccacaaataattataatgagtttggagatgatcaccattttcccagtttgacttcgaaaatcgcttcgaggaataataagggtgctttctatggcggttgcaataataatagcgaaaaaatcacagaagaaaaagaatttgttgagcaaaacttgcaaagaatgcaaagaagggttatggagttggagaaagtttgtagagagatgaagggtcaaatgtcaaggatggttaagcatagtgtctttgctacacctcattctaaaaccctacctagactttgttgatttcttttctttaataatcataaggatttggatgtatttattatataaatatattgtatcatacatgcatgcatatatatatgaacttattttgttaatccatgatgtttaaaatgtatatataacaattataatatatagtatgtatatttatactatattgttataaagctttaatacttaatagataatattatcaagtaggtattattatacgcgggattgccttataatatatattgatagaaagagcataaatctcccaaaacgaacaaaatttttatttattaatctttaaacaattacatatttaaaggtatgaatttttaatctctgataactttattaattaagaaaaaagccatttataaataggctgagaacaaaacataaaagacatttaaattactatcaatatcatattatcactacaaaaatttttatttagtcacaacaaaatttgtgactaaagataaaaaaattgtggttaattatacattattattattattgtgttgtgactaaaagacccatagctaaaagtattaggcacaaaaattacaatttattgtgactaaatgtatttttagtcacaa

SEQ ID NO: 381299 - DNA, 2581 bp, Cannabis indica
tatcatttgttgataactgaaaagcatttactacatcaaggtgaaaaaagcctgcaacaggggttcggggtaaagaaagacttgattttgaagaaatatcttcatcactatgctctacttttcaagaagcactaatggagttacttcaatacatgactcgctaactcaatacttgtcttccctttgaacctacaaacttttgaaagcatgaggttcgagcgaaatggtaagtctcatgaagaatcaaatttctatctatgggagcaaaccatgagcccaactactcattctaaacctcttggatctcatttgtcttccttttactcggctttttacttgcacaaaactaaattttccaaaccagccaatatgtacatgtttcctcctataaggtttaaaaaaagaaattcaacataaaaagctttaaaaaaactcacccttattgataaagcagtgaaatgaccaaggtctgcaaacatagcttcagttcctggagcattggaaaatgcctaatgttaatttaactaacataaacatatactccataaatataacgacatttcatccttggaaaactacatttaacataacaaagtcaatgaaaatgatgtttatttccaattaagtgggatatagcacataccagttgtagcaagaagaaccccaccaagagaaatccagccatctgtaccagtctcattgaaaaacttgacgatataatggggtgacaaagcataaacaacttttgggttccaatgtattgtgttgtagagaccaacagaaaaaaatggaagagcaaccagataattacgataggtgcaaacaaaaaatgcaactttgtgtgtgccacaatgctgcagagcaaacagaccgaccaagatgcaacaagcaatcaagagaagttcacctaaaaacaatgagaagctacatagtttgttaagtcactcataaaaaatcaagtaaaaagaaaatattcatacatatatataggaaaattctactgcaggggcatcggttttgtctatattggtgggcacgtctcaatttttattagaaaaactataactaaatttttcttatataactgtatacattaaagttatagttgagatttcacctgttttaaaaaaatttagaataatttataatgtcgaaaacaggactcaaacattcagtttgaatcattgaaccttgttctagacatctagacatcgtaaattattcagaatttttcaaaaatgaaaagggtgcagtctataatatagaacgtcatataatttctccaaatgctgaaaatatagacgttcctactgataggggcaaaagtggtgtcctactatagtcatgtcctatatcataaataaatattaataaaataaggaaagtgacctgagatagcaggagtaaggacaccatctccaatgaccatacaagctccaaaaagcacaacaattaaaagggcagttcttaaccttttatgcttctccaaaaatctcttcaagggagatgaaccagaatgttgagaagaagaagatggcccatatttgtaggcagtgagctcttcatcagctgcttgttgattaggaagcaaactaaacttagcatggcggcaaagcaatgagtaaagagcaaaagtcccacctgaaaatgaattgaatagagaagttcagaaaacccttaaactgaaattgaaattgaaattgaaattagattgaattgacacataccttcaccattatcatcagcactgagcaaaacaaagacatacttaagcaaagggataagagtaagagtccaaaatatcaatgaaaaagcaccaaagattgcatcttggctaatatgtttctgtaacttgccagaaaatgtgcttgaataaacataaagaggtgaagtacccaagtctccataaacaacaccgaagctttgataagctagtatcaaattcctcgacatccttgtccatgaaagttgctaaaaatcaaatgggttattagtaaacaacactaagaatcattatcatcaccaatcaaactcgagatctaacaaagattcgttctttaatttcatcatagctatattatatatgtatatatatatatatgaagatatggaaagaaaggtcacaaacctgggttatagtagtagaagtggagcgttgagaaatggaaatcccagattctggttccatgccttgtttgtctcactttctcgttatcgttctctcaatctcaatttaatgtgaataaaaaaaatttatatactgaagagaagagaagagaagagaagctcaagactctgcccaagaaaatagatatatattagtttattgattgatttatttatttatttaataatattattttttgataatgatttattaatattattattatattgatggtaggtaaatgacaataatattttatggtgaaataaataagagcattgattcttagaaaataaataataacactaccacattatattatgaataatggttagtaatttttttttttttgtatatttttaattatttttttttcacaatataaatttatacatgttgcccttaattttgccc

SEQ ID NO: 381300 - DNA, 2587 bp, Cannabis indica
atttcatcgtcaaatttttaactgaattgatattttgttaattttttataaaaaataacatttattaacttaattgttagatttaagaccattttacatcttagcccttctttatgttgtgtggtagtatttatgtaatttttaaaaaaaaattagtatttatgtaaattaccttgtattaaaatcaataaaagtaaatataaactcaaataaaaagttttaacattacttactttaacaaatccttatttactctcaaaaaataatcaaataaataaattctataaggaatacatcatatacacaaacaattctatcctttacatcatgaaattttgctggaagatatttttaatttaatttaatatttgatactacctttcttttataaaatcaatcaaaaggaaacaacactacgcgacttgcttgcagacatgaatctccggtaaataaataaaaaaatgcggactaccgtacacttgaaatttgttgtaagatataaatagcgtacattacaagcactcgagtttacattatcaactcttgtcagaatataatatatcagtactaattcatctttgtacaatgtatcccaaagaagctaatgttacacaaacaatagttcaactcaaggcacttcatacatcacttttaggaattaagaactagaaaacaaagattgaactttgagaggaaagaaaagaaatgaaacagaacatatttattcacttcatacagttgaagcaattttaaggacctgttaagattctacccatgttttgtggatatggatatgatgaatggttcaaagttgatatttcaatattttctctagatccaaattggttcaagccattacctaggataccgtagaatgtcgtacctccttgagctacattgacattggagttgtgacttcggctttccatttgttcagattgcgcagtaggatgttgctcgttggacctattatcagtagcagaactaattccaacccctagatcaaggctaatggtatcagtttcctccggtctaatccttgctgggatgcttgcagccattgatcctaccaattcatggctgctatttctcgcagcagggacatcgtggttatgttttccttcatatgttgttataactgctttaggatcatgagaagctctctccacatgttttctaacagggcatccagcatttgtgcatttgtaataactcctacacaacaggcaagcatgattaggatacatttgacaacaggacatagctaaataggggagcagtctattggctgctcttttaaggatacaactatgtcgacttcctatctatatcctctccataaacattaatgtgaaaacataacataccttggattaggatttcctctcactactttctggccatatttccgccagcggtatccatcatccagtatatccacctcactcagagtttgaacaacaacacgtggttccctgataggcttaaccactggagtgacatcaatgcatccgatttccattttcctatttaggcaacattttataggttatttattagaccaaatctacagctcatagctcactaaaaaacatggcacttccttagatgatcatatacctccgctttgagaatggatcatcatcatctgcatcatcactgatcctatttcctgtagcttctacaatgtcatcaattgttgcaataggagattgatctggagtaccatttggctcattagtattagacccctgtccatatatgctagacttgtctgcatcagacaaaagaacgtacgcaatttatactattcatgaaaaaagaaattatgatggagagtgcgagaagagtgaaacaatacaactccgaagaaaaaaatccacctaccatcacgaccaattatagatgaaaacttgtcaaatctttcttcctggttggacataatactaccagtgttgtatcgcctactgggttgaggtttaggatggtcatgtgtgcccttgtaaacaatctctgttatctgtccatcatgggcacgctcaaatagtttttcacttcacagttaggatgggtacatttgtaatagctacgtggaaattcacttcctttgacatgcttttgtccatacttacgccagttatacccatcttcagaagatatgactgaaggtccatttcccttgtgatcaaattgtgctgtttggacaccagaactagaattgcccctctggtttaattcatctgaatcaccatcagcagaagcaacaacaccacgcgctgctgatgaaaagcccaactcgtttgaattgactgccacctcacttttaactaaagatactgtcccaaatgattggggttgactttggacttgcagagactgtgcatttctctgggtatttatttctgcagtaaccttcaataaaaaagacgattaggcaaaaacacttttggcacattcaaaattttcaaacaaatattggaaacgaatagacaacataatcaatgaactgaaggcctcctcagtatcatcttattttctttttctttttttttttcctagtagcatatttctgcagtgaaaaaaataa

SEQ ID NO: 381301 - DNA, 1624 bp, Cannabis indica
aataaataaatttttttttttaatattgggagcttatataactttttgggatgcaaatataatgttctttttaaaaatcaaccaaaagaatataggtttattaaatataagcataattgttccatagaatctatactagtggcacaattttattcctttgtatataatgagagctctcatactatacatactatcatgctttgttactgaaaaaattgtatacaagtcttcacttttcaatgtcgtgagcatacttgctaatattttgtaacatgaaacaattgataaaatggcatcaattttataatcattttacactttcacttagttttgataattttttgcaaatagcttctgtctaataatttgaccacctatcataattgttggaccatatatgtcttggggtgttcgatgtcattttgtataagattattataagttaaagtgcgaaatcaccttaaaagaaaggtcattatgccaaaggattaaatctctaattatgttgaataatgaatctgctagcttgatcatatccagaaagtgtgctactagacaaacgtttctccactacaaatataaagtgttccaaattcacatcaaatcaattcttcttttctttaaaaaaaaaaaaatcaatgcttctatttgcttttgaccagtgcccactcataccatagaagactctctatgtgaataagacaaaggggcttttttttaaaaaataaataataataattttatttgtacccttatattattcgcaagttggtttctaaactttatatttcggtaaattgatctctaaactatataagttttgacaagttaatcttcaaattttatttgttggcaaagtagttcccaaatttttattttcttaaaaacataaagtcttcactcttaaatgatgatatttttatttatttttttatttttgtattaattttaaatatttttatattaatatattatcaaattaaataaatatatttttttatttatatattttttaaatatgccaaaaaaaataacaattgaaaaaaagcttaaataataaaactattatttttttttataaacggtcaaagtaaataaaattttaaaatttatttttcacttatgtttcgtggcaaattcataaaattataaaattttaccagtattgaatcaaaatttaagtaatcaataaatgtatacaattaaaaaattattaaaattttaatactacatattcaaaaattaataataaaatatactataaatactaaaaatataaaaatataaggggactaaaattctctctaacgattatatgaattcgctagtatttatactctttattttcttattaataatacatatgaataaactatattttatatattttcttaaaaaaaataaatattataataatatatctattatatgaatacttaaaaataaaaataaaattatttgaatttaacacaaaaaataaattaaagtatgtaaaataaataaaaatgaataaaaatgtaagagtggagacttaatgttgctaaaaaaataaaaatttaggaaccaactaactaaaacgtatttagtttgggggctaactgttagagattttataacaatggaa

SEQ ID NO: 381302 - DNA, 5507 bp, Cannabis indica
  modified_base (4)..(4): a, c, t, g, unknown or other
aaanaaaaaaaaaaaacaaaatgtgactaagttttaccaattacaaatagaaaagaaaatgtaaactaaattgactcaaaatcgactgataggctgcttatttttgttgtctaaattttgattggatcaaatatataactataaaaaaaaaaaatcatcagattaaatatattgttaaaagatacatataatgaggtagacttgactatcgagtcatgtttgtccttgtgtcacttaaaaataatcatattcatttatgttatgaagaacaaagcatagtattgtgtttgtgtgaaatagattctagggttttccattttaactacaacattcgcaagagggagcggttttagtctttctccccgctccccttttcaactttctttcaaaaatttcacttcgtcatttttttcttcctttgattcttcattcaatgctgttcaatttttttcttttttcctttcttacatctttgtttcgatagctttaaagatttaaaatttttctcaccaaataatttaaccccattttttgaatcggaattcagcccttaaacccatctcaatgcaggcccccaattccgaggaaactgcgcctgaacctaccaaaacctccgagagcccggaaaactctaaggcctctaattcgaattcggtagtttgtgaggttagcaacagcagtggcgatgacgaaccggtccttgatgtttcaggaaaaaacattgatttttcgattgtggataattccagtgaggcggtcaggggtttgtatctctataaaaatgtgtttaatttgataccaaaagaggtgggtactcttaggggattgaggacgttgaagttctttgggaatgagattaatttgtttccgtcggaaattgggactatggcgggtttagagaagttgcaggtgaaaatagcgtcgccgagtttcggtgggttgccattgcagttgaagagtttgaaagagcttgaactgtctaaagtgccccctcggccttcggcctttacgattttgagtgagatttctgggcttaattgtcttaccaagctctctgtttgtcatttctcgataaggttagtgtctcctgttgtaattttatttattatgcagatcagataagttgaaagttggatgtttttacattttgtgacttggaatatcaatgatgctaaatttctattcgaattttcttgtgaattttatacgggcatgtgccatgtttgactattctagtaaagagaattgggatagggttttagagaggaatgagaaagaataaaaaaattgaactattttttcttgattcaaggtttcactaatccttatttatactctgcttatccaacatgtttacgaataggaaattgtacaaaaatgttttgaccttttctatgttgtggcgtgtgaatttttatacgcagataccttccttcagaaattgggtgtttaaagactttggagtatctagatctttcgttcaataagatgaagagtttaccaaacgaaattagtaacttaagtgctttattatcattgaaagttgctaataataaattggtagaactaccctcttctttgtcttccctgcaaaggttgaggaatttagacctttcaaataataggctgacatctatgggctctattgaactcagcttgatgcacaaccttcagaatttaaatcttcaggtacttatatctgcaacttagtacatacatgtattttaaatgatcccatgcgttgaaaaattatgtacagtttgcattggcatatccaaattcattgtcttggttgccggtgatcttctttattaaacttatccaccttgttgacgatcttgtgtttttatggttcagtacaataaatttcttgcccattgtgaaataccttcctggatatgttgcaatttggaaggaattggtggaaaacccattgacaacttcgtcaattcatctgttgaaatggatttatatgataacgctagtcacgaatatgatggaagtctctctcgtaaaggtgaggactagaaaattaattttggcaaaaacgttttgttataatgtttgtctcctttctgatcctgtgtatttgatcctttcaatgcatgtggggcctaatgtaaatattctattaatttatacaggttctcaccatcttcttccaggtctaatgactgcatcagcatcaaacaatagatgtttttcagcgaggaaatctggtaaaaggtggaagaggaggtattatttgcagcagagagctcgtcaagaacggttaaacaacagtaggaagtggaaaggtatagaccatactaagttgttatcttctgtggaggatgagaagtgtgaacctggaagtctaggagttcttgctcctgatccttctgttgaagggacatctgaagtcatactggatgatgatgatgatgataaagaaatacttcctggggatgatgaaagtgagaatctttcaaacagtggtgaggataatgatattactttgaaaaaagatctttatgcagaaaatgactcatgcatcagcgttgaatcttctgcagtaaacaaaggggataaatatgatagttctgagaagaatgaatctttggcctcagttcagaataaagttgtcgaggatgaagatacattgtcagaaatgctaaaaagttattcaaattctaagaggcactgtgatagggatcttgacaatcccaaaccgtgcaagtcccgtaaatcttttgatgatagtgctagtgtatctcgcaaatatagtgatacttcgttctgcggcattgaggatttcctgccagatggcttttatgacgctggacgtgatcggcccttcatgcctgtgaggaattatgagcaaagtttccctcttgattcccgtgaagttataattttggacaggttatgtacttgtactttctgttgatatatagacatcatatgttcttgtttctggttagtggttggcttatttcacatgacatattggttctctactttaattgactttgtcatttgttcttattttcagggaaagggatgaggagttagatgcaattgtaatatctgcacaagcaatgttatctcgtctgaagcaattaaatagtctaactagagatgcagcttggatcaatgagttgcaggttgtatcattgcttgctctctttgtttctgatcattttggtggcagtgataaaagtgcaataattgataagactcgaaaagctgtatctggctcaaactaccggaagccttttgtttgcacctgctcaactggaaatggcatgagtgttaatactcaaaccaatccaagtgcagaatctgttgaagatattgttttttctgatatctgtgaaaaatcactccgtgctatcaaagctaggagaaattccatcatagttcctataggaactgtacattttggtgtatgccggcatagagcattgctaatgaaggtgattttcataccatattgatatttaggaatctttttatgtagacctattttcttgacttttatgtctaatgcatctgtaatcctacagtatctatgtgaccgaatggagcctccaattctttgcgagcttgtcaggggttacctggattttatgccacatgcatggaatattgtattacttaagagcggtgattcgctggttcgcatggtagttgatgcttgtcatccacatgatatacgagaagaaacagatccagagtattattgcaggttggttatcttcaaaaattataatcctagtacagatgtttttttttccttcatgttctgagatattgcatacagggtccttttgcttgatattttaccgtcttcacttattaatatgaagcccagaactatgttttgtttcactgtcagtgggaaattttggaccatacctgatatgagacagtcaagttattcattttattctgctttatcttcctacttatgtatcagcattcatattcttgattgttgcttattataggtatattcccctcagtcggaacagaggttccttgtcctctggaagcagcaagactgctcaaggtagttcctttccctcgtctttctcagatgaaattttgaaagcagcttctacttcacttatgcggtgcaaatatggagcagttgaggcagcagcaaaggtacatattttgaaaaaattatattgctcttattttgactatttatcaatgttgtcgaaatttttattccttatgcattcatttatgaggttgaaattttgttgtaaaccttcagttttacattcctttttgcattcttggaactttaacctttctttccacgtggagttaatttacaagtccgaactcggataataataataggttatatgactttcatctgagatcttcaactttatttcctttttctaataattaataatatctgattaagtagtgctgattttttaattgatgattattgtgcatatgttgtttgttgctgcaggttcgcactgtggaggtctccaggacctcagcaaatgatattagaaattttgagtatgggtgcttaggtgaagtaagaattttaggtgctctacagcactcttgtatagtcgaaatgtatgggcaccagatatcttgcaaatggatctcttcagaagatggcaagtctgagtatcgtgtactacagtctacaatattgatggagtacataacggggggatctttgaaggtaaacttactgtagccggtcaaagtttcaccttattcacttttggctgtcttaatgattgttatgactccatgcatattcttttctttctttcttttttttttgacaaactccatgcttattctataacagggctatatagaaaagttagcaaaagccggtgaaaagcatgtgcctgtggagctggctttgtgcattgctagggatgttgcatctgcattagtagagctccattccaaacacattattcatcgtgatataaaaagtgaaaacattttgattgacttagacagaaaaaaggttgatggaacacctactgtgaaaatctgtgattttgatagagctgtgcctcttcgttctttactgcatacatgctgcattgcgcaattaggaatacctcctcctgatgtgtgtgtcggaacacctcgctggatggcacctgaagtcttgcgagcaatgcatgaacgtaatccttatggaatggtaagctgagttcagtttaccatataattttaattaatcatttgtgattcgctgttccctaaacatttgaagtcatgttttattattgctgatggcaaaaatctttttgtcattttatgtcattgtttttcttcttcttcctgctaactttgctacagcaatgttcatatagttttcttgactactttttcttgttacaggaaatcgatatttggtcatttggatgtctgcttctggaaatgttaacattgcaaattccttattcaggattacctgaagtagatattcacgatcatcttcaggtctctctctctct

SEQ ID NO: 381303 - DNA, 2945 bp, Cannabis indica
atatgtttgcaacgagcatggaaaaccggatttgctgcaaaagcagcagctccttgattgtcaacccagatgattggaacatcagctaaggtcacctgcaattcactgaaaagagagtgaaaccacttaagctcagccgttgtgttagccaatgctcgaaattcagactctgtagatgaacgggcaacaactggctgctttttagcagaccaggaaaggagattggggccaagaaagacagcataaccgcctgtggagcgtcgatcatcagggcaactcgcccaatcagcatccgagtatgcttcaatggacattctcgttgctggtgtaagttgcaggccatgagtaagagttccttttaagtatcgcagcagccttttacatgcctcccaatgaaccacagttggggcatgaataaattgggataacttgttgataataaaagctacatcaggccgagttagagtcaaatactgtaatgccccaagtgtgctacgatagagagttttgtcctcaaaggggagaccctctgtcaaagacagtttgtgtgcactgcttgtaggacttgagcacacttttgcaccatctaaatgaagtttaacaagcaaatcagtaatatatttactttgagacaaatacatatgagttgagtctctatgaatctccacccctagaaagtaatggactgcccccatgtccttgagagaaaaactggtatttagatgagtgattagttgctgaataagtgtaacattaggccccgtaatgagtatatcatcaacgtatacaagaagaattatttgagtggagcccgagccatggataaacagagaagtatctgcacgagaagccttaaatccccaattgaataaagtggttttgagtttgtcattccaagcccttggtgcttgtttcaatccatagattgctttatttatcttgcacacatgattaggataaagagggtcttcaaaacctttaggttgagtcatgtatactgtctcactaaggtctccatacaaaaaggcatttgacacatccagttgcctcacttcccaattatatgtcacggctaaggtgagaaccaatcgaacagttactggttttaccacaggactaaaggtgtcctgaaaatcgatgccaggctgctgaaggtatccacgggccacaagcctcgatttgcatttatccaaagtcccatctgcattgagctttactctatacacccatttattatcaattagaatcataaaaggttcataaggcacaagtgtccaagtaccttgagctttgagagctttaatttcagttgacatagagccattccaaacaggatcacgaagggcagatttgatagacttcggttcacgaggtagtagagattcaggtagccgatgtttagtggcaagataggcttttggcttgtagatacctcgcatagatctagtgatcatagagtgagtgcgagggtgaggaccagcagtagtagaagtggattcagcagctgtagtatcaacattagttgttggtgcaggttgtgactgagatattgcagcaggaccttcattgtgcacaccaaaattatcatgtaaaggagaggcagcaggagcaatatcagagggcacagaaattgcagtaggggcctgatgaatagctgctgaagtaacagcaggagttgaaacatgttgagcagacacagaagcaccagtagtagaagtaggaggccgagtagatggttcagtaacagtatgagtaacttcaggaccaggagcagtaacaaattgcatagtagaatacattggagcttcagaagttgcatttgaggaagtaataggaggcttgaaagcaggaaaagacaattcatcaaaaacaacatttctggcaatgaacacccttccagcagcattttcacataagtaacctttatgtttgggagaataacagaaaaatacactcttcagacctgtactcaagtttgtgatgattatagggtctcaaatgtggatagcaagcacaaccaaatggtttaaaaacagtataatcaggttgctcattaaaaagacattcataaggactaatattatcaagaacaggggttggcattcgattaatagaatgagtagcacactgaaatgcataccaccaataggaaaggtcaagattagcttgagctaatagagttaaaccagtttcagttatgtgtctatgttttctttcaactcgtccattttgagcatgactatggggacggttgtttgaaaacaatgccttgtatcactcaagaatttgtcaaaaggcctatattcccctccaccatcagcttgaacagctttaattggtaaattaaactgcttttccacaaggcttttaaacctaataaaggtttcaaaagcttgggatttcatagtgagaggaaatatccaagaaaaacgactataatcatcaacaaaaacaatgtagtatttatagttttccttggatgggacatgagatggtccccataaatctgtgtgaaccaaagcaagaggctgcttggctcgggatgtagataagggataggggagtctatggtttttgcctaattgacatgccttacacaattccagattcttgagagagcaaggtatattagtgttgtgcaaaatttttcgaagtgtattaaaagagggatgtccaagtttcttgtgccaaagattaatatcatgagaagttggggacagtaggacagtaggagtagaaacatgagaataagaagaacatggctctttattaatttgttcagtacaagaagatgtgtcaacattcagagaacaatgattacaacacttggactgactcaacaacgatgaagaagaaaaatctgaagtggcaagatgcacctgcagagcagtatttgaaagagtagagctatcatctccaaggtgataaagcccatctttaatttt

SEQ ID NO: 381304 - DNA, 2211 bp, Cannabis indica
cagtgaaatttctcaaaaaaaaacattaatatttcagtatacacttcagttgcatgtacaaattaaagtgcaatatataatccgtaatccaaggcttgtttttgacaaaaatatatatatatttacatgtatattatatgtattgttagcatcaagacagatatagcagttttacaataaacatattaaatgaaaaataatatacgtatataaatatattaaatttatatcccaaagtacaagtcgaaatctaggatatcgaacactaatacgcatgcgtatatgttcatggaccacgtagtactctcaattaattatatttatatataattcttttcatatctgcgagaggatatataattaataaatatctatatgagacttggaaaaattaatattggatatatgcataggaagatcgatgacaatattatgtttatatatatatatatataaccattcttagtttaatttgctggagaaaaagaaaaagaaacattctttataatatatacattgataatgatacatacatgtgtgagatactaaaaaaaaaattaaaaaaaaaaatcaagaaagaaagaaagcctagctagaataatattgtaggtttaactagatgattaaaattcactttgaaaatggaaaagaacattaattaatatgaagcctttttttttctgaccttcttttatagtagagaaatttattagaaactaaattaaaaatcaaggctattgaagaagataatcttcatatatatggtggtggttttatagtgcagcaccaccaattcattatgcacccacttggtgtgtaataatattattagtacaattattactttatatataatcaaataataaccgtcatcaactaccacaaactgattcctattattattagatgagaaaaagcaaattagtttgggctgcacgaatttactaacccaaattcccatcccaatataaccttaatattatcatttagagttcttgaaatcctatatacctaaaaatatgaaaagggattaattggctaaaagttatatttatttaatttttcaataaatgaatcagtacggatagaaactatatatgccaaaggcatataccctatattctagggctagctatgtatgagatattagtagccttaaaaagggaagttaaataagatgggagaaatgcacattttgacaaatgaaaagaaaaagttatagcaaatgaaagatatattcgattgagcatatgcaaagatattgttttaccaataaatagcattgctatatctgatttgattcttgatagaattttgaaatacacaagttaattacatttagaaactatatcatattaattaattaagacctatatttagttcatagtctaccactatatatagggttgaaaatgaaggcctattatgtgttaattaagaaagtggtcactaaaatctattatatataagtactatataaagttatcaagttattgaacaaagaattaatgtataagttattcgataatttagaatacattgtgaggtttgtttagtacattgtattgtatgatataatattgtgttaggtttattgtacactatatatagtattgtaaaatattatttttagtataatattatatttggtattgacttttattaataagtcatgtaaattatactacttttaccatgcataaacccgactctaaccccacctagcccaagacccggccccatgccccgagcacaaaccctgacctcagacctcatgacctcagccccagcactaaccttattctcgactcgaccggcccagacctaggacccagacccagcctcaacccttaccctggaacctcaaacctaattaaggaccaaacgccgacattagcctcaaccccaactttggttctcaaactttgacctcatatcatttctaaatattatagtacaaattaataaaattattcctatgtattaaataatttatgtgatttctattatactaaaattttataatggtagtaattaatataatataaagttctattcaaacactgtagaagaatgaaaggtctcatagtcatgcatatacaagagttgtacataaatttttgtgaattgtccaatccaaataaccagcctaaactaaatcaagataacccaacaaaaaatataaactgaaaatataacttgcccaatctt

SEQ ID NO: 381305 - DNA, 1416 bp, Cannabis indica
tcatcatcaacacctagtgtttcgcatgttccctctggtgtttacagtatgtctccaccaccaggctttgaacatgtcattcctcattatggaatgcaacaaccagctacaccagctgttcattcgattggtgtagattctactgtttcaacccatggttaggacactccaccagctatttcaccacctgcaccagtgcctgcatctgttgttgcatcagatcctgtcactatccctggatcatcaaagcctccatcaatttctactcatcagatgcaaacaaggtccaaatcagggatacataaacctaaaacttttcttgtttctagaatccctctatcattcaaagaggctcttcaacaagaaaagtggttcaaggctatgaaaactgaaatggttgttgttataaagaacaaaacctggttgttagttccagttccagaagtcagacaactaataggatgcaaattggtatataggataaataaactctgatagcagtgttaacactctcaaagaaagactagttaccaaggggttccatcaacaacctggttttaatttcatagagacttttagtcctgtaattaagctagtgactatcagagttatgctcactctagccttgtccagaaattggacaataaggcaacttgatgtcaataatgccttcctcaatggagacttgaatgagaaagtctacatgatccaatctcaaggttttgaagaccccactgccaaacaccttgtttgtaagctcaacaaaactctctatgggctcaaacaagctccaagagcttggtttgacaaactatagcaatgcttactcacatttggttttgctaccttaaaagcagatccttattcattcaacactctactcatcaaggcatcaccctcattcttgtctatgttgatgacattctcatcgcatgcagcaatccacaacacatagactcactggtccatgctctcaatcaaaaattttccttaaaagaccttggcaaacttagctattttcttggcatagaagtcaattccacaacaaaatgcctacatctctctcaaacaaaatatgctcaagatctacttgccagaaccaaaatgcaaggagctaaacactcaaacactccaatgaacagtgccctgcaactattaacataaggtagtgatcctattgaggacattcaactgtatagatctgttgttggagctctccagtgcttaacaattaccatacaaaaaatttccttttctgtgaacaaggtcttccagttcatgcaagatcccctacaagctcactggatagctgtgaagaaaatcttaagatacattagtggcactcttcactttggcttgcatctaaaatccccacccacttgacttgactacatgcatttggtgatgcagattggg

SEQ ID NO: 381306 - DNA, 2532 bp, Cannabis indica
ttaaaaaaaaaaaatccaacttttcctcaaaagagaatcagatatgtgaagattcaatcaggctctcgcttatagctgtcaggtgttcgtcaatttcctctgtggataacactctaaacaccgggttgtcctgcttcacaactcccacctacaatttaaataagaacaatcaattcaaactttattttttatcaaaagtcaaagcatagattctgaatgcaatatggaccccctcagcaaaataattaaagcccaaaaatgaattgcaagcgtgaaaatactaacataaaaccacagtattagaccatgccaataaaaaacaaaggcgatggaaccagaataaatgcaacaaggactagaaattctcaagtcaaaaaatactaatggcagtatctgactagagaacaaacataagaataagatagtatgatcaaaagaggaaaaagagaaagaatgcaaaagttggtgagtgattaaagatttgacgaaggtaatctcagcattgtgttcagaatacatttttaacggaaaaagaaaaaggaatgccatgcacaatagatctcaattagatatgagacgttcaagtaccatcactaccacgtcaagcaaagataaaatcagaaaggaaatccagatgaggaaaaaatgaatgaaaaatcaaaagttacaaacattatttagtttcaacttagctgctgtaatccatcacaaattcacaatgtcaagttaccaatcccatcataataaaacaatgaaattttagcaaaatgaactttaatacctcaatctcagaggccttgaaatccttctgcagaaatggcagtctacaaaattaacgtcgtcatgattccagtagttagacacaatacaattctatagatatacagatgctgattttgttgacaaactgcataatcatgttgctacatgtcgcacagaaaatactaccactgccatggcctgcgagcaatttggaaaagaataaagaattcacaacttttcatagctaggaatgctctgaagtcctaaaattagaatctaaaagatctccattgtctaattttttaatagcaagcaaccatagctgaaatggtcagcatgtggtttgctcccaaaaagtttaaagtacccctgcataactacaaaacaattgctaaaataatgagttaggctaggagcccaatgtcagaaagcaaattatacacaaaagtaatgatttgaagaaaaacaatccgtaaagcgaagtacaaataataattaacacataatgtttacctgtatgctttcctcatatgtaaaatcaggattgttcttcatttttttctccaagaagttgattacctcttgttcttttaatcctgaacttgtggcctaaagtacaaagtaatgaaactccagtaataagaattacatatatttgataatgcacacataaaaagggaatgactgaacaaaacaatgaaaggaaaagaaagttctccacttccctttcctagtacagaaacacataaacaagtgctgaaaacttatgacaatgtaccttgtggccgaagaaatgaccagctgggtcacatttgtacaggcaaggtccaaactcatcgtcaaaccccaaaaccattgcaaattcccaaatcaagcagaaatcaaaaggaaataaataaataaaaaccagtcacaatatataaataatatatctctattactaaatctaataaacatttactctgttttttttcctattatataataagaaacttttagaagtaacttacattacgaactaacctactccaagtggtctcatgtaagcatgttgagtatacacttgtgatttgtctgcaatcctattcacaacaaataatacagcacatgaggcagagaatcacaaatacactccagctaaaataaataaatatgtagcaaaccccttttggaatttggagtgtatcattctagaaatctactcggggaagaaaaatgaaactactataatgtcataccatagtagagtagaaaaaatgaattaccattgagccaataaatttactggcatttcataaccatatctgaagcgaaactcagctgcttcatttcttgcttgtgataccaaggttcttgcatcagctggaaaatggaaagtcagaaagataaatcaaagtaacaaaagtcagtatacaaggtagtggaataaatggtaaaatattgagtcatatataataagaagataggttactccatttatcaccaattggtattaaaatgaaattccataattctcaacaaggtacatctagggaaataaaaacagcagaactacaatcaagataaagcttaagaagatgccatcaatcgtaataacaaattttcaacaaaaatcacaaaattaccagaggttcaaatctatacttacagggaccttcttctgagtgacaacaaaaactgaatattttccgcagacacctattgaggtgatcccagcagccttaacagccttgaaagcatattctgttagacttttatttgggcttacat

SEQ ID NO: 381307 - DNA, 902 bp, Cannabis indica
ttatttttttgtagctcctgagactgatatttttaattctcattatcaataaagattggtggcaatactttcaaactgaagtatgaccaagttcacattgaagataggatcggaactagtataattctcatgtgttgttgtgtctggaagctatctagatttatttgtgtttatctttctggtttataatatgtgtttgttggtttttaattcttgatttgtttgttttaatttaacttttatttgtttaagtgtgatcttgaacttagaattacagagattaattcctatatattaaagctaaatttcctacaaagtgatttatttttatctcttatctaattaaattgaaccatttttttcttttttctaggaatggaaaaaatatgtatgcgaagtttcagtaattgaaggtatttgcaccagtgtgggtcgtttgaccccaatttactatgatcagttaatggcaattgtaaatgtgagctctgtgttatacaattatgggcctttccttgtggagctgggagactgtacttttgtacggaaaaccttcatgaatattagtttggaccactgttttggactgagagacaacagtagattgattgttattgggctagttttggcttctgctacagttatactttgtttgttcttatgggttttcttcaccagagaaagcaaacatggaggttatgataaacagactcaacaagatagtttctcggtagacagaaaaatataacctagctagtattgattgtgtataactttttaatagttaatcatgttattgtagtaaaaagtaattatgtactcatactaatactagtacatgaacatcgatccttttactataaagttgatcaaacaattattgattgtttatttatttatttatt

SEQ ID NO: 381308 - DNA, 3983 bp, Cannabis indica
aaaaatagcagaccatttttttgggtccatgtctactaaaaacgatagactgtttctggaaaaatggtctgccgttttctattacaaattttcgtaaaatctcatttctaagtcaaatctatcccaaaacttctataaagctccagaacacctatttaagtcataactaacataatccaacaaaaacattcattatcaagcattagaaataaaatccaccattaaagacctaagtttgatcttaaaaggtcaaactttggtcaaaccaacaaataccaacacaacgagcatataatcaacataacaaatcttaaaacaactcaacataccctaatcaacccagctcttacaaaaaccaaaacccaaaaaatatgtataaaaacccaatttcaactaacacaaccctaggtttctatgctgcaaactccttgaattctaatctaaaagtgaaaagagaactgatcttctctttggttcttttaaggtcgaaataaaggagagagtgaaagcttgatatcttttcttaatttttagtttttgataaggataacataagttaattaatttctttatttcaacttaaactattcaatacactaaggattacatcaaaagtcccattaatctactaaaggcaaactaaggccaaaagactaattgccttttacttcaatactaagaaatctaatgatatagggataaagtagtccaaactataatcttaattaatctcgacattctaaatatgtaactattttaccccgctaaatctaagatattcaagtgaatctatgtgactcaaattggccaaatcgttgcattctactactaccggacataaaatatgaaaaacatgatatctaatatataacataaataatacacctagaattcaaatatatctccataattgcaaaaataataatttaaagcctattttaacaataagccctaattgtctattaattcccaaaataaagttaagcggtcattacaattatctccccgttaaaaggatttcgtccttgaaatctaacctaaactacttctgttcctccagggtaccttgaccaatgctatggtcttatttcgaagaactttgtccttcatatcaaggatctggaccgattgctcctcataacataaatctggttggagctctagtgtttcatagttcaagacatgtgtaggatccaaaacgtattttcaaaacataaaaatatgaaatacgttatgcactgttgataatcctggaggcaagggtagatgatacgctaccaatctaatcttcttgagaatctcaaaaggcccattgaatctagggcacaacttgccctttttcccaaaatgttgaacccctttcattggggatacccataagaagacatgatctcctacctaaaattctatatttctgtatttcgaatctgtaacttttctgcctactctgagaaggaaatattatggccttgattttttttatcgcctcattggtccgtgaactgattctggacctacgtattttctttctctagtttcatgccaatgaattggtgatctacatttttttaccatacaacatcacataaagagcgatccctattgtactctaatatcattgtcgtatgaaaactctatcaattgtagatactttctcgaggagccttcaaaatccatcacaaaatcttgtaatatatcctccaatatctaaattttcctctttgacagaccatctgtcagaagacggaaagttgtactgaactttaactttgtacccatggctcgttgaagacttccctaaaacttgtaagtaaacttcaaatcgctatctgaaataatggacttcggagcaccatgaagtcatactatttcttttacatatagctctgcatactgatccataactacccatacagaatcaaacatacccgtggttttagttaatccagccacaaaatctatggtcacttcctcccacttccacttaggaagtgttaaagctccaacaaccctgcatgtctttgatgttcagtcttaatctgctgacaagtcaagcatctagtcatataatctaccacatccttcttcataccgcaccaccagtaatagagttttaaatcttggtatatcttggtggtattgggatgtaatgaatatggagtggtacgagcttcatcaagaatctctttcctaagctcagcactgctcgaaacacacactcaggttttataaagtaacattttgttacttgactttgagaaatctttagcttggccaactatgacttcttctcaaatttttaccaattcttgatccatcaactaatactttattctttctagcaaatctaattgaagtgtcaaattgctgagtctatcaaccacaaactcaatacctgatttggccatatttgttgctaactaagaagagatcatagttgtactaaaaacctattcgggacctttcttgcttagggcatccacaactacattggccttcttgagatgatagagaatttcataatcgtaatctttaaataatttcaaccacgacctctatctcatattcaaatatttatgagtaaagaagtatttgaggctcttgtgatcggtatagatttcacacttttctttgtagaaatagtttcactaaatcttcacagcaacgaccattgtggtaagttttaagtcatgacttttagtatcgctactcatactcctttaattggcgagaagcataagtaatggccctatcagcttgtatcagaatgcatgtcagaccctatcaagatgcatcacaataaaccacaaaattttcttgatctgatggtagagctaacacaagagttgtgatcgatcgttgcttcagttattgaaaacttggttcacacttgtctgtccacataaatcgttgtttcttcttggttaactatgttaagggtgttgaaaatccttctacaaattggtagtagtacccagcgaaacccagaaaacctttgaattcagtaactttcttcggccttgaccaatcccttatagattcaatctttcccagatataccatgattccatctttactaatgtgccctaggaaggactcttgggatagctaaaattcacacttttaaaatttggcataaagtttgtgctcccgtagtcataaaatcattcgtagatgctgctcatgctctgcttctgattgagagtacacaaggatattactgataaatactataacacatatatcaaagaaatccttgaataccctattcattagatccatagaagttgttagagtattggttagacataaccagaaattcataatggtcctacctatgcagaggatacttgtccttaattgtaaccttgtttagttctcggtagtcaatagacgtgcaaagtgatccatatttattcttaaagaacaacactagagctccccagggtgacgcactgggtcgagaaaatcctaagtcaagaatcccctgaagttgtatctttaattccttgagttcagtgggagccattctattgggtgccttagaaactggcttcgctccaagtgtaagtcaattacaaaatctattttttactgtggtcgtaaccctggaagttaacccaaaaacacgtaaaaattcttgtaccactttaatgtcttcaggctgaattgactcgggtcggtggtatctaacaccactgttagaaaccctatacatccctccttaaaaaagtatctagccttcaacactgagattactgaaacctgagaaccttgaaaagataccaacaatacaaatagttctttaccctcaagttgaaaagtcatcatcttccgtttgcaattaatactagtagcatacttggacaagaaatccattctaattacaatatcaaagtctcctaaacctaattctactagatcatcactcaactccctatcctcaatcctaattggcatagacctaatccaccttttggaga

SEQ ID NO: 381309 - DNA, 3081 bp, Cannabis indica
tatatcagaccagacatctttaaagaagcttgatctgaatccatcaggtccaggagattttgtctctggaaaactacacaacgccttcttgatttccctctttgtgaaaggcttaagcatcataacttgttgatccatgtcaagcatgttgtcattggatgaaccacccacaaatagcttccaaatttcctggtatgagttctttttcataacttcttcgaaatttatttcttccaccgagaaattagctaaggccttactcttattgtagcttgggggtgataagttattttatattgacccaactcaattgaccattttatcagtcttcatgatgcattagatttggatagaacttgtctcagtggttgattgattaataattaaataggtgcacttaaaaatatggtcgaagtttttgtgaggcatgtaataggtcaagacgagtttttcaagagggggatatttagatttttctccagtaaacgttcgctcacataatatactgatttttgggcctttccctcttctcggactaaagctgcacttatagcattttctgagacaaccaagtgtatgtataatacttcacccattattgcttttgagaataccagtgatgttattaaatgttgctttatttcttaaaaggcctggtcacattcctcgttccattctaatcttctattgtctcgcaatacattaaaaaatagaaaacatttgtcagtggatttccaaatgaatctattttaggtagccattttcccagctagagactggacttcttttatctttctgggtgaaagcatctcgagcaaagcttttatattttggggttagccttgattcccctcgcatatacaattataattgagaaatttctctaaagaaattccaaatgaacatttctttagattcaacttcatcttaaactttttcaaaatcatgaagcattccacaaggtcctttacatggtcctcagtcttagctgactttaccaacatatcatccaaataaacttccatgtttcgtcctatatgattttcaaacataccatttacgaagcattagtatgttttctcaatatttttttaatccaaatggcattacctcgtagcaatagagcctcatatttgtgacaaaaagtttatgctcctaatcagagatgtgcctttttatgtggttatatccagaatacgcatccataaaggtcacgagttcatgccctgccattacatcaactaattggtcgattcttggtaaaggaaaacaatcttttaggcatgatttataatggcaagacaaatctatgcacattctccatgtgccatttggttttgggactaaaacaagaattgatatccaagttggataaaaaaagcctctctaatgaagttgttggtcaaaatcttgtttatgttgagatggtgaaggtctatgttgagatggtgacaaattacattcggatcaatcccaaccatgcctaaatggctcaaggaaaattggtcctggtttgcctttagaaagatgattaattactattttaattctacccctaatcccttaccaatttttacactttttggttgggtcaccagggtctagaattaccttttccaaaccctctactggctctagttgtctatgttcctctttgattcttgggtccaagtcttctacattcttttcactatctcccttagttataacaaccaatgacagatgagcatccattcttcattttagctcaatactgtaacattatctcacaattagctggtctcctttcaaagtactagccccagtttgagttgcgaactttaaagataaatgtgttatcgagttgactatccccattccaatcagtgttgggcaacccattagcatattacaaaatgaaggaagatctaccatgaggaactcttgaatctgggttacagatagtgggaattccccccattgtaagtaggagttcaatagttacaaggcttgctacactatcttctctaaacacacataaattttccatgcaaggttaaagctttacatcttccaaacccatctttctcaatttttccgtataaaggatgtttaccaagctcccactatctaccataaccctttttatccttttattggcgagataaaatgtgatgaccaagggatcagtatgtggaaattggacatgagatgcatcttcctcggtaaatgttattggtggatcctcatgtcttatacacttgagaagttcaggcgcaaaagccaagttttgattttttacctagtttatgttatttttttttttgcgcattgcttctggttctgacgagatttggccctcaaaaaatcaccaaaatatcctcgccatctattgggggaggttgcacattttaattttggttgttgggttgattttgctcatttcctctattttcgacatattatctgaaatagcctcaagaaataagacttttaatcttgtctttcagctatcgacatgtcctatgtctttatggaatcaataataatttttttagatcctgcttgttccttgcatttctgattggttctagtttgggaaatgcaaccttgttttcgtttgcaaggaatattttttcatgaattttttttaactttgtatacacagaataaatcggtatgtacttctcatgtttcttctatttttcttttcttttgacgaatcttttgactcatccttcctttttccattggcttgtttcccttgcttatgtcacctgttgtcactgttatagtgctattgttagctttacttgagctgagttttttgggccgaatcgtgttcggggcctaaaatacattttttgggattttattttggcattttataaataattgaataatctaaaatttatttaagtttggtgtgtgatgaaatgacaatttttcccttgttgtatgcatatgtggtttattagccctaggggcattttggtcatttgaccatttgactttattttcaacaaaatggatttttaggaaaatgaaaaacacatttctggttttattgcccataaccgaacccttactctctctctctct

SEQ ID NO: 381310 - DNA, 3546 bp, Cannabis indica
ataataatatctctaacaagtatgagcttgaacgatgcgtaagacttgtaatgaacaaatcaaagaaactctaataatacaatttaacttaatacttaatcatcctaggattgaagatcaaatgatcaactaagtgatattgaatttagaaaaaatataatggtaagtttataatatctattccactgtgaatatcagaccagtccgatgtaaaccgtatacatttgatccttattttctttgctaatgccttggatttgttattccacttagccaagtataagtaaactatatcactgattatcacgccagtataaatttagtgcactaataaatcgtgggacttaaatagtttaaatcatataatcacagttattttctactatagtgacaacactataattatgaatagttacatgtttgagattttagaagaatttatatgttaaaattaatcatgaagtaaacaagtgaaccaagcaataaacaatagtcaaaaatattatttgatcttttattattatataaataagattgtattgaaataagaatttatttagggcataaaatccaatacttctttgttcaaatcgaatgcaaaactaaagatcacttgattattgtcagaaacccactgatcatgagtgttgatcatttccttgaggagttcaatttgagcatgagggatttcacaaaaaactaatgggtctttatatagcagcatcaaccctgctcaataaatcctagtaataaatagccaattcattaagattaaccccaaccatatttgctttaatttttagggcagaagaattgacgactgaagacacacaaagggtaggtaaacaaataaagacctccttggtcagaatgctatcaataaggtaagtgaggtctttcgagtgatggataatacccaatttgaacaaggtagctctgcgaactataaggaaattcccagcaatcattaaatagaagggggtagcaaattaatgatggtgaagattttaggattaataaccctgggaagtcattttccacaaattaaaaaaataaaagcaccataatatttatttgaagacggaaaaccacaaaccagatcattagagtttttcgtagagacatactaaacgataaagggagtactacaagaagttcttctaacatagtggaaaaatcaaaagtgagaaacgttgtgctcttgagagcacaaatggtgaccagacccagaactttttggacaaagttcggaacaagttgaatcattgaaacaccgatgatggaaagattgtaagttatcagaggaggaatatggaatcgtaatagttccatgttcttactgcacactaaagtcacacaattaaccatttgaagctcttccaagttcttgtccaattcatcctttcatagcatgcaaaaagccacccctttggggaataaggtatttgtatagatatcattgtaggatgattcatacttagataaatagttaggatcaactactaggcatggcatcatgatctaaatttctagtttggatcggagccctaatttgacggggcagttctgatccaaacaaatggatttcttataagatctcggattgggaacccgatctggtacaaaattatccaaatcgaatcagactcgtctcattttccttttttttcctaaaagaaagtgagataagtaaataatgtccaacgacctaacatcaattacaaaagattgatttcatgtaatgtatatactacattattatttactagtatggatttttaaaaatatcaacatcatatttggaaaattttctatttcttaatattcatattactattttttttttttactttttactaaaacaaaatctactaggacaaattataagaaaaaaaatttataaactcttccaataggttatcttattattgaattgattaaaaacatagagtgatgattttaattattttttttttacttttataaattagacttcatctttgatataaaatgtaaataataatatacattaaaaaatataatttgataattaaaaataatagatcaaatttataaattatttattttattgggttgaaaatagatataatcataaaaaagttttaatacaaaaatttaaatttgtaaaataaataattaaaaaaaaacggatctaaagatttcgatgtgacccgattcagataatttgggtcggatataattcattccaaaaaagtaaaccaagggagccgagcatgtcagattagcaattgattcagatccaatcagatctgacccctatttacactcctcttaataataggagaggccttctcagaaacagtcttagatttgttcctaaaatttctcgaagccataatttcaaaatacaaatagagggaaaaaaaagagaaaatttaagagcaacaaaatcaaaaaagcaaaagaatagaaatttgggaaaaaagaatctcgataaagattcgaagagaagacaatatcaaggaacttactaaaactttttgatttttttccttatttaaatatcttaatttttgaattcgaaattaagaataaaataaaaatataagggtaaatagaaaagtgggaatagttttccagaaatttgaaatgattactccattaaataaattacggctcattaatgagacacgaattgttttggataactggttccatgacatccgagctcaactaaaatagttgcgagctaaaaaatcataaaactgaggggcaattgtaagtgagaaaaaaagatctcagtggtaaaatagtaattcaatcgttagtaacaaatcaaaattgatataataatatggtagagtcgctaagcacaccatttcactaaaaagagaaaacagcttgaagaaagcagagctcatctagaaagcaacgtaaagcaaaactttaagaaatcaaagaagtagagcttgaggatcttggagcataggagtaaggataaagagcgtgcaaggaaacaaagagaaactaattcacatgaaccaatcacaacaggataaaattaaaggaccaacagtcactctcgtctataaataggggccttgtcgtttaaaagggggacagattcttgttcacagtaggctaatcgaagctctatcggaatacatcctcgagatcattccgagcacgaaaaacagttgaactagaaagattgtagaaatttagaggtaattgtatacaataatagagaatttgtatttcgattagattgaacctaatgtaaagaattcattatcatatcaattggttgttgagctaatttataccatcaataatctctacttaattataactactaaataataaaatataattaatttagtctcaaatgtatcaagattttattgaataatagttgggtctaacgtgcttcgcacgcgatgtaatatccgctaactctgcaagggtatttttgtaattttatttagctaagagtatttttattattttgcatatttatggatttaaatatgtatgagatttttttgtgatgatataatattt

SEQ ID NO: 381311 - DNA, 1475 bp, Cannabis indica
tttttttttttttttttgacaaggcaagacatattgcaaattaaataggcaagcatacaaagtaacaaatattatagaaaataatgtcatgttgcaaattaaattggttcaattacgtgttgaaggtttgatcaaagtacaacctagaggtttcacatgaagtccccaatagctaggtgcttgttattataataggtaaatttacgataaaatattagagataaattaaaaaatacttattttttgtgtttattaattaaaaatattactttataatattatattttattaaaatatacctatttttttaagtgggttgctcaatatatttttactctttacttagtctagcatatcattttcattaatttaagaaatttaatgaaaacattatctataaaagtaaatatatcttaaaaaaaatataaaaaatagagataaaaattaaaacaaataaagttaaatgaatatacactgtaattttttcataaaattatctagattttgttaattagtctgataaattctctaaattaattttaagcaatagactattttgtacatgtgatagattttcattagtctacattagtgctacaagtacaaatggtgtcataaatatgaatcatgttttaccatatcaaaaacaaaagatgggtgctataaaaaatatgactcgcggggttattataaaagggattatttcacaaatacataaaaacaacaaaaaaaatgtaaaaatacaaatgtacagaattttaaattttttatgatctttatgattttatttacagaatatacggtctttttatgttgtactcttgttaatttattgttgattttttgttatttgtatgttattttttgttgttattttaatgttacttggatgttattttcctattatttttatatagtttttgtgttgtttttatgaaaaatagtaaaaatgttaaaaaaaatttaaatgtaaaaatgtaatatttttttacaaaaaatagtgtcttatataattatcccattataaaatgcgtacagtgtttggattattgtcgtatccgaattcgtctaatgcttcactcgagttggcccgttttcttatgtaggctcaatttttactctattttcttatattttattttcacaatttataagataattattaaactatgtgtttttttagtttcaaatatttttatataatttttcaattatattttacaaaaaattattagaaatattaaaatttaaatatttattaataattctcaaattattattattactattatcaaattataatgttcttaggtggcgtttggttggaggtaatgaaatggaatggaatggaaaggaaacaatttttactccattcctttgtttggttgcattttaaagtattggaatggcattccaataaaatgtatggtggaatggctattccattttaaaaagaaaggaatgaccattccaat

SEQ ID NO: 381312 - DNA, 3047 bp, Cannabis indica
tttcttagtgtacttagaacaacctcataaatatctcccgtattcagtaaattagttgcatctttaatccattttcttctatatatccaattcatcacagatcataaatagtctcactaatttttgtactgttcaacgaacaaaaaatggggaacgacaaagaaattgctcgaaacatgaagaatggagaaaactcagtgaaactcaagtacgtcaagcttggttaccactacttaatctcaaatgcaaagtatcttttccttcttccacttatcatagccctaggtcacctctcgcttgaagatattgttcaactcttccaacactttgacctagggctcgtctccggtactcttgtgtgcacggcccttactgtgtgccttatcacgctctacttctcatggcgtcctcgagatgtttatcttgtcgacttcgcttgcttcaagccgaagcctgccctaatgtgcagccgtgagacgttcatgcggcagactgtgcaagcgagtgcctttagcgacgatcttatagggtttcagcagaagatcattgagaggtcaggctacggacaaaagacatatgtaccacaggcagcgctggaggacctgccaatggcaacgatggggaaggcaagggaggaggttgagatggttgtgtttggagcaatagacgaattgttggctaagacaaaagtcaatctcaaggatattgggatattggtcgtcaactgtagcttattcaatcctacaccatctctttcagccatggttgttaaccgttacaagctcagagggaatattttgagctatagtcttggtgggatgggttgcagcgctggaattatttctgttgacctcgcaaaacgattgttacaggtttgtatacttatatataataataaaatttatataaataaataatacggactacgagacacaattgtagtacctaaaaaaacaacataaaaggattgttattcgagcatacgtagattaaaactgatcatgatttcaatcacttgagtagttagtgaatatagaaaatattagataacatcgtcataatctgtgttattatttattggctagccttatttatttgaaaatataagcatgcatgtagtgtcaatgtacatgctaacgagtatggcagatatatagtaatgtctagtctggattgtctttctgtttatggaactctttatgttttatggctagtccggcagatatatagtaatgtctggctaaggttgagatatcatgtgtataaattttcaaatcatagaagcatgaccgtccatagtaaagtactgtcaacatcaatagttcagatgacatgaataggaagtaactatatatgaaaatgacatatacaatactatattggaaaattaattatctgcacatggtacattgtcgacgtatgctcgtaaacttatttgccttttacaaaaccgggagtcaatgataaatctatgctttgactcaaacaaataataaacaaaaaaagcattgttattgttattgttatactccatcaaaattattataataaattatatggaccatacttaattacaccaataaaattattgacatttaggatcatagcactaatattacccttttaacatttctcataaaaaaaactatttgtgtgtcgatacgtgtctattaataacatgggcatatcggtcccgagttaatcaataatcactattaaattaatgaaatggatctagaatattgtttcgtgttttctttgaattaatgtgacacgactattaatggaatgatgaatggaaaataatatttattattaggaccaaaggaactcgtatgccctagtggtgagcacagaaagcatgacccttaactggtacggtggcacaaacaagtcaatgctcatcaccaactgcttgttccgacttggcgccgccgcagtcctcctaacgaacaaatcctctgaacgccgccattccaaataccaactcatgcacaccttgcggacacacaagggcgcggatgacaagagctaccgttgcgtgatgcagcaagaagacaacaacggagaagtgggcgtcaagctctcaaaggatctccttacggtggccggagacgccatcaagacaaatatcaccatgttaggccccttagtcctcccagtatcggaacaaatcctcttcttggctaatctagtggggaggaaagtactgaggatgaagatcaagcagtacgtgcctgatttcaagctagcttttgagcatatttgtatccacgccggtggccgagctgtccttgatgagattgagaagaacctgaatctcacgaaatggcacgtggaaccttctagaatgacgctttacaggttcggaaatacttctagtagctctctttggtacgagttagcttacacggaagccaaaggtagggtccagaggggagatcgggtctggcagatggcatttgggtcgggtttcaaatgcaacagtgcagtttggaaggcaatccgttctgttaatccggccaaggagaagaatccctggaccgatgaaatcgatgagtttcccattacagtgcccgatgtgcaacccgttctagccaattaagtaatgcgtaataataattttatcattactatatcaatatatatagaagaaaagaaataatgatatgaatacgaatacgacggaactattaacagtggttttgggtcccatcaatttcaaaaacttgatgctgatatcatgatccaccactgcaatatcatgtgttattttgtttggattttccaattattacaataaatattaatgctagaataaaaatatatataaggttgtttttcttctatatgtgaattgatgtgatcgaatcaatccaaagatacaagaacacaaacacacacagctcacttaatcaaactctttcacacagagattgaatggacactagaatgaattgaatatttttgaatctttattgaagaacataaactgtacaatcaagaatcaatgtgagaattaaaaaaaaaaaataaataaataaata

SEQ ID NO: 381313 - DNA, 2641 bp, Cannabis indica
gaagaaagaaagatattcggaaactgtaagaaaaaatataactcttgttttagggtttttatttttatttaattttattttaattttaaaataaaattgaaatgcaaagtgaaaaatgagtaagtgtatatattacaccatgcacttcaaaactgacctaaagcaaagttcaattcatgaatgcaccttggacatcacaaatactagctacaaaaattaatacacttcatatcaatatcaaaaataaaataacagtataaatataggaaatgtttaggtggagtcacgaaaatattgtacatataaacatttttttcattaagtgtcactttattgtttcatactaataattaattaattaatttcttttatattatttttatttttgcccattgtatcctacaactcaataattcatgttaaatgtataaaactcatcttgtttagcatgttttctctcattcaatctttatgatgtattttaccattaaaatttggaacaagaagaaaacaaacctaaattgaataatagagcataaaaatactaaaaatacacactaaatggactctaaaaatgcataaaaataaatataacaataagttggtaatgaacagaccaaggaacccaataataatctaattagttagaatgcttatcaatcataattgaggttgaattggccgacggtcaatatccgtgatttgactaaattagttagctaacggtacattctgctatttataacattagatccagaccggtctagtcttatgtaacaaatacacctgatcttatttattttaccaaagtcctgaaaagaatttaacgcttaacttagtgcaatgattaatcttaggatttaatagaatttaattttaaataaataatcatgaatatggcatgtgagtaatgtgatttgttcaagtcagaataatttctactttctttattgattattaataataataaaagtacatattcaattggagttttaattaaagcataaaactctaaaatgttggacatggcaaaaaaaaaaattaatgtcctgcaccaatatatactagacatgaaaaatggtcatggaaggggtattttgtatggaaggggtattttgtagtagtgatttttgaatcaaatctaaaaagtgaaatttaattatgatatgataggttagacattaacttaatgatataggagcatattaaaattgtgaatgttaattttcctagttgatgaatttatcataaaaatatggaaattctcatcaatgtcgaggtttgtaattcgtaactggttataaattgcttttaataatttgttagctagcttgataagaagaagaaaagaaaatgtgcattaataactggtaggagggatagttgatgagatttaaacacctaactgtttatttatttcttctgttaattatgtttctttattattttttgcaatttacaatagtttatgttttgttatttactgttacaaacaaacatatatggttaaccaattataaactaaactacacaataattaattggtaattaataatttaatccttgtaggaggatacttggtcttaccaagatttattacaaattgcgagtgcacttgcatagcagcaataatttttgcaacatacgtcgaaagttgtcgtagtaggatttttgagacaataaatcattttagttggctcatttgtgtaggtgacaaatataaatatacttacatgtaaaaaaaaaaaaatcaaatatatagggtatatatttggttaaacaaaagaattttattaaaaataggcgcataaaatacaacgtaagatattttcgtccaaaatacttgtcacccttactgcgacaacttgttgtcgtaatatatgcaaatattttggaggaattttccaattgccctatttgtttcattgccaaatttgttttcatctagatgactacttttcatcaccatatatatcccttgatttttttggtgcaaccatatatatagtttgtgcaatacattttgctccaaattataaggctattacgatgattagttctcgcaatataaccttataaataaaatattaaagggaaagtacttagaaaattttactcagatatggataatgcggcgtggcgatcttacatagatgtcatccttgaatttgcagtaggtgttgtcgcaattggtctctttttcttgtaatgataggacaatagaaaaagttcttataaagaagaataacaaaatggtagtttgcattaccacactaagctagcaaagcatacaatttgtatgaaattctattttcacttcatccaactgtataagtaacagcaaatttgctatttggttggcactatacgtaatctttactttttttttgtaaggaatacatttttttaatatattggtatcttaaaaaagatatatcaacgcattctatattgttttgacatccaagtaaaatttgatttattttttttatggtcgtgtatactatagttatttaagatatttgacataattttaagaaattgagattaatttataatatagagaataatatttaaacaatatattttagaatgacgtgtgcaatagactgtttgaagtctagtttcagtgtattagttt

SEQ ID NO: 381314 - DNA, 1729 bp, Cannabis indica
tgagaagactataaattacctaattagtaaacctggtattgcatataaatcggtaataagaagataatcataataagccataaacaatagatacaattaaatcgaaagccctaacttttattcactgttaattcctttattaatttatatgcttcttactttcattactgtggtgtttagtgtttcctagttttaaatttttcttaaaatttatatagccaaatagaagtaagaatttaattttaacgtacttacttacaattctcgtgagatcgacctcactttttgtgaataatacatgttaaaacgatacgtataattgcgtgttgcaaaaaccacaacacaatgctcataaaatatcatcacctcttctccctcacatattcacttcttcttcttgtagtttcaagttagatttggttttttttttttctattctaaaaatttgataaaggaagttatattattattattattattattattattattattattatttgtaagaatgattttattactaaatcagctcaacaaaaaatcagttcaacaaacagatctaaaaaggactcctataccactttcaatcaacttgactaattcttatgggtataacattcatatagttctcttatatacatctccaattccattaatagtagaaacaattatttaaacttttccttcccaataaatctaactctctaaattaatgtgatagatggtgtctgtcatatcatttgcaaagatatgccttctaaatgtgttatttttaattcaatgtactattattgatccacaacttttactaaaggtataacaaagaaaaaatttgaacaagtcaaacaagtactctaagagcatatactaaattgagcaagtctatctctaactagtttagaatctctccaacaccgataacttaaattttgataaaagatatttttggcaaaacttacctcaatcagtaatgcgccacacactactacaaaaagagtattttgcgtcagtcaacacggctaatcaaaattgttgaccgatgtaaaaatcaacctctagagtgaattcatttatagtaaaagtcactacaaaaggaaagcacaacaaatctttatagttggcacacaataccctagtgaatattctaacaactagattttctaatgattacacaatctctaaagtcttttttttggtaatttagatgtcaaaatattttttatttatggtaaaattgctttgtgtttccaaaccgattttatcaccttgattttttgtttttattgatcttttctatagaagatctagggttaagcatttgaatatttttcttgaaattttcaagttccttttttaatagaataatttcctcaccttttaaacaaaaatcagtctcatattctttaatttttaattcaagagattcagtttgatgagacaattgtttatttatttttgataatgatctattttcagaagtaacttgtatccacttttcatacataaccttgtaagactcagccagtgactcctcacagatttcagattcatcagaatcagaattttctttttcaatggtattattcaaacataccaatctttctttcacctgcgaatcacaaacaaacttagaagaaattgaggttagtgcaacatttttagaaatatcttcatcactattagtttcatcgtcactccatgtgacattgaaacttttcttattcttttt

SEQ ID NO: 381315 - DNA, 2115 bp, Cannabis indica
tctcatcatttggtatcagagcaagccgaacctggtggatgccgccgacgagaatggagaagaaagtggaaggaattgaagagggactcgatagtgtgaagcaggatattcacaatatcaagctaattcttggtgagttcaaggatactcaagaacgaacagtcacgggtctagctgagcagatccgactatgcttgaatggtcaagcaaggatggccgatgagatgtgtgcactccgagagagtcaagcgccgacgcagagctccggccgacggtctgtaaacgaacgaccaccttctccggcagtggtaggatcgactgggcgagatggagacggagggaggcgttcggagtttcgggcaaggaaaattgaactacccgtgtattccggcgaagaccccgatgaatggacttacagggccgatcggtattttgggttgcagagattgtcgccggcggagcaactcgaagctgcgatattatgcttggagggtgcggctcttaactggtttcgatgggagaattccaggcatacgatcggttcatgggaagaattaaaggtgatgctcctccgtcgatttcgttctgctcatgagggaacaatttatgatcggttctttactctccgtcaaacggaatctgtgcaagattatcgtcggaagtttgagtcgttggctgcggctatggggacgatgggtgaccagggattgcaagctgcatatgtgaacgggctcaaaatggatatccaaggcccattacgcctactgcatcctaatgggctaatccgagcaatggaactttctgagtccattgaagcaaaccaggctcttgtgaggaattttaaaaccgggcccaatagatcatttcaaaatcggcccagctctttgactattcctgagtcacggatgccacacgtgacttcttctcccacatactcgactacttcggtcaacagcaaatcgacttcggcatcatcttcttcctcaccaacgagtttcaagcgcttcacagaggctgaattgagagaaaaaaaagaaagaggtgtttgttttaagtgcgatggacgctggtttcggggacacgagtgtaaggaggctgagttagtggtggtagttgttcaagatgaggcccaagaagacaccccggacgattttattgctgaaatggtgggacttcctccggcgggaacagcgacagaggcccaaactgttgaagtttctctacattccgtagtgggattaactcctccgaagacaatgaaaatgttgggatccattcatggacaagacgtggtggtattggtggatagcggggcgactcacaattttgtcactttggatttggctaccaaattggcacttccagttacaagtaccgaggcttacggagtgcaactcggcagcgggcaagcaataaaaggtacgggggtatgccgtggtgttcctttgactttgcaaagcattaatattgtggatgatttccttccgcttccattgggcaatacggatgtgattttgggagttcaatggttgaatacgttgcagaaaacaacacatcattggcaagagcatactatggaatttaatcttggtaacaaacgggtggttttacaaggggatcccaccttacataaaacaccagtttctctgaagtcattaatggctaccttacaaaccgagaagattggtgtttgggtggaattgggccattcggcagtcatggcagcagaggaagaaccatcggaagccatctccgccttgctacagcgctataatgccgtgtttgaggagccacggtctctaccaccacctcgacaacatgaccatgccatcaccttacgaccggatgcagcaccagttagtgttcggccgtatcgatacccccagatcacaaaggatgagattgagcggttgattgaccaaatgaaaagcgcaaagatcattcaagatagcaacagccccttttctagcccggtcttgttagtcaaaaagaaggacggtagttggcggttctgtgtggactaccgtgcccttaatcgagccaccattccagataagtttcctataccggtcattgatgaactcttggatgaattacatggtgctcaagtgttct

SEQ ID NO: 381316 - DNA, 3201 bp, Cannabis indica
aaaaaaaaagaaaaagtagggagtttatctttgccatggtcaattggagtgttgattattagtgtaaatgctttgaattttgagttggtgtagtgttggaagtgttgtgtttggataagattggattgtgattaatagaaacaggggaaatgttccatggccgattgatgtgtggactgtttatgtgaatgagttgaagttaatttggtgttgtaggtaaagttgtactgaattagtggtgtagttaaaaattattggtgtggtgttggactgattttttttgtttaaaaaagaaagagaaaagcagaggggactttttgttgtggctgtgtagtctttaaccaaagaaaaatgccgaatgttaagaaggttgctcgcaaagcaaaacaaaagtcactccatgagattccttaattttattgtaagacagccgaaaataagtaccacaacaaagtggacaatcaacaattttacatggaacgagggttagtggcaaatgtcgaggatattaacgagttacccgaattggtgagtgaaattgttcgtgtgagacactgggagctctttgtcaagaagcaagaacgtgcggtaatggaagttgtaaaagagttctacactaattttttgtctcaagaatggccaactgaagttattgtgcgtgaagtactagtgtcattttcagccaaagcaattaacaacttgtttgggttgacatcggtcgcctgcagttacacttccctaaaaggtcaagtgagcgacgagacactgtacgacatgattgcccaacttgccaagccagagtcagaatgggacttagatgattcttgaaaccttcggtttaggcaaacagaattcgagccggacatgaagtgtctatacacattcgtgcaaacttccttgtgccccacatcacatgactatactgttagccgagatcacacgtggatgttgcactgtattaagaaagggatgcctgtcgatgtaggggctgtcgtagctcaagatattgctgattgtgcacatcgagggaaaggaaaattatttctgccatccactatcactgctctttgtcgagaggcgggcgtctcaatgtgggtcgaggagggagcattgcatcccaggggtcctataagctttggcccaccccgagctcctaaaacaattcctgctttcgcttcaaccttagccactgagcctcctgtagatcgctttgctcactttgagcaagtgtaacaacaaatgtatcaaaagcaagaagccatgtgtggccatttgcaagctatgtgggcctatgagcagcagtgacatgcggttatggagcgcgcattgaagagagtgacaccacgatttgtgcccaagttcccacagtttcctcagtagattcttaacccgtgggcaacgccatcaacattgaatctagatgatccccacgaggactctgagtagagggagttccctaatccctaagctattttatattttctgttaggtgtcgtttttagtttgtgttgtactgtttgtgtgttgtcttttgtgttttaagtctcttgtgtcatgttatttatgtgtatgttaatgtgataatgagagttttgatagtttttctgtggcctagtgttctgctcgatgatggggcttttcactcattccatttatgttgctgcctagtttaatatgttgcctatacatgttaagttgctggatatcatggatgtttctttttagtctctcctcaatagtttatacttttattttcccaccatactttgaatttttcaaatgattgctgcatatgtaattttaggatatagaaatggttagtgcattttcttgaagcaaaatcctagctagacttgtccttagaaatgatttaggccacctttggacgtttgagcctttctacccttccctataagaatatttttctccttagtcacccactttttgagccgtttagcctatttttgctgtgcaacccaatcatacatatcacatcaatcctaatatgcattttccacacatgtcctaacttaattgctcacttgtcaagagccaagtttcacattaagtttggggtgagtgcggttagtgtagcttgtggcgagctaattcaagattataattttagccacattagggacaatattgggttgtaagtttggggtgggggaatttgctcataagatacaccattatgtactatcaatcaatattctcttactatctattatataagtgtactatagtgataattttcttgtctagtatatatatgtaaaaaaaaaacagcaacaaaagggggacgaaaaaaatagtgtgctcacaattgagtttggggtgttcccccatttttttaaaaaagaatatacatagcaagagaagtctattacaataccaagtacttgtgagtataatgagttagggaagtgaatcaagagagaaaaaatcagcatgggggagagactcggtttttgacaagtgaagtggttaggtgttgagctagctaaaatacatcctttaccataccttaacccaagccttatattacaagcttagtaaagtcctattgatcaaggggataagtttaaactacattagttgaggggagtgcactaatccaacctatggagctttaatgaatgtaaaatttttaatatagttgtaaagacgttcaaagcttcggtaggatatacttgtataaattattgattaggtgactatggggaggcattattgatatccagtgagaaaactttaaaggggcagcatataaagttatggcaaaaatatttttctattccacttgattccatttttctgagagcatcaatgtttgctaggtcatttttaaatttctttggaatctctcagttgtcttgtgtgttgagtcatgtgtaaaaatatgtttgttgtgttttatttttatgttgtcattgctcaaggatgagcaagattctaagtttggggtgttgacaactctaagatttagagttattttgatatctttaaacttgaattttaaactaaatagtagagtaattagtgtctattttatgtaattgtgtttagtttgttgtgtctttgtagtaaatagaaatgtgtgtgtgttattaagtgttacatagacttatgttgctgtttttgtgtatattaagcataaaaaaaaaggctaaaatgggtgttgggaagtgtttgggacaa

SEQ ID NO: 381317 - DNA, 2296 bp, Cannabis indica
caacaacgtataataaaatagtgaaggtgatcgatcgataatgaatagaaataaataaaatgaaattacactaattacaatatccacttctaaatattattctagttttttttttaattattcttttctatgtaattatagttattaataattgtgaagcaatagatcatgagacttttcaatgattgaattggcatacatataagataagacaataagaataacatactacaaacaatcttatttttattagtcacataaaaattataactaaaagtaaaaaaattgtaattaattataaattacaatttctatattgtgactaaaagacttgtgatcgaaaatatattaattacaaaaatcataattttattgtaactaaatgtattttcagtcacaatatatactttgttgtatttaaaactaaattagtgacgacttgtatttaagtattatattttagtcagttacaagtaactttttatggtgactatataataaaaaaaattaagttataactaaagaatttctcagtaaaaatagatttttttagtgactagagagtagattaactatgtttattatcactaacaatgatacttgtgttttatgtaatacttactagctagtcatgaaacccatagccacatatatagttttgatttggaaaaaagcttgaaatggataaagaggtgcttgacactctagatttcgacaagagatttatacaaattaatgttgttaatgtggtagtttacggactatgagaagttagaaatattttttttattggacgttaaaatgtatattgttcatgcaattgtaaatggaataaaaaaggagaaatggtaaaaggtatcagtggtgttaagcattctcctatgtgttaatatcgttatttgtctaattaagtattaggtctcatatagtttaatataataatttttaaagagtatcgctaaccaatcgcaagacaacatgtcttgagggtgctaggcaccactgatgcttaatagcaatgctcatcaaaaaaatatttgtagttttttcatcaactaagaccatgaatgttgtttactaatttatttaattgaaatattaaaaagcattagttatgtctaatattttttatatattaatattattattagtttaattaagtaatagattatatataactgaatataataattttcaagaatattagtaaggaatattacttttttatacttttcaataatttttttggaacaagggacttttcaatgattgaattattgtgtgacacataacacaagacaagtagactaaatagagtagctcctacctagattattattgcaattggctaagtcaagtcaagtggatatagaaagttttatattattatatataatctcaccgaatcaagaagtgacaagtgtcaagagtagattggttcctcaacattataaaaatctaatccttcactcactccctccctccacatatcatctcattagtttacaaattactatattattcattcttatcatttgaaaagaaagaaagaaagaaagaaatatgttgtgtattagaaacttggttttgttgttgattattgttattattggtgtatccaatagcaataataatattatgtgtgttgctcaaaattgggatgggccctttcaaggtattccaccatcaccaccaccaccgttccggcgcagccctttcaatcgtgtttcaccgccccgcagccgttacagtcgtggccgacgtccaccggcatttacaaccaccaacaccaataatcctactactgctactcctacaaccccatccaattaaaatatatatacataaacacttccatacgcatttatgtggcaagtaatttcaatcaattatctttatttaagatgagtttcactttacctatcaaaagtaacttatcatgtaagagcatgtcatatatttatatatgatttatatctacatttttcgttacttataaatatatatatatatatgtttgaagatgtagctgtgaataaaaaccaagatgtatatgcatgttggtattatattatataataaaaaggaagtgtatttgatgttgttcgtgtgtagcattgtaatcatacttatatatgaaaatatatttgaattattaatacaaaaataaataaaaattgagacaaaataataaaatattggagtcacatcgatgtgaaaacacaactaaaaacagtttataatttatgtgcatgtttgacatcataactaaaaaactattttttgtttttaaaaa

SEQ ID NO: 381318 - DNA, 4077 bp, Cannabis indica
aaaagacacagtttcagtactttaacccttttatgattgtcctttgtaaagaacatcaatttaaatggaaacgttactatgtattcactttctttcttcaaagctttgatactagctaactgagaccggaaagtgaggttatattcaagaactattgtttaataccttcggctgttcaaagatttgatgtttagcaaaatatcacctttgatccacggaaagctgaggcagttcatgccattgtggaaatagtcagggtggtaagtcacgtgataccacgccgaggccatctgctgctgatttcccacttcacagctgctttgaaaccatcctcgggcttccttctgcagattcttcaatgccagtagaacccgatccttggtgtcaccatatctcctgttatcacgctgcaaataggctgctcgctttcggatattgcctgtcagtacttcatcctcagtctccactccatagtagatcattatgccactgagtttatccatatacatatctctgtggctctcagcaatggcaatgaagtccttaaacccactcacttcaagatcgcaatcataagttgatcgagcaacctcctctgaccaaaccaggtttgaacttccttgcacatctgaactgatcattgcacggtaaagttgtcccagtaccccattggagatgtacatgggcttttctagcctctccatgaaatctggaaattccctaggctttaaagcctttggcatttcagcaggtgcaccagtctttgcaaaatccacagccatggagtgcaaagttgcaagttgcaggcacttttcgctaaaggctttatctggttcacgatcagcatggactaaatgagcagtagagatggcacccaacgtgtcattgatcatgtagtcaacaaaaaacttttgaatttcctgcaagataatgcaaagccaaaaatgcaacttctttcactaaaactttccaaacctttgtaattcagtttgagaaggagcattcagtatatgcctagttgaagttttgagattacctctatggtcacgttgtgatccattatacgaggtcttcgtccagtgtagtccataggggatgcagtttgtggtgggatgagaccagtatcccaactaatgaaatacaagtccccatcaagatcaccaccagagcattcattcggatgaggcctgcaaaccatgaagaagatgtaaacttgtttaggttgcaatcaaggctttgttaatttcacctaaatgaggacaatatttcaacagtaatattttagcacttctatgaataagtttatacctgtctcctttctgagggaagatgaggcaatccaccaactccttctcttctaattcgacactgtatacagcctcaagcaccctgacatcaccaggatgaagacaagggttttttgtgacaaccacctttcccaaaacaatagatgtttcatcatccacctttctgaaaaattcctgatcccctgcttgcagctcttctcttgtcatgcttatgcgaacaaagatctgaccataatctaagataccagtttcatccaagcatccaataagcacacgaccctttgggacaaatattcggcatctagtttttagatcagtcaactggttttcgtaataagattgaagcatcatagaaaggtaaggttccatatttggctcataaccttgatgtaacatctttattaagatattagatttatcagaactattaaatttctctaagacattcagtgctgcctctctatctatccgcattcttcccaaaagacgcaattgttcgtgttgcaatgctaggaaactttcatccttcacgcccagtgtagacaagagggtaacaatttctcgattcagaaaacagggcatagcgtcactccacttggtgacattaagcattctattttttgattcaaatttaagcatactactacgtaaggaaagcttccggaaggagctacgatcaacagcaatcacccctttatatccaccatatcgaatttgaaatgctgaaggtgtatggttcagcccacatttctgtgcaacttgcctggcgaaaggcagagaaattttcccaatgccatctgagaaacagtagtcaattccatcattattcaactccacatcaggaataatctctacatcttgcactgggacagtaagagtttgtgttgaggaactgaacaactgacccatcctgcagcacatttcgaaatactgcgaatcttgctgaaacagcccatccactctctaatatctccggcttttatatgttcattagaagcaaacatccaaacagaatttgatctgagttgactcgctgagaaagctagaaattcgtatcttttggatccaataacaatcccatctcgaagaattgaaagtacgcggtgatataatgcagttctgtaaggttttggaaacatgccttgttcgatggttgtagtgatggcattaggaggcagtttactccaatcttcttcgacaaaagtcactctcaaaaaatcattaacatatgatgagaagtgtttgacaacatagttgaacttttcaagctcaggacccatgcaaacaatcttcaatggggtaatcaaagctctgtggcaactcatgacattagtctcagttagtcttttgttggctgaaggacttttgacagttttctctaagatatgtgcatgagtcttgacaaacgaaaatggattataacaagtggacttgagcttatgcaacttctgaaaaaccgcttttaaggtttcttcacttaaactactgaaaagctcaatgagattactatctacagaagccaaactaatcttttgggtatgtacaagagaattaagctggaaaaaggtttcatatcctaaactatcatttgaaggagattttaaaaggggaactgtttcagagacattacaatactcttcaccttcttctaagttaaaatcttctacatcttcttgtctataataagggaaacaatcaaaagtatcagaagctaaaaagttctccttcaatgcccaataaaatgaggttgaatgaccaattgatttcaacccagaaaaatctgtagtacgaacccaaacaaactcaacattttctttgcaaatatgataacgatcagcaataaatctcgaagctatatgaggcccagataatctcctataaatctttggtccatattttagctgaggaaaaagaaagaaaaaaaagcccagaaaattcagaatacagttcataatctgaagagaagaaatataaagagaaaaaatacctttaaaagaatggagaacagattcccgccatccgaatagtacccaacactctccaaaatatcctcaaacctaatctccagcttgtaacattcttctccttgccatacccagaactcgaccctacccctttcgggcataacccatgctcgcacactctcccaagactccaacacgctcatccgatcctccgttcgcatgaaacccacgtgaaaaactccgtcgtcgaggcggtgtttggggtcgatgggttgtacgacgatgtcgtcgtaggattcggagattctgaggttctgggactggaaatagagttcgccttggagggagagataataggctttggatttcgcaaggagggtagtgaactggacccggccaaagccacgggacttccaattcttgcgctcggtcatgatttcgagggcgaagactgagtcaggaccgagtttggactcgaggaaggccaagaggtcctgagctatggcagtttgaggaatgtttgagactcggacggtggttctctctttgtctttgtcttcgccttcggaagccattgttgagcgagagagcttgagactgagagagtgagtgagagaggaactgaagaaggaaagtgagtcagcgttcttctttacaagaaaaagtgagtcaaagtgggaaaaaatgggtcctcgatttttgttattatatttataatttaaaaatgttttaaaaaggagaaatttgaattcctatacttacattacccaaaaaaaaatttcctaaatgcaaagttattaaaattg

SEQ ID NO: 381319 - DNA, 3477 bp, Cannabis indica
tcgtcgtccccctaaaaactttttttttcctggtatatattgactaaaacataattaataatatttagatacaagttgtaaactgattttaattttagtcacaataattattgtgactaaaaacgtatttagtcaacaaatttgtaattttttttgactaatacttttacctacagactttttttatcacataataaaatgagaattcataattagtataaattttttacatcatgtgactaaaagaagctattttgtagtgtatgttttgtttttagaaaatatatgtcgtgtaatttattatgggcgatttgataaatatttttaattatatgattttccattgttgaaatgaaggtcaattaaaacattaataaagataataatttggagaatataataaggtttgaaaaaaaacacacacaatattttcactttaaaataaaataggcttttattgaaagaactctaggcttttttttttttttttttttgtagtaaaagaactctaggcttttatattcatatgtcagattcaagagctatgtctttccctcgtttattaatatcaagattactatatcatctgacaaagttacgcatgagtggtgaaacatgaaattagtactcttgtgttcgttcaaaccccattatgttgattctctttatactactttatagcaatttttattaggaaattaacaatgaagtgaaagatagacttgtatcgtattgaaaattgcttaatttccactataaatggcgcatgattcgttattttatgttaattattaatggtctggtctggaccacgcattcatgtccttgtcttgcatgcatatgtcgtcttctccatctagtatatactagctagggttacctctattgatttgaatatgatgttaatggaaaacgatcgaagagtctgcttttcgaaattatatatttatccatacatataacagtgtataaagataaaatgtgtacttaagcatatacatatatatgactattgtttaccattaaaagaaaaaataaatcctttcatttttttcctcaaattgtcttttaatttacatctatatatatatatatatatataaatatatatatatttatattaataataataaattcaaaatctctgttcgtaaaatatatattttaagtttattaattagtgcattatgaactgattagtactttaaagaactagttctagtatgaacagggaacaaatatatacaaagaaaggacggataatatatatatgctcattgatctgtgaaacacatttaattaatatataatatgcgcatgcacatgtttgcctgcatataagtgcaatctccttttgcttcgacgatatcactacctagtcatcccttataagtcattcataaatataaattatgtatatatatatatatatatatatattatgggataggttctttacatatttttcttttgttaaaccattcagattatcttaattgattaatacagttgcgtatatataataatttaaagaaaagtaaatttcaatttctaatgaagcatctaagaatatcttctacatgttattacaaaatgtattattgtcttgtctcccactttcaatcatctgttgaaagacaacgtctcttgtcgttgtggtcgccgcactgagtcaacattcaaacgctattttggctggctgcttctgaattacaagcttaagtggtgacagctgcctctcttatttatttcttttgctttcatcaattgagacaattaaatactgatccttctttaaaacaatgaacatcctatcagagatacaacaaaaattttgtagcacattgtaaaataaataagaccaaatatttttactatcaaactattttgtaggcaaatgtcttatttatctactaagtttttgttagctaaatatttgtgtgtagttattaaactacattgtttcttaagtagcaaaatatttttttattcttagataccaattgtgcttaataacaaaataatatttcatttactgttttatgtcacacaatattaattgttagctacctatttcgctgccatttgttttaagttgatattttctatatgaatcaattcttagctccttattaaaaaaataaaataaaaatcttagctgttattctgtagaaagataattttcttaacacttttagcttccatatttagtaaatataatatttgttagctgctactactaatttattgtagtataaacataattattctttctataatattttttaaaataaatagtaaaaatgtagtagtaattatttttttttttaccaaaaccataattattatttgtaatgattctgtaataacttatcttatttatatagttttgtaacgaattttagtgaggttatttttatcgtttctaatttatatatgtcacatacattcatcaatttggtgaataataaaaaaaaattgatgtctctcgcattaatttttctagagcacagtgtcccttcttgatgctttttatggctaacccaaaagttgtacaaaaacttttggagatttttgggtttgcttgggaactcttattatggaccttggttgtgtggtcgtattttaaatgcgattctttatgcccatgaaaaagagggggcgggagtgagatcatcttattttatgaataattttcacaatgctctgacgagtgtaattttagatttgggtttttctattccaaagtttacatggtgtaaccgtgtaaccatgacaaagatgcttcctttacctaattgagacttaatcgtatgcttgctagtaatgagtggatggatatttttcttagtttttttgtttctcatttgaattatgggggctctgatcatcgacctcttcatgtcaagtttgaccgtgagatatgtggttcgatccctagactgattactgaatgtagtgacattgtgtgccactcttggaatgcgtgccactcttgcactactataatatctataatatgggcctttagctatttccctttttcaacccattttataaaaagcgaagctaaagagtgtgaaaatactcgcctgattcgaaattgacatttagaggcagtttttttagtaaaaactgtagatatagatattaataaaccttatgtcgtcggttgggggttggaaaattttgaggccttttaataaaccctatatgccgtcggttgctatgaaataaccgatggcataggtgcaccctttattgacacgttcgtgtgcatctatgccgtcggttatttcataggaaccaacgacatagggtttataaaaataacctggccccgtcttcttctttcccacttcttcttccccacgataaccagcagccatcacaccccatgaaaatccacgaaaccctcgcccaccaccactaaaaaccccctatctctctcatttcttcaccatttcatcccatttt

SEQ ID NO: 381320 - DNA, 1150 bp, Cannabis indica
atgatgtcaaacatgcacttagtaactttgcttgtaattattagtattatgtttcttatgagttctaatcgacattagtacttaaatttatagtattgcgattttttttttattataaagtcataatattgagattttaattcattgagtaatactcaattggtaacaatattgatatattgatacagattacataaatgatacaacttatagattagttaagcatatatagcttaaagctacacacaataatcttttttcgaggaaaagaactcttcatttcttctgtaactatattatggtgcaatttcaatatgataagtattttctggtattatgttagtaaatactacgcaacacaagccttgtttgtgcaaatattttctagtattaaaaatttgtacatatgatttatatctacaaaccaaaatttaatcttaaaggttcataaaactcatgttgactaattcatattttttattaaagtaaaatttcaaattcaaaataaaactcacaattaatgactacaacacgaaatttaaaatctaaaataaaattttagctagatgatatgtatgtgtttgttgttatacactaaataaatattgacttatagattacatatttacatatatcatttataaaacaagtgtcaagtggtatcataaaatgtaccttaggtacatatattatatatatttattatgtacttgtttaataatattgatcaataatcaatattatattatgatcgatcaattagtttactaatttaaaaagtttgtatggcttggatcgatagtcattatctatggttaatttttttttttataactaagtacttgaataaatactaaatttgataaattaaaattagattatggagaatttacatatttatttgtgtttatatgattatatatataaattaaaatctaattattataatttatatttgaattggagatatgaagaaatattatccaatagttcagaatttatcacatcaaactaaaccagaggttgatagaagttctaattcaataaatatggcaaatcttccaactgattctggatttcgagctctgaattctgattatactcccaatattcaagatgcaattcaaagacattatttacaacaagggcc

SEQ ID NO: 381321 - DNA, 1379 bp, Cannabis indica
aagtgttttgaacttgtaattttctctcactttcctcggtctgagaatagatttgttgatgctctggcgggttgggcgagatgtgccaacgcctacatcaagggtcgcctaagggatgtagccccctttgtggttactactttgttttagtttcggttcgcaataaaagtttcttaattaccaaaaaaaaaaaagaataagatgtttattgtgctcatttaattagatcatttatttagtctaatataaaatgtcaattcaaataaatcggcttaatttataagcccacacattagattattaaaaataacctaacaaatctttgtagagttttttcataaatgaacttctttttgctgtaaaaaattttctctaaattatacaaatagttgcacatatcttttaaaaataatttgattatgtgacgatgcatgtgttacaggtgtaggtgcaggtgtaggtgcagtacgagagtctagctatttaataacttgaaactacttgaaattgagaataaacatacaaacattaactctaaaaatacatatacatattcttataatttataggtttgtaaaaatattaattctaagaatgcaagtatttataggtgcagtacgagggtcagattaacgtcacgttaatactacattaacaaattatttacagaattaagtagaatgtaaccggaagaggttatttgtaatgacttttatagttcaaagaaaatttttgcaatagaaaaaccttttgaaaccctacaagaatcatagtttagagtggacaaataatcctttttattcttattattatatggtggctctccccctcctctactttatagtgagttgaaaaacaattggagtttatttggaaaaggatggacaaagtctgtatttgcaaattgtttaaagtgtgcttgttcatgatatgtctttgtttttgcattatcttcatattgtattgtcatagtctatagaagaaaaagaaaaagaccaaaacagttggaggtcaaaaatgtaatggactctctataaagtccaaaatttcttatttttaatctttatataagattgtaaggtccaaaacttgaaagaatatcaataatggtggtgtattatttcatcataaaatggattgatgataaagcctagtaagataatacctggttctcttcataaaaagaaaaaaaaaaaagaaagttaataccctgcttcacacaatttaattaagatttttgtcccttaaactttgacatgtaccaaatcatactccctgaatttttaaggtcgttaaaaatgccccctgaactgtagagattgttggatttaaggactttttttcaattttagtaaaaaagtctaacatagataaaaatt

SEQ ID NO: 381322 - DNA, 5486 bp, Cannabis indica
tttctttcgtttttgtattgtatcggattgaatttcaatgaagggctcaatgatagccttttttaatcatcttggtaatttgatttgatttattaaaagaatttgtgtatgcatttctttgcagccaatggccaacatttccacagatattcatcaagggagagttcataggtggttcagatattattctcaatttgcaccaggttagttggttaccatagattatttatctctttttcgtatttgaaatcgaaaacatcatgaattctctgatactatggtgaatgaatttcgccgcagactggtgaactgaaggaaaagcttaaagatgtcacgaccaatcaggaaaagtctcaatgaattgttggattcggaagagaagagactcagcagcaacatcgatttttggccttaacatgtttctaaaagtttgagggggcgataaatttgatttgttctcatttatactctgtagagctgcatatcgaatttttgtttgtttgttttattgagcatgaacacgaacatgaattgtacccaaagaagtgtcaacaacgctagctcggacctcagtagcgggcgagggaataatggatgaggtaaggtagaagtctctggtttggaactagtgagttcttgttatttttcttttacttttttttttgatcataagcaccaaacaaatgtgctatttataataaaaagaaaaaaaatgtaaatgaacatgtttcttggcttattatgaggacttttgtgatctaaaattctaaatagtattagatacaataataatatatgaaaagtttccaaatcttgatatcaaaattgatttggtttaaacatgatggcactgtgtttgaaaattgaaatccattcaactccaaatattgtgttttttaaataaaaaaaattcttaaaaaatattgtttggcatcttgtgaaaatcatgatttcctttatttatatttatatttatattttaataataataataataataataataataataataataaatgggacttttttctctaatatattgaaaactattcatacctaaaagctctcttttaaattcgaatattacaaaattataagtgataactacggagtcatcactttaggatagagctttggtaattgaattaatgttaattgaaatttatctaacaaaaatgtacgacttgtgtaaaatatttattttaaaattttataaacatattgttatgcttgaattttactaaaagaatatatacctattattatttctccgtaagggccctcaagctaagaataacacattgaagatataaaagtcaacaaagaaaattttgaccaagaagcgacaagagacaaaaccacatggtagagagcacgaggcatgcgactactaccctaagattgttagtagtcgcacccctagggtagccttggatttgtctccttgacaaatgcgagaaagtgttgctctatagaaaccccaattcgagaagaaattcgacaaggggctcaaatgcttaatttaatgggaatacaagagtataaagacaagatgacatcaccaaatctaagagagtaggtcatacatgactactgacactcactggtgttagtagccacaaattaagaaatactcaagaaaaattaaattaacactttaaccaaaatatcacatgcatgcactaagatttgaactttaaagttaaagttgcacaaaaaaaaaaagaaaaaaaaagaggagaataatgttactagtgccgattgaagggtggggcaacaagggccactacaccaggcctcccaacacaaagaggcccatttttttttaaaaaaaaaaaactgtgaaagctcacatatttgtaggtccaaatttttaataaatgatattggaacttagagttccaagagctccaacccaataaacattaaaaaatagtctaatttaatacttttttttcttattttttaataaatatgtattgttgcctattatttatataattaattaattgtataaagtattttttaggctccatttaaaatttttgccctaggccccctcaaagcttgagacagccctgaatgctacatgagtactgacactccctaaggattagtattcacatataccatacgagtactgacactcaggatgtgtcagtactcacccataaggaaggaagaagggatttgatggctaaatagttctttccaacatcaataattacttacaaaatgagagaaattcctaaagggtatagaaatgtcttacatgagtattgacactttttttgtgacaatactcgtgtatgctagttcaaagaggaatcttgggttgtttgaagcttaaaaccctagaaaatatccactaactttcaaagacttgttaaagacaactcaagatggccaacaattgagacatacacgagtattgacacctacttagtgttagtactcgcccaaagagtatgccacacaaaattttggtggcaattctgtactttggtggtagttctctccaaggaagtatgccacacgagtattgcactcttcaagtgtcagtactcgcccaaatggtcccttacatgattactgacacttctttggtgtcaatgctgataggctagttttaggtgtattttataaagtattttagaggttgttttaattgattatattcattttgtgtagaattacacttattttttttatttattttaatggtaaaattcataatgtgaacatgttaaatgagatgaatatattgaattatcatggaatttagagttcgaggatataagtggtaaaaaattctaagttttggatgctcaacacactccgtttgtgatcgaaaatcaagtctgaagcttcaatctaatttttaactattatgcgttcactttgaggaaacatattgtgaataaaagttctatatctctctttcaactttctaaaatatcttgaatcgtctaattctgagcaatattaaaattgttatggctaaaacattaatcagtcgttgcaccaggaaactcactgccaaaatcgagctttgagcgtcgcaacactacaaggtagtgtaatggcccgcctcttttaaactgtgagaacattaggattttatcctcttttagctatataaaggcccccttttcaacacttttcagtagacgactttagaaaacgaaaattagaagcaagaagcggctccaaagactttcaacatttattttttgaagagttctgtctttttttctatttttttatgttcttaatttttattagatgttttcgaagattatgagtagctagactttttaatagggtattaatggagattgtttgatactttattttagttttaatatgatttaatccttctccaattttctatatatatttattttattcgtatttaattacttttaattatgatttcaatgcaacatttgagaagtgagtgttgataatactatagtgaaatagacatagattttgatataggacaagagtacctatatggtttatgtagcattcagaaattttatgcttaatgcctcatatgtgtttaaatttaaatttatcacgagagtaaaaaattgcatataagttaagatttatatgtcctagtgtgaatataagtttctttagtaaatccgctatcacatgaaaattagaatttgagaattaaattatattaaaccatataaagtagatgcaatcgaaattaatcaccttaagctttaatcattgttaagtttcagttgaatttatttttgtttatttaatattttttaaacttcttttctcaatttttattgtcaccaaatagaattagaaatttaattgtttggtaattaactacagttgtgtgattgacctcactcttgtgagtctgttacttgtaaacgataaatatacttgcatgttagatttatcacaaaaagtgctcacccacaatggttatttctaagagagaaaccccttttgtacattcttgacttatctcttgaagatgaagcttctagaagacttctaaaacttagctacctccgaaaatagagaagatatttactttttatgtaattatttattattattaaatgtaaaagggcacaataaatgtatcattctcttgaattgtgggggaacgaataacaaagagcattgctattaggcaccagtggtgtctagcaccttttcgacatgtcgcgttacgattggttagcgatactccttaaaagctattatattaaattatatgggacccgatacttagttggaccaatagcgatattaacgcatagaagggtgcaaggaaccactggtgccttttagcatttctcaattacaaaccctacgtgtatatacacataatttttagatttagagaaagggctgggattgcctcagccttatacattctctgacggctaaatcatcaccttaagttcataacctgaaatacgtggtccttaatcacttaagacctggcgactctctcttcctctcatataagcattcctagaaatactcttaggtgacgtttaattgggagaaataaaaatataggaatatgaataagaatgagaattagaataggaatggaatagaataaaatttaaaatgcataaaaaaataataaaaaaaattatgaaattttttcaaatcttacattaattggaatggttttttttttctattttaaaatgaaacagtcgttctaccaaaatgatggaaagacgattccctcggaatgatattccaatggttttaaatgcaaccaaacaaaagaatgaaatgaaaattgttccattccattccattccattacctccaaccaaacgccatcttaatcctttatcaccaaaagggaccttgacctttaatctactctctcatcatcatccaaaagagcaatcttttcaccttgaagtcatacatattttgtgacagtcacagagagaagtgcttcctcatattatcctagaaattcttgtcctgctaaacaaagtgtttgtcgatgatttttcacaaagacattaaagagatctccattaaagatctcgctcattgtaatccctcaaacacactcttgaaaatataacattaatgtgtttgagcattaatcaataaaacaacaagtaaaatattctatcactgccacatcaagggggtgaactactataaaaatcacgtgtctaatattatttcttatttaaattggtttgtttgtgacaatcaaatagtctaagtttaatcgttatttattcacaatatttttagattagttgacaaaaaaccgcatcaatacatataagttaacaatatatattttttaatttttgatttttgaaaaaaaataaaaatgtatttgataaacttttatatttaagttagggatgagaaaaaatgagaattattggatagactatatttttgttttcaaaattttggttcttatttaaaaaaaaatacaaaaa

SEQ ID NO: 381323 - DNA, 8740 bp, Cannabis indica
gatctcctctcctcttgtttccttgccatcagctgcataagaaggtatcacttagctttgggcttgaagttttatctttacctttgaattcgctctcagtttttttttcttctttccattttcactctgaattatatgtatatgtcacggtcgggggctgaattgagatcttgctttgtgctttgaaagcggcggtggataaatagatttcttagggtttttcctttctttccttttccctgattctagattggtggtgtttgtgatctcactgaaggactgtttgatttgtgtaatgaaaatatcacctgatttttgctgactaaaggaccactgatttcgcctgggttgtacccacgaagcagggtgcaggtgttacggttactattgctgatctcaaacaatcaaaatagttatgtgtacaatttgagactttatgaaatctgtaaatattgccatgatgaactactgataaaaatgttttaaacacccgataaaatattggaaacggaccaccgatttaatagtttcgttttggcacatcgcaataagtcatattcatagcatagggtttggttgatgatagttcttaaggataggtgagaaaaagaataacatacacattaaatagtggactcattactcatatataatattctgtttaagttgtttatatatgaatcttagctgtagtcttcatttgttgtagtttttttagttggtgttgtagaaaagcttcgctgtgcacgattatcataattgtgaggattgtgttagtcggcatcccataaacaacagatgtatattttagttaaagtgtttggggttttcggatcatatttagcttaaatcaagtatactgtctctttatcttgtatgacaaaataatatcattttatattgatacttcggttttcttaacattccttacattttgaacttgaaacttgatagcagcggaagaacgagtcaacttgttatctgttttagtttagaattgttgttgaactatttaccgtgcgttgcagattttataatttcatataattatgttagtttcgagcttgtgtcatagatatgatatgtttaatcatgttaatctcatgtgtggggtcactgtttattatacatgttaagcatgttgtgtgactgtattcatgttttaggtttttgattcactgaataattgtgtcgtgcttgtgtctactttaatcatactgtgtcataaatattttgacacaaggtccacatgtttaagatgaattgccaaaacctagattcaatccatatttggtcatggtggtctacatttgtgcatgttgctttattgatttggcttttatcatgctgtttcttcttcttaaactcggaattcctgtgatttggggttttccgttttggctcatatgattagtcttccctgatgttttttggttttaatgttatgattgactgacttcttttgccttctgttttgatgttgtcgagtttcagttttggcttgaggttagtattaagatctgattagcaatgggtggttagggtttaggaattttatcttctttaattgattaattttcatttctgtaaggtgtaaaaaaaattcaaattatcttcttcagtttttgtcctggatttggggtttgggactcagcaatatgttatattttggctaaaggtcaacttgatatccatggtatttatgctaaaagccaaggcaaacagattttatatttattttgtctagcttttgtttctctgtgtttgaaaccccttggaagagggcttgtaatagcattttatttttcatacattggtaatatttttaaatggaaggtacactttgttaagatacattgatttcaatatgtcagggtgcataagaatatatacgcttcattgacattacactcttgcatatcaaaatgagattaggctttatcagttcaatatctaaatagcttggaagcttgcttgtgtcaaacagttattttctagacagcccacacttgactctttgcccatggacaaaggagtgccacctagcctatttgttaatgatggttcattcatggaaaggtttaaacaactgcaacaggacaaggacaaaaaggcttttgtttcaggggatcctaaaccaattaaaattgtatcagctagtttgactcctaatgcttctattagtaaaaccagtggttctgattctcgcaagagtacacaatctgtttcaagtggtaaacttgctttcagtttgaagcagaagtcaaagcttgcttctcctccagttaagttagatgaggatgaagatgaagcagatgatgattcaggtgatgtgccaacaaaaaggcaaaagttaggccagccagaggagtatgagaaaccatcagggcaattggatgttggtaataattgctattcatttatttcaatttatgtggatcttctttgcttttgctaatattctgttgcacattcaagtttccatgatgcattgaatctgcactgttctataatctttaaaacttttatatttaaacacacatattttttttttaaaaaaattattataaaatcttgattgcctttttgttggaattctattagtaaaaaaaatatcaaaccaaatagtttgtggtttgtggcttttgtcttggattcaggagtgagtcagaagagatggtgaataagttctccagtcacttaggaagttagattatttattgaaaaacgtgtttgaaaaaaaaaaaaaatcaattctattttgatgccttttcatgtgctttggttgtcatgtcttctcttcactaaaattgtctagaattctgtagttctgtacatatggggacttctttcaaaaaaagaaaagaaggaaaaaaaatccatcttgggacttttatgcaaaattgtttttcttttttccaatgtattatttagcaaattaagagcagtacccttctgtatgtacaccatacatggtcatcaagaaattcagacacataccacgtctctattcttgaagtggtgtgcatgaagagggcaagacgttcttgaatatttcttatctcatgaatgcagcttatacattagttcctatcaacatggtggaaagagatgttcatgaaagaattggaatatgtggcacgcctgctacaagagtaatttgcattaccttctcatgcacttggtattaatcagttttataagtgatatgcagcgccaccactcccaagtgatcctacagtgaagaaagttgctgacaaattagcaagttttgtggccaaaaatggaaggcaatttgagcatattgctcgtcaaaagaatcccggagataccccttttaagtaagtactagaattgttgaacttttaggcattacattttggtttgtcctttctttgtctccaatattgttattttgttaggcatctcaagcatgcattctaactcaatgacatggatttttcatgattttatagtcttgtgaagtttatcttctgggattattttcttatgtaagactaaatttttatgctctttgtggttatttttattgttattaggtttctattcgatgagaactgtgcagattacaaatactatgaatgtcagcttgcggaagaagaaaaagctcttgcaaagaccaaggaatcacaaacatctcaaagtggttggtcctttaatataactattttttcttgattttatacggaaattttatttttgatccttacacttaaagtagaatctgtagaattttatcacctgtggtatattgtaattataatgaaggcatctattgctactctggttttgaaagtataaaactggactttgtggtggttgaaatacaattctagataaggattgacttttaaaatttgcttttagtgggcacataaatgtatattgtatttggatcaaatcaacctttctaaattttatgatgagatatctaggaggtgctgtgtttttatttatttatttatttttgaaaaagagacaaaggtcgattaaggattgacccctcccaaatttattagggagtctcacttatgacggaggaaaaccgtggtaacaaaaataaaattaaagcataaatttgtgttatttatttatttatttatttttgaaaaagagacaaaggtcaattaaggattgacccctcccaaattcattagggagcctcaccagaggaaaaccgtggtaacgaaaataaaattaaagcataaagctggataaaaactagagcaaaacacaataaatgtctaatctaggagggaaatggcctagaatagtttacaactccactctcttagaaggtcttgaaacgacaagttatcaaaagcttttgttctataaacccatgttgcaacccagaatttaatcttatcacaagtcttctctcttattttctttattttcaaaaattctgccattcctttctaaccaaacagcccagaaaatagctaatactgttgctgttcaaagtctagaagtctgcttccctcctttgatcttgcaagacagaagctgctcacacctttgtggcatgcaccaaaatataccaaattctctcagcaatctacttcatagacaatggctgaatgggcactcaagaaataaacgtgaaagagattcctcattactcttgcaacaaacataccaacatgtagaaagagcccgatatggccttctcttttgcaatacctcgtgaacattcacctttttcattgctagcagccaactaaacaccttgactctagacggagccagctattccacaccatcaccatcttagcccatctttccttagttatagaatgattagaaactaagttatgaaaggcactcttacaagagaaaatgccgctagaacctagagaccaaactatcgaatcctccaacaaaccgttaattggtttctgctcaagaaattgcagcaattccttctaaaatgaaaatgacatccagagttaggagctgtcaaaactccctcccaaccaccaactcctttatgcttttgttcctcccatttgtaattcgtactagatcaggagataaactcaagaagggttcatttcccacacaaacatcctcccaaaatctgattcgttcatcgtttccaaccttgagccgaaccaaagtaaaaaatacatcatatatgcagcaatactcttccacgaccctctgtacgacaaagagtctcccatattcgaatcctataagttacgagctttcccatatctacttttgatcattttgtgccatagagtcttatcttccaccagaaacccttacaaccacttcattaggaaagccctaaatgtcgactccaactgaccaatacccaaccctccttggagaaaaggcatgcatactgtttcccaggccaccagatggtcaccccttgccaaatcacttccttcccaaaagaagtccctcatcatcttttctagagagtttatgacacttttaggtgctctaagcaatgaaaggaaatgtgttggtagcaatgataggacagattgaataagagtcaatttgcaccatcgagacaactacacactcttccacccatctagcctgcttgcaagtaatcaataagattttcaactagagatttttctctttgcttgttgcttttcaaatctttccatagtcttcgcatggtgtcatatttggcccaaagaaacttctttaaggtaggatcataaactacatcgatctattcttggtgttcattgagtttattgatgatggaatcaatagggatctcattttttagtaggacttcttttttcttgtgctttctgtttgcctagccttcaacaagtatttcggcacttgaaaattctccccttgtgtaacaaattttgctaacacgggctcccaaaaagcttgtttcttaggatttcctcccagaggtaaccccaagtatttcaaaagccactgtcccacctcatatcccaccatattagccaaagattcaactacctctcttccatgttcaagcccaaaatttgacttttatgcatattaattttcattccagataaagcacaaaaagtctttagaatatccagcaacttgtgaacggaatcatcattttttatgaaaaatatcgtatcatcagcaaattgcataggacttaccgacactttctccttaccaatgagaaattcattataaagagaagactcaatggccctatctaccatcctcccaagtacatccaccacaataatgaacgagaatggagagggatctctctgtctgagggggccagccccaatgatcttccctcttggtctcccatttataaaaatagaataagaagcagaagataaacatccccttatccatttcctccatttttggccaaaccctttccatgataatgccaagtctaagaagtcccactcaacatactcataagctttctcgaagtctatcttgaaaactaacccaccttttcccttgcttctatattcctccactgccccaatagccaccagtaccgaatgtataatctgtctatttcccacaaaagcagcctgagtttctgaaatagtatcagccaataccccctgaagtctaaggggcaaaaccttggagatgctgtgttatgactaatctaaaacaaacagctttttatgatttgtacaatacatttctgtgacttccctgttgctgcacatgtcattggcctaattgattttgatgcatagagtttgtataaggtatattgttatgcaagaaataagtttgattgatgagagtattttgctttgggtgtgtagcagttgtaaacttgtattagatctagttgtcaagttcgatgaaagaggtttgtcttgtattctttctgttggcatatatagagtgtgggatgtttgcctaaaagatgaaatgcaagtaaattttgggtgtgtagcagttgtaaattgtctgttgacttttgttagttttctttctgactgattccaagctgtacatacaggtggtacaagcacttcatcatctaaatcctcgaatggtagtcaaagatcttttcagcagcattcaaattatcaaacccctgcctctgctttatatgatgcttctgagagttcaagtgctttctcaacatcatctgcaggaaaagcgggtaaaaaatcgtcattagttttttctctgtttgaaattaaaagaaatttaagatctatattcttattaaaagtacttctgcatgcacatgtaatatttaggtgactacagtgcaccaacgggggcagatcctattgcaatgatggaatattatgtgaagaaggctgcacacgaagaaaggaagagacagcctaaacagtcaaaagatgagatgcccccacctccctctcttcaaggttcctgctaaattctgattgaaaccattgtttcttttatttgggaggtttcaggttgataatttggccttcttgaatataatttctggtttcttttttcagctgggtctattaagaaaggtcatcacatgggtgattacattccattagaggagcttgagaagtttatggcttcctgcaatgatgtagctgcccagaaggctgccaaagagaatgcagaaaaagccagaatacaggctgataatgtgggtcacaaactcttgtccaaaatggggtggaaagaaggttctctctctcttcacacatgaagttcaaaaaagaatttatttgtctgctgaaatcaattcttgattaaagaatatacctaaatctacattttgatgattcagattagtgtatgccgtagctgtgttttcactaatgcagtgtagcaattatttgtaatgattacaggtgagggtctaggcagctccagaagtggtattgcgactccaattatggccggtgatgtgaagaccaacaatttgggggttggtgctcaaaatcctggggaggtaactcctgaggatgacatatatgaacagtacaagaagcggatgatgcttggttatcgttaccgcccaaatcctctggtaagcacttgttccttccatccttcattcattacacaatacatttgattattttttaaacatgaactgctcatgctgatgcttatttttgattgatatattcttccagggcaatccaagaaaagcatattactgactcacctgcaagtcatttatttgtttaatgtgctttgcaagaggaaaaatatgttgctgggaaagttgttgttggatttatgtaattcattgtttgtgagtttatgcctatcttcttttggtttgaatttgcacaattattgtatatttttgggtattccccgtctcaaattggtctctttctccgtgtacgttaatgacattgtctctcaaaataatatgctctcagagctttctggcttccactaatctattaatctaaaatctcaccttttctacaatttatatatttttttcggaattttcaaagaaaaacttttaccctccttgaattattatttatataaaaaatttctctagagctatagaaacaattacaaattgcatttcgttcatatattgagatagtgtattgacgtataaaccatgcctaaaattataggagtctatttaactaattttaagctagttggaactaatatatgaatgtgagggaccttaggggtgtttataaaataattaattcaaattaatttgtatgattcaatctaatacaatctgcaaagtgcgaatatctatacttgtgcagat

SEQ ID NO: 381324 - DNA, 3764 bp, Cannabis indica
cgaaccacgttcataagagaaaaactatcctgcctagaagacggaagatctatcaagacaaatctaaatactcatggggtaatttagaacagacaattgaagagacaaatatttggaagtatttggaagccatcttaagtggcactttccagacacggagtcccatcatgaactagggctcattaacatctcagccacgtaaaaatttttgttcttcttctttaagcttatttattttataactagttttcaaaaatttcagtttatattttggtactttcattgagagcttgaagaaagttttaccatagttgtcatctacaacaatggttgcaacttgaaaagcagtggtcaaaccacctgctcgagacggtagagataatgccaccaacgacaacgagaactagctcccttcaaaaatgcttaggtgggtgtcatgggggacggggaagcgtcggaggtgggcagctggccgccccgagaggatcagcatcgccaggaacccgtcaatgataatgccattggcgaagatgagtagcaaggtcaagaggatgatcacctgagaatgaccacaacaaaaatcagaacaagaattctgaagaagagtactacgagcaagaccgtaaagtagtacaactacagaaagatcttgtagataccccaaaaaagttagtggatcaagaagatgtttcgagataaatgtcggaagttcttgcacggttacaagcccaggctaattttcctgaagaaaaccctcctgctaataagtttaaccattcttgggtttggtcgtctgctccagcaaatgacaaaggaaaggttataatgggtgaccttccgagaaaattcacagataatgttccacggaacaataaaagaaaagccaaccgaccccaacgaaaagaaacagacgctgaagccctagggctaagccaatcgattaatctacggggcaaagtcgtgcagactgatgggccacatactcaggtactgagggctaacattcggggatggaaaaacccccaagacaatttttttaaataaagcattcatgtggaggacctagacccacatgatagcatgtaaacagaagacctcagagaccgtttaaatatgatgcgtgaaaaagaaaagggtgagaaagcaaagcctcgaggagctgatttgagaaataacatcaatgatagaatccgtggacatgagctctcaaatgatcaaaccagatggctaaagaatcaaatagaccgctctaataaaactcatggaccgattggcccaaaaacaaagtggattcgtatctgattcaaaaaatatggagccatgtgtgaaaagaatcattgaggcacatctgcctaaaaaatttcggatgccataaatggattcgtatgaaggtaggatggatcccagggctgacctttccaagtacaactagctaatgcaagtggaacaagtaagtgataataaaaagtgtctgtggttctctttgactttgtcaaaattcgcagaagtctggaggtaaaatatttttagtccggctctatccaaaactagaaggatttgaaatccatgttccgaaagcaatttgtagctgctaaggactttgaaatagaggtcaacatcaagtagcaatatggggagagcctcaaggcctatattcaactcatggaccaacatcaagaactttggagaccttcttgtgcactaggatccctttcaaactttctctccatagcatgaaaactcccctgtccaataaaatttctccaattcaaatcttgcaattgatgacagtaattgtttcttcaagaattacagcggaaagaatcttgattctgctttcttgatcaaaaaccaataccaatctctgatttgtggaaaaattacaactaatgcataatcaaatcaactaatgtccaaaatgatatgaattaatcttccattcaagataaaaatttcatacccgctcaataatgctcaaggtcagcaaaccaatactttctccataaaccttggaataaataatgtaactttaaccatatagcacattcttcatagtgataagttgttggaatgcatattcatataaaacatgaattatgaataatgagcaaaaagatttccacaaattatgaataggagaaaataaccatatatgaaacatatcaaaaacaagtttcagtctcaacaaaaaaaaaaagctcaccgatcgatgtggtgagtaattaaacctatttagcaatagtgaataaagtttgtaagaaagtaagaatgagtagtatagctccaaccaagaccgaaataagtgcccacgggtgtttaaagtaatcacgcataaggactctacgatatctgggccaactacgttgacaatatgtattgacctccttcacaagatcaagataatagaaatgccccacacaaacactgttaaaaatatggttaaagattatggttgcatcgtgcatatctatcaagttctcaaatatgtcactccttgcaagtgtttccatatcttgggcagtattaacgaggtggtccaaaaatgccacgtaagaacagatcaattcctcacaattaggaagacactgctccaagcatattagatttcgaaacagaggctctgtgtcatcgtcaatatatagtgaaggaatttcaaggacgccatctttgaattgaatatccaaaatactagagaacgtaccactcgtagcctttttgaactgaattccagcctcctccaaacttgtagctgatggtatggactgccaatttcgaatcgtacaattcataattctctcttgttttgcaataatagaaggcaatatcaatgagttccttagtagatcaagaatatgcttgttttcccatttatgatcctcaacctcttgatattttcccgcttctctagagattaagttacctaagtaactagtgctgagtttaatgagagaaagttttacacctgaagttgtcctggtcttctgaaacaaacaatcaagcacgaaccaaggaatttgattttccaacaaaaacaagtcacggtttagtgtggacatgctattcacaccgaagatgggatcctgtttctctataagtttcttattgatgtttttgcaaaacagctcaataataaagcagccgtcaagtaccaaaacttttacaaattcatccatactcataccaatagatccttcatagcaatctctagccttgtattgaaactcgctaacagctgccgtgagttccctcagttttgatttaggatttgtatcagctggaagtcgggacagcagttcgtgcaaataccggaatttgatcttctgggtggcttttagatgtggcttcttgtaatggaaggggccaattgaaaatgaatgaggtacataagcgtttggattattcaatgacagtacgtttgggactctaaaaatgcagggattacgtccatctaccattgacacattatcacacatcatattttctagttcagttgccaatttatcaacatcagccctcctaattttatcttctcctccaactttcttctttttcgccattttagttccaattatcttctcctcatcaaacttgcttttctcttctctgttcctaaaagtgcaaatgaagttaaagaaagtaataaaaccacctaagctaaagtttgttgtgtttaatttggtgcagttaaaccagattcgaatgaataaagagaactcaactttttgtttttattctaaatttctgatgaaatataaattcatatg

SEQ ID NO: 381325 - DNA, 2779 bp, Cannabis indica
aaggtttgtgattcacttgcagctagaatatactttctttttttccttaaagttctcttgaactcttctttttgttattctcttcttttagttattagttcggcaagctccgtaatattttttgctatgcttaataaatgagaactttatgaagatgatcgtgggctgtagtctttcttcagtttaaagttacttctactattctttgcagcacttaatagatgtgctttcttttctctgataagggattgataggatatttgggagaggttggaagagttccagtagacactttttatgcaacatgttttcagtaactctttttcttgcaggaactggagaaaagtcttaaggccacttgtgaggaattcataatgtctgtcactaagctagttgtagaccctatgctttcatttgtcaccaaggtttgtccttctctttcatcatatggctttcttaacttgggtacaaaattttcacaaccagcagaatgaaagaccaattatttgcaatttaaaaaaaatatacaaattgaatagaacatacatgtttttagaactctgcttataccacctaggttttaaaagcaagacgtgtgagaatagaataatggaatctcttttcttcctttcttatttgacagtatatatctgaaattattcttttgccacaggattgtttgttttccaaattttgtagctaccggcacctgcaattgaatagtttcaattgggtctaaaatattttccatatgttttgtaggttacagctgttaaagttgctttgtcatcaggcagccagaaccaaaaagagtcatctatggccaaaccactaaaggatcaggctttcgctactccagataaagtggctgaacttgttcagaaggtatggcatgctagtttctttcttctgttcaccaaataagagatagtttagactttagaacatacaaacaacggaaaaattaccaaccatgaatgggcatctcaaggtaacagtaatcatcaacagaaatccaagcataatattgacggaggtctaagattcaaagtaaaaattgccgttaaattttttgcaagtgtcgatcctttttctgtgaggtgccattgccaacttttaatatctgtcaactttaacactatgtatagttcgaatggtacggtcaaataaatatttcatatcgatacaagttaattaacatttcttctctatttggattagaataaaatacattctcactttctccactttctgaaagtagttatgaaaagtcgccctaattgcaaggctgagcttccttttcttagatgtttcttgtcctaattgacattattaaggtcctactgagcctgattttgtgtgaacacatacatttctggaacaggtaagcactgccattcagcaggagttgcctaatgtgatgggaaagatgaaactttatctgcagaatccatctacccgaactatactttttaaaccaataaagtaagtctttcatgcaatgctctacagtctaatagttttacttataacacaatgaatagactcaatagagtgattcagccaactatatatcagcttgattttatttttttaatttttttcggtgcaggacaaacattgttgaagcacatatccaagtacaatccttgctgaagactgagtattcaccggaagagatacaaagcaccattaagatgcctgccatacaagatttagaagcacaacttgacagttttctgtagactggctttggaagtccctattgatgattgagttgtgattcatacactaatcatgtttatgatctcttaccacacagggagccaaggcttaatagtttatggaaagagtcaccaaaatatgtgatacctgaacttttgcatggaacgtgtaatttttcttttaattctttttcgacgagttatataagtatcaattttgatttatcaatgatggataattttgcttctcatatttcatgatagttctacggaatacctcaatttatatatgtagcttttagtaaagatttgtattatgactcgatgacctgtgtctgcaacaagatataaagtgtttacaattgttttttctgttttttttaccggaggactaataacatcttaaattttttgcttaattacttcattaacttttattaagagatttcgaaggcaagtaactcatctaaagcatattttggtaaaaaaaaaacattaaactacaatgggataaataaatgataatatttgttccaaaaccaaataaaaaaacattacacagtacacacaagtaaatcaatgataactaaacttttcaagtagttgggttataaagcaaaaggagcgtcaagtttcgtaagtccttttccaatgaatatttcagaggacaaaagtgattttatacaagaatcaataagttcctacttttcaaataaacattactattaggcaccttatcttaaagtgcctaacaccagatgtaaccccttttgaatggtcagcgatttctcatattgtttgttaaatcaaaatatataaaacataaattgcaccaataataatatgtcaactcttgtaatgcttaggaccttaaagtgtcccttagggaacgtcacattatcagtcccagaaaatataacagaaaaacaatgaagttaaggaccaaaaccataaataataatctcatcttcaaaagttgcgagaccccatttgtccttaagccgacactggaggtgattctgttgggttttatgccctaaatataactcatttca

SEQ ID NO: 381326 - DNA, 2223 bp, Cannabis indica
tatatatatatcacttaatagactatcatgttttgcattgggaccttataacttcaaagccaagccagctttggctgtttagcattttgttttttgttcacacaacttacacagtccagagttatatgaaaagctttggtgctccaaaatgtaactagttaaaaaaagtttcatgataaaaaaaaggaacatatataacacaggattaccaggtactaacttatatccatcctcattgcattatcaattattgtcattgtagacttgtcattatgaaactagtcaattaacttggaaagattgtaacattgtatcccatgagataagttttcaaatccagagaaaaccattgatgttttagattacttgccctgtcgtttgttcagcgatctctttcctctttataactgagataatacataaatgctatctaatagcgatgctcaaaataataatatcttgcctcacagtgacattactgtattatctcctttttctgcttatacatttgtacaaaagtcaataaaaagtaaaaacgataaattttccttaaaaggttctattacaataaaagcattttagattggaactttttttctttaggtgaggattttttattggaactttgaaatcatcgaatttgctaaaacaggatatcatgggactgatcctattggctttctcaacattagaaagaaaggatatcatgcacaaatacagttgttcattccaaaaaagtttaccttgtatttgatttgatagcaagtgctgttgttaattattaaatatattgatatctaaatgtgttgctcagctaattttttgttgatgaaaataataataatggataatgtgttgctcagctattttaattatatacattcctgacctgaccatttattaaatttgtaagtttgaacaccccgaagttcgaactgattgtccactttttcttttttaagagatcattaccattgatttttattttacttttttaagaaatattgtattatactttcatatggttgatttgtgtgagtattcctgaacttccgttcttgtttaatattcagtaaagttgtgaacttgtgatacttggttcatcagttcctctcaaaatcttcctgttgggaggttcaatttagcagatcatcaagtgagttctgttataaaaatctctctcgaaacaaaccttcaagtgtgtatggttattaataagtaaatttgattccatttggacaaggttttatggacttggctcaaccatgtaaagcaccactaagatttcattacatccttctactatgaaagataattatgttataacttcattgaatttataaaatatatacatctaaatttcaaacattacatacaacaaaacaagaaaacaaggcatgaatagcccaattctcaatatctctaactcctccaagtaggttgttctaagttagaaatgttaaaattaacctcaaaaaaagaagaaaaaattggtcaaccccataaagctttgtcctagactgaatatctcattaaaaagggctgacctttctgtgcgatgggaagctccacggcctcatcatcctcgtgaattttaaactcaactttttgttattattattacaattatcatcatccatggtttcggttctagggttcagtcctccatccccgatttgatgattcaaattacacgaggatctgtgatcatatcgatagaatcaatcagaaataagaaaaacaaaatccaacaaataatataaatatatatagataaaaaataaacgaaccttggtcggagccttttctccaatcgttggcgagcagacatagcagttgggctcaattgcatggaagtgtgacggtgatctccgtcataaggagtatgaggggggtggctgtggctgtggctgtggctgtggtggtggtgatttggtctcctccggtgagggactcctactccaggtatcatgccagacatttcggttttcttcttcttcgtatgtgaatcaagtcgttttgctttgggtatataacagagaagaaaagatgaggaaatttctcagccatttctcatattctactaagcttttcctcttcatctttctttcctttttcattatttttttaatttcttcaccttcttggtaacttcgccatttttgtactcataccaaacttttgaccaaaataagtggaccttcttattttatttttattatt

SEQ ID NO: 381327 - DNA, 2243 bp, Cannabis indica
tgaatatataaaaaaaaaaagtttcaagttttaacaatacaataattagtgggcataggttgggccttcacatattggacctaaataaatataaaaattagtatttttataatatgcggtgcggtttgaaccgcatattaacaattcaaaaccgcaaaccgcaccgcaccgcgcggtttaggaaaaatttaaatcgcgaccgcaccgtaaagaatttcaaactgcatttttttgcggtgtggcgtggtgcaagcggtttgagcgatttgatgaacgaccctaacatattctgatactgttatattttcaaattctgtaccaatcacagatttaaaatttaaaaaatttaaaaacagtttacaaatgctgaaccaatcatattttcataaacatattttcagtcacaattttcatattttcatttcagaatcacaatttttaaaaatacagttttcaaatactaccaatcaccccctaagtttctgctctacagtgtggtgattgttaaaataaaaaattagcctcctttgcttaaaaaaaggtaaacacaactctaaaataaaaattatatttggaacatttcttaatttatttgtcgcactaattataaaaaaaaaaaatacgaaatgacaaaatattattattattattattattttgtgaagaaattcttacaaattgagttgtgctagcattttcgacaataacaaggcgcttatagaatgttattttgttatttttttttagaaaaataatctcattaaaacctaccttaagagtaagtccagtagaaaaactctaaagatggaaaagagtgtgaggaaatgtcattaatttataaaattctttttgcaaataagcagggtaactatgccaccaacatagaaagggttaactttgccgacgagtgagcaacactgttgacaaccctagcacaatacaagaaagagagtagaaaaattgtaacagaaagcaagtatatctccaacaatacaatctaggtaagatgatgaatagacttaataacaccattagaatctgattccataaccacaaaattgtaccaaggcgaaccgctagcttcattcttgaaaaaatactcaaagcttcaacgacgacatgaggaaagcaaccagaccaagtccatgataatttagcattgttgaaatgattctcaagaaagccaaccaccaaataaacaaaagactattaattctaccttctcattaaccagcttttcaaacatagtagtaataggcatgcatgtaatccaaaaagaagattatggatactcacctggcaaaccatatcacaacttcagagacagacaacttcatagagcatggtaggatgacttaggacccaaaaagcagtatgaatactatatgatatcactttcctttatttttattttgtttcataaatactatattttaggcttagacattcagaaattaagaaatattaaaatatatcacagtaattttaaatatatatatatttacaatttaatttctttcgtaataaacatgtattaatcatttttttaattattctataaattctaatctaaaaataaaattgatttataattatataaaattagacatttaatttagttaatactcgaaatgagatcatataagtttatttgcttttaaaccgttaagtctgtcttagtagtgttgttagtaaaattattggcgcgtttattcttgagtatcattctcaagaagataactactctggcttttggacttgaacaatcaaaggaagaggttgaattccaatctagtaggtatgtcgtgatacatttatttcaagttatattcttcccaagagattttctttatttcttgtaatttttagttattgaagattctccctatccatttacagttttttcttgattaagatttactactctgacttttggacttgaacaatcaaacggaagaggttgaattccaatctagtaggtatgtcgtgatacacttatttcaagttacattctattgtgttttcacacattagcaatgtgggactctcttacatcccctcaagatggtagctattttatattctcaccaccttggacaacttgattataagcggctcttttttagctcactatcactgatcacaagtggttcttttgccctactttttgaatcggtatttttggatttttagtggcttctcttttttttttcgctcactatccccgaatcacaagtgacatt

SEQ ID NO: 381328 - DNA, 1654 bp, Cannabis indica
gttaacaaacctctacattcttgtaaaaacaaaatctatagaggctaatttgctaaagaacaaaatttagagatcaacttgtcaatacttatatattatataagaaattaattttcctaaaaaaaattaaaaatcaacttattaaaatctatataattcatggatattagtgatagaaataaacatttttttaaataaaaatttatctataaaacaaatatttattattccttttctttaacctcataatgtccattaaaaaaaaactcataatgtgcacacgagggagtccatggaatattgcatcggcatgcaccatgcaatgtaatattaaacctatctccgtttttgtactcatataggaattgtcaatgggaaatttgagttttatgaattttcacacgactcttcatattaaaatacatgatgttactatcttaattttttcatctctcacaactcatcctcttatctctttcattcattatccacaacctcacatagatgaccacaaattttattaaaagtaacatcaccactcaccattctcattttttatgtttaatttttttttcatcaatctttctctcccttttttttctcttaaagtcatgataaatattaactacaacactaatacatgtgttgatcgagattttcggcaacttattaatcttattttaagaaaattaattgtgaatagaggagaggatttttttcatagttcaggtattaattgatcaccttagtccacgagcctcttttattataatattattattacttgagaggatattcgctcttacagttttaaagttttactttctctttggatttttttcgatgtcatagtctcttatatttctcctttatttataagcagagaaatagaatattctcgggtgattggtacatcttccctttacctttaggctctacatagtcttttctgtaggtgtagaaattgatgtttgttatgtgtgcataaggtaaactccaaagtaagaacttagtgagacaagacatgtcttctatgcgactgatgggataacacaaggattaacctttaattagcattcataggaaaatgcattatcacgtcagtatgggctaaatcctaataatattttcttttttagggcaggttcactttgccctttatattgaggcagtcatctacaatgctttatcttgggggcgtgtcggacaccttggtacctctcggacaacatatgatccgagaggtccccattcttttggaggatagacttcaaatttggttctaacatttctttcagaatcgttatgcgctcccagaggctccccgtgtctaatgaatgttactaaaatttaataggttgcattgaattatgtaccctatgtttaggaatatgctcgtgtcaggctagtgggttttgacaagagactttataggttaaggatgccctattccaggtgggatgatagagaaaaatagaggtattttttgtacattggagattatttgggtagatctcggaggtggtcaggtcctcccgttcccatcctcctacaccatttttcgtacatcatctctggttagttccttccatcagatatcaacttagggaatgatgactccaataatttggtttatcaatttgttaaagaggaa

SEQ ID NO: 381329 - DNA, 2228 bp, Cannabis indica
tttttttttttttggttgaaaaatgaatatcattcaaccgtttgaatggataaaaccaaattagttaagccaaatcaaagatgcacaaatcttacaaggagatggttaaactaagattattaaaaattctttattgctcttctaaactcttttccataactctttgaagagaacttaaatttatattttatctatttttctattctactattatctttattcaaaaaagaatttgctatatgcctttttttcatagttattcaaagagttcactagtatcaaaggctcatcgacctaagagatgataaaaatccacttgatgagataatattgagtagtcaacatatgaagtcataataacatctttgccaaaatagttatgaaagatctatgacaaatttgctaagaacttgagaatgggttggtgtaaatggtaatgccacaaaaattaaatatcattcaataaatttaatgtaagagtttggcaactacaactattggcctttacaactaaaccaaatctttctaatggtgccttttgagttaataagatacaccaaactatgcaattgtaccttccattgagaacccattattgaatagggcctttcatttgtgtggtttgggtccactttgtagccatgctcattaatttacatttacatatattgggtatatttgatgttccatgttgacttgtatatttaaatttcatggcatgaaatgaaccatgtaactatactatatatgtgttagattggattgaatttgcatgaagcatgagtttatgtaccatgacatgaatgatgaatttgaatgagcacttaactctatagattcaatagtaaatgaaattaaaaagtacatatttattttggttgaatgttagatctagaatctagtacattcaatcaatataagtggaacacatacaactcatccttctcttccaaataaattatcctagacttgttagattgtttaatttttttttttgtctttaatttcaaaattcctttttaggctttagattcaaaattttaattttaaatttttttattttaagtttttaattttaattttatataaatattatttttataattttatttgaattatacatgtagtaatgatgtgtcattcccacatcaatgctaaaaacttcacattaaaattcgattagccacataggacgaaaaagtaatagaaagactaaaactcagttacgggaatagtttcccatagtttgaggggtaatttttaacaaaaaaaaaaaacgaaaaatttaaaggaacaatacagtaattataataattcggtcagcaaaaatgttatttattaagttattcttaaattacaaatgcattggcaataaatttaagtggcaattaaaagaaaaaaaaaataagcataattcacaatcttatcatcatgtaataatatctaattatttcttttccttttttctaaatagaattgtgaatcgattaaattcaactcagatcaaataccattcctaatatgaataaataacactaaaaaaaatagaaaagaaaaccatattttacaaccaatattgatgaaacacataattaaaggtattcctaaattatatgcacatttcatgcaaaaaaaaaatgacgcccaactttcatcatcttaaattgttttttcatttttttttaaactctaaaaacactcctttcctctaaatacaaaccaaaactcacttttcaaaatatgttcaaaccataacatcccaatcataagacttgaatttctttgactttttcattcccttaaaataccaaaaacaaaacaaaacaaaacaaaaatttatcgtaactaatccgattttttttttctttctttctaagacaaattaaacacttttttttttcttttctcaaatgtgttgaagggaaattaatagaagaaattgttccctccaacacaaaagttttaaggtggtaaaaaatggtgaaaatggtgaaaatggaatgtaaaagattattgttggttttattgatggtggattgtgtaatgggatttactcatattgttggaggacgatatgggtggcgtgtgcctcgaaatttgacattttttgatgaatgggctaagccaagaacatttggagttggtgatagacttggtaagttcttactatcccttttcatttcattccaaaacatatttattctgacttcaaaaaaaaaaaaaagaaa

SEQ ID NO: 381330 - DNA, 3116 bp, Cannabis indica
actctgtttcttatcttttaactgaaactgacaccttggcttcaaaacatgctttgagacgttaacaagcaagtcagtaatctaaaaattttcaagacaaaaggactcttctaaaatttaaacgtcatttttaatttttaatttaatgacaataaattattctaatacttaaacaaactcaacgacattttctaactaccgaaactattttaaagcaatatattagcatgcataaataacataatcataaaaataataaaaataaataaaagtgatcgaccatttaaattttgaataacaataaaaaagtcaaatgaaaacctaaaaaaaatatgaataaaaaagagataatatatcattaaaatatttaaaatatttatatttaaaaataataaaactctaaacaaaacttaaatatctccacatatatataactatcatttcttaatctgttcattaatctatcgatttattcctgcaaaaaaaccaaaaaaagaaaatagaactcatcattctgtgaaacctaaatatttatataatattattttataaaattgaagtatcgacttttggaaccaatcttttatttgaagagctttgaagagcaatgattaaaagacaaaaatgtataatgtatatttatatgtttaaattagatatagtaatgtatgtatacgtaaaactcatttagatttatgataaataacataaatttttttataataggtgtgaggccatttttgaagggaaatttccaaatcgatgaaagcttcaagtggaggacttgatcactataaggtatcttgtacgtgtatttaaatgtatcgataaatggatactgtttattttttgagtaatttagtcagctaatatattcataaataaatagatacaatgttattttttttttttctgttcattcttctctcatttatatatatataatattccaaatggtgtttagtaatacaatcctcttatattactcaaatctaaacttatgaaaacaataaaaaattgatataataaattcctcttgaaaattattcaaaagttcttcaaaataaagtaccaagttcgatcaactaaaagttaaacctatacatcatttcagacctaataagcttcaaataatatatgtaatgactcatttagagagtaagagagagaagtacatgttgtgctcttgagataagagcgtgggaaatagatatataaggattaaaacacatataattcccaaaaaaaattaattaaaaatgatttggtaaactaatgtattttagaatttttgacagctttatgtagatgtctagattgtatacagattaatttttttttttggaaaagaaaattttcaatctcattaaaccattgataattttatttatttaactgtaatgaaaaaacaacagccaagaactatgatgatgtcaattgattaatcgaaatgccaaaaaaattatgatgatgttaattgataaatatgaaaaaaccatttacatcacaacattgttaaataccatttactcaaaacatcgtctaaacattaataaacatagacctactaatactatccagaactttctccaaaatgctgtccaaaaaataaccctcacactcaaccataaactagtaaaagaaaccaagaaccttccctcccacatttttcctacgtgcctcttcatgatccatgattcaagtagaggttgtcaaaaccatgtacgcaaattaacgatatggaagcaaccatgctgtcaaccctaatgatatacctaatgacatacactaatacactcaaggacataacaacaatacttaatgacatacacgcaaggaagcaaccttgttatccaccttaatgacaaccttgttaaatacctaatgacatacactcaaggacatagcaacaaaaaaataaaaacagaagaatagtactaacaagaatagcctataacaaaattctcaaacatttattacattgaaaatcataatcaactaattaaaggataatcccataagaaatgaaaagtaaaacaaaaaaaaaaagaaggcgagattaagcaccaatgattcattaaaaatttaactcctctatagtatttcttacctttcatcggcggatatgaatgagaccgcgccatttcctcggctaccaaaaagatgatgatgagcaggaaaaaaaatggttgagaaactcttctgctctagcagtttaccgaatctgagcaggataacacagcaacccagaagcatcagctccaataatcgcaaggtcacaagcaccacaaatcacaatggagataaaacatcaaacccacatatagaaaaagatccagattcaaattggagaaaaagaaaattaaggaaataaaagtaaagaaaattacgagaaagaaaatcaacctgcattcgtccttctaatttgcaagggaggagctgtcatcgttgactgtgagtaggggagaagttgtgccatcatcgtctacaagtgggggagttggagtcatcttctacgagttgtctatcgtcgtcgactcttttgggctaagtggtcggagatgggcgggtagcactagagagtgtaagtggatttgatcctgagagagtgcgacaaggagaggaaacgagagagagagagaggggagcagatccatttgcagggagctgtgcgcgaggttggaagagagagggtagctaagaccaaagggataatgatgaaattagggtttcaaaagttgtttacccaaattagtttaatgtttttgccttagtactgaaaaaaatagtgtttaatgataaaattttattaatttttaattttatataaactttatctatttataatgtatgaaacaagaatccttaatgatggcacatagatgtctatttacaacccttaatcgaagaatcaaaagaattatgggagaaaggagtacgaacttttaatgttattgataaaacatattttacaatgcgtgctgctgtgttatggacaattaatgatttccctgcatatgtattgtgtctggctatagcactcaagggtataaggcatgtccattttttgaggatgacacatcttcatttcgagttaggggtaagatctcttacat

SEQ ID NO: 381331 - DNA, 5261 bp, Cannabis indica
tcattttgcatctcaacccttttctagtggtaaattcagttgtcggagtgtggtgcactatgttatgcaaccactaaaattaagggattatttcacaaatacacaaaaacaacaaaaaaattacaaaaatacgattttacggaattttaaatatttttacaatttttttaattttatttacagaaaatacagtatctttatgttgtactcttgttaatttgctgttgagtttttgttatatgtgtgttattttttgttgttgttttgatgttatttttttgttacttttatgttgttctcttgttgttttcgtgttgtttttatgaaaaacgtaaaaatagtaaaaaaaaaaaaaatctgtaaacgtaaaaatgtaaattttctacaaaaaaaatagtgtctcttgtaattatcctaatattaaaatcattttttgttatatttagaattttaactctccaaattattaaaattattaaattgtactctgaatttttttgatagttggatggtaaaaattcaaaataatttttttaataaatttaattacacaaagcacaacaattattttactaaaatataatataaatctcacaaattactccaaatatattaaaactaatgataaattttatcgttttgagtttcatttttttcccactcttatgtttttctttcactctactttatgtgctacaacacatgcttcgtacgtgaatagaggcgaaagcgacgcagtaattaaagtggccagtttcatctaagaagaaaaaggaaatacgtagtggagaaatgtcaacgttaccctttattgatgatgaaactcattagaggggagagaaatcatgccatgttattgaatattttatttgttttgagggaaaacgtcactaacgaataacagtataaaggtacacccatacttctttataaattctatttaaacaaacaaaactttcatgtaagaggatcattagagaaaaggaaatgtattttatttatttatttatttgtaagatggggagtggagagtttccttccaccaaccaattatataataccatgactgaatttaaacaaagaaaaaaaaaaaaaaactacatcgagaaaatggtttaaaaatatacagaacacctagttaaaatgagcttatgccatttgatttagctcatcaacgacaactcagattacataatagtttggtacatgttttctgacttgctctagtctcttctctgcttcattaacttttatataatcaagcagctccctacttttgatttgataagaattggagcacatcatcttttgtgggcattgctggaatggctcctctttctgtaactgtgaggccaccgcaagcgtttgcaaaaagtagagcttctcgcagtcgcttttcatcctgagaattcaaaccaaagttactcttaagatcactctataccacaagactggccataactatgttctataaaaataattttcaatggcaagtaaatgtggtggcgttgagcaagaaaaatgtgtacctgacaaacactttggtcagaagctatgctgtttagtaccccactgacgaaagcatcaccagcaccagttgtgtcaacagctttaactttaacgccaggaacccggcccttgaactcctgtaaagaattgaattttcactaatctaagttactaaattgactaattagtttatcttcactgctagatgatcccttggaagataaatacaagatatgctcactacattagtaatagtttcggttgattatactacctttgtgtaatatctgcaacccgccgacccttcagtaacaatcaaaagcttaaggttaggatgaaaaagctttgttaacaccacttcatcagaataaggatcatcaccaccagtaagaaatgtaatttcatcctcacttatctggaaaaaaaataagagaatacagttgtgatttatgtatgttccctttgtaagactaagaggaaatgaactgaaagtgatattgtttttgcttctggagtggtagcagatttcaaactatgaaaatcacagagggagtattataccttaataagatcagcctggtcccatatactcattatgccttctctagctgcctcaggtgagggccacaaagccaatctcaaatttggatcatatgagaggaagcaaccagcttttttcgcaatgcccatggcagcaagatgagttgacctggacggttcctcaatcaaactaatggagccatagtgaaagatccctgcctgcaataaaatttaagattgaattcggataatatcagctaagtgtgcttattacagtatgtcaattgtttctgttctgttttctagataaaaatgggaagagagacacacctttttaataagagcaacatcaagttcttcttcacgaaaaagcatgtcagcacttgggtttcggaaaaataaaaactcacgctctccatcggctctgagtgtaacaaacgccaatgcagttcttgcagttggatcaaatcgcacgccagagttattgacattgttatcttttaaaattttagctagcatgtatccaaattcatcatcaccgacctatgaaacatatggaaagaacttagaaaaatttatatttaagccagttgaatgggaaaggagcacgacacacacctcaatttccaatgatgccacttatagagtgaaaaacacattatcttttttgttttagaacatacagtttagtcaaatcaagttaaagaaattattgtttaaatcactatggaaaagggatagcagatttcaaaattaggtgaaggtacaaacagacagccatgaaaaacacagataacatagtttgcatattctgaaaatgtataattagtattggccttttcctcaatttacagttaggagacaaattgaggacaaaaagataatcttaatttgcagcagaacattccactcacttttgcaagtagattgttaactaaaatttcagtcacagaaacaagcaggcactagcagaaaaataaattatcacatctttctaataactattcaatagaagtaatagaaaagaattctaattcaccttgcctatgaaagctgaagaacctccaagttttgcgatgccaacggccacatttgcaggagcaccgcctggagctttcttgaaagcaggtgcttcagcaagtgaaactccagcaaccattggcacaaagtcaatcaatagttcaccaaagcaaacaacaagtgaattgttattttctgatactccatttgtagctgaggaaagatcatagtaaaaatgattttgatagtataaataactgcatagaattaaaaactatacattttagacatgctataactgatattcatggtaattctaacttaattactagactaattaagactggagttttgtgttcccctccctagccttgagtgggggtcatgattgaagcctagagaaaatgaaaattaagaaattatgaaaatgaatcagaaaatcgaagaaatttaaagcaaaaatataacaagaatgaaagagaaatgatttcattttaaattcaaacaggtactccaactggtatggggcgaccaaaaaggcccctttttattattattattttttttttaatttttttttttaattttaccagaaacgacacgacagaaaatctgttcgatcattccaaagataattcttaaaaagaatttcattcatcattacaaaatttcccaaaagcctaaaaactgttttggctgaacttttcaaagtcatgagccatgaaaaacttagcatattgacgagtcgtgcaagcaaggaacacttgacaacatttttaagattcagatttcagagtaactcatatcatacacaaataaccaatgcatgattacatattaaacataagaaaaatgactgaatttaaactattattagcgcacaaactggcactaagactaaggatttgggataaataaaaatgattcacgcatcagaaaaaacgccactaatcaaattgtaaatatgtattgctcgatcaaaatagagagagaagaagaataaaacaaaagaacacagattcagcataagagcagaaggaagaaaacccagaacaaatgaacaagaaagaaacgatctttagctcataaaatagctcaaacccagatacgaaatctcttgaaaagcatataaacacaaccaaaatcttaatatttataatcaagaaagtaaagattgtgtatttatgtacgtatatattcatatataatgtgtaaaaaatcaacgaaagatgtgaaggagacaaagcaaacctgaggtgggatccgtagccataatgaagataaaaatgagaactgaggtggtgcaataagaattgcagagagggagagagaaggttacaggttggtgaattgagagaaccaaaaaaagttaagaagaagaggagaagtagaagagtggtgggttgggttgggtttaaatcttgaataatggtttgtgaggtgacagtaccaaacaaatcatttgaccattcgtcctcagtttcccaaaccagttttataacccaggccgacgcatgttccagtctttttcttaaataaatacaattgaaatcttatttaatttttatttcgggtaattaattaaaatcttattccctgcatttcccctataaatggtgttaattattgaataaagacatgcagggtttccatttttcacacatggacaaaattagattaagtaacataaatatatatattttttcatttggaaaggaagattatttatgaaatactatctatttttttttaggattatagtacttatttgccaaataatttgtaaatatataatttcttttcaaaacacacgcacacaaacaaatatatataatttaagagcaacggttggtttggttgattttttacgcaaaaaaaattcaaaattcgattttaggttttcagggttataatccgaaaaccgaccgactattatacaaatgtaaaaaacaccgaccgttttaactcacggtttggtcggtctaaaccgaccaaagcgaactttatttttttttaaaaaaataagtttttaatttttttataattatttgaaaactaaaaatttagagtattgtatcaaatatcatataatttaagaataaaactttcttagttatataaataatgtaaaataaacttttttaaatttgttcaaattatttgtgctattaatatggtaatgagttatatta

SEQ ID NO: 381332 - DNA, 2446 bp, Cannabis indica
acatcgtcgacctcggaaggataggggaaaaagctccatctcgatatcaaggtcattggtactgagttcctgtcgagacatcctagaacgctatgatctaaaacgagtttaaatacacaatcattttgacccagtaaaagcagattaaccacagctgtgtgattttcgaatataaaccacatttatactatgtgatatgtaatcaaaccccatgatttcaggggataaacattgtaaagattacagtcaactctgtactctgtaattaactgcctactatatgattataaataaaggcaagttagattaaaaaagggacgaaaaaatcataagagaaaaggccctgaaaaactaccagaaatctaataagattgactcgtggactacgcagaattttaactgcaaaaccacataaaaaattctgtgtgttcaaacttttccttgactgttttatttttctatgtggaattatcactcttaggctcatatttgactaacgaaaatttgcgttaacataaaccaaagtttgcttacaattcctttttcgtttactgatattgtgaaacatttctaatacagtttaacaatttttttttcaaaactactttttttttgtaattagtagactaattatttcaatttgtacgttgtacaatagtgatcattagttaatcggatctctgtttggcatgaataaatgtgaacttttgaataagtttgaaaaagttgattatgaatttttatgatgagacaaactgatgctatgaactttgcttagtgatgagaaaagaattacaagggggagtgggatatatagttaaaatcacatatacttttatctcattggttgataagttctccataatatgttttagtaaccaatgtgactactagctatctcaaaatctgtgatgttcattctaaacattgtaatgatcatgacaaaatttccattttttgtattgtgaaggtacgaaggctatcaaagctgatcctttatgttatgaggtatgatggatttatacatgtagttttgattggatttcttaaatcttttgttacatgaagttagttttctctccatgtaaaagtgtgtactcttttggcctattaaaaataagaaaagtaaaagaccaaatttcattttttaaaaacttattattaagattcctttccacctttcatttgttgtcacttgaacgttttcttatcaactcaatatgagctagaatcaattttttatagggtaaaattctttctccttacttctcttatacctgatcttgaatgtttgctaaactctgaaatgtcttactgaaaattacatgctttctagcaaggaaggtaacctgttggatgttctttttccctctaatcattgtcagcaagtggggttcaatgtcttttctatttagtgggatttgattgaaaataataaaatttaattttggcctatattttttcatgtttgattcttttcacgtttgattcataatattttttgattctttccacgtttgattcataatattgtgcaagagtttttgaatttgtatcattgtatttcattaagttcaaagaaagaaaatacttgcattactaaaaactcttttaattttttatcagtgttttttttatttgaactcatgtctactaataagtaatgagaatcgtaacgtagtcattctctttgtttccttactttattaaaattaagaaaaaaagaatttaactaaataaaagattaaaaaaaatacaatcttttcatcttaactttcaaagctttaaacaatcatcttttaattattgaaattttaccttacatttaacaatcatcaaatctttacacattgctttacatttcaatatcataattttattgttattgcattcaatatattttatactaacttcttgcacttaatttataattcattaaactttatacaattatttcaataaaatttatttactaattagcactttatattaaacatcattttcaatttagataagtcttttaaaaatcaaaaatataaaacttaatataaaattaagctattgcgcataacatcaatctagtaactatatatatacctacactcactaatttttattgttaattttttatttactttttattactagtttagggttatttcttctttacaatgtttaaaattgtgtttttgaggcgcacttcattgcacgcaatatattgagacggaaagaaaacgctctattgtgtgtgcttcagaatgaaagagagaggcagacacctcaaatggctgaggcaatatgagattttgtgaggcgtaaaattttgtgaggtatacacctcaattagaaaaccagaatttggggctcttcttaacccattttcattcagaaattaaagaaagggaaacttacaaaaatactgtttttttaccaattattttcaaaa

SEQ ID NO: 381333 - DNA, 7171 bp, Cannabis indica
gtagagtttatattcgattaaccgtttgctttttcattacccagatactgaacaagggcatactacaattgataggtgtaggaaattggaaaaggtcttgatcttcctttgtgagcttattcgatgcaacttcaatgaccaatgtagagtccttgacattttatttgattgaaagtttgtttgtaataaacctcatatcttattcttatcttatatacacgactcatattttgtcaatgcactactgttttctgtgtgttcggtttctcatagatgtacatgaatgaaccaggtatttatgagtttaaatttcatattgctttattcaccatatccttgtacaaaaaccctggaaatccccggggcttctatagcaaaacaaaagttaacagaagtttatacatggcataaaacttcaagagatgaacatttttaaggagagagagatatgaggaaatgaaaaaactacagaaccctgcttattcgagtatcgatgaccggagatttggaagacggttcagacatttctagtgcctctgccagtgagagccggcggtttctccatgcagcctctgcccaactcttcattctctccccttgatcctttctgttctgttgcacactgagtgcttcagcatagcctcctacatagttaaacacactagagcattatagtccaatgatatacataaaaacactttacagaatcaacatagcgtgttgccacaactcaaatcaattataccagataggctagcgtagaaagagtatttgaagtaaagttgactagttgtgctaagtggagaacaaacaaactcattcatgcagaatgtgtttcggtgtgtatacagcagggacttgttattcagatacatttacagttcatttttcctttaaaatccattttaaattcttggttattacctctagcaagggccataatatcacatctagctacctttgtgtccgcacctacagaatccacaaaacaaaaaaacaatacattacttttaaatttccccctcattttgaacccaataaataaccaattaattattaagttattgattgtaccttcagtttccaatggcggagctttcagcaaatctattgcccttctataaagtccctgtaagtaagaatactgtggtgaaaatccagtaatagaacaaattttcataaatactaaaatgaaagctgaaataaacataagtccgtttcaggaatgaaaaattcaaatatccaaaaacccaatagatttaacaaaattaacagcaaacaacgatgacaagtttgtgtaagggttgaaaattctatggaaccagcaaaatctacagagacgagcaaagcattacaacatcagcaatatgcaagactcagaaaaaactagttctacaattattaaatcacaatgccaactagtaacgattgaaagattttcaaagttagacatcaaaatatataccatcaaaacctacatatttaagctcttaaaacaatgaccccaaaaataccaataaagtttttataataagcatggacaactaatactaaaaacttactagattaatctgttgatgctaagtcaactgaagaaatacttaaagtttcattaacttaaaagggaaattgaggacacccaaatccttgaaagtaacttgatgagtagttatttaaacaacctgccaaccaataagtaagaatccaacctcttgaatcaaaagagaactcgaatgctcctgaactgctttccgccgaaacatgagagctatgcacgttaagacaaccccaacctttggatgatgagaacctttataaagtgcaacatgagcacaaatgatccgcatatttgtgttaagaacccatcaagtaatttatatatactagaaagtaatatcactgtcaatcataatcgcaaatgtagtttaccgaaatgttcctctgcattagttagagccttggtcaatatctcctctgcatgaccaaaattcctgaaagtatatgagtaagacttgtggcacaagtgttccgtgtcagaaagaagatagctactaatgtagagaattacccaagctgtgcctcaacctgtcccagagcacatgtagctgacaacaaaacctcctccatggacatattacaagctgccagtgaatttgagttgatgcagtatttattttccgacaattgctgaattacattctggtataattcctttgccaaagaaaaattctgtattgtatgcaggaattctccacagcatagtttagcaccgactatatttaccaaacaatcgatgatcaaacgccaaagtaagacaaaattacaacatatgtatagtagaaataaacacagacacaaaaggagatatgggaagaaaaaaatgtaaaattgctaaaatgagtgaaatggaagtgtcatcattggtgtaaagcttatgaaatctatacatttctagcacctcgtatgtatcaatagccttcatggagcatataacgtagacaaaaaaggtaataagccattggcaatctattctcataggtctgagcctatgccctatcccaatccagcaaacagaaccttcttgaaacagaaagctgtattagctagtttaagaaaattcatgtacagaaagtaaatcatatttatatttatgtatatgtatatgcatatattttcaaatgggtttgaggaaattaaatttccaagatttaagctcttatgttgttaaagtgtgtattgtttttatgatacacttatattgtgcaattgtgcaataattgaaatggacttcaccatgtattctaacagtaaacaatgaccattgaaatgaacctcaccagccaatcctttgctatcctcaggtacatgaaagaaagactcagctgaaacgaacaaaatataaaacagttatgtattatgtatacaacaattatgaatgacatgatattaactaagaaaaacatttgttccagcgttagctgtacctgactgaatatttccacagacgagctcattcagccctttagcagctttagcacgagcaattaagacctcattaactcccctgctaaactgagtaccattttctcccaaaatatctaaacatttatctgcgaccaccgatgaagtatcatcctatatagggagaatcatctccatgaatcaaaattacatatacacttaaaaggtttaaataatgtggatatgtacctggcccaactctaagtatagtccaacaagagcttccaatgcagcaactttacaaaattcagatagtttcataagtcaaaaatagacgaaacccaacaaaataaatatataaatgctacaataactttattttgtttacctctaacaccaattgaagaggactgcaaatcttgaattccttggagtttttctattgcctcatcaaagtttcctctaagaaaaatatcccacttatctgagttaagaaacaaaaaaaaactaaaagaaaatatcaattgggatttgcaagtaataatccaatatgaataacaattgaacctttcagacagcaacgtagacatggccatgaagatcatccccttcgtatcatctacatcagatgcttgcccttcacttggttgagtcgaaaggcactgttcaagcacaagcagaccttgtccatacgaatcatctatattttcacgtaccccaatccaacccacaaaacatttactttcaaaaagaaggaaaaaaaaaatacgaattctaagaaggtcaatcaatctgttggaaacctgatttttgggacctggcatgagagagagcgtagttgatcatctgaatagcaactgggttggcgtttgaggcgttgaattgaccatggattaatctcgtaaacaccggaggccgctgcaagaaagaggagctaaacccaaatgagttgggtcggagcttagtggttcgagccactgcccttgatagcttggccatggttcgaatcatttttcctggttgatcaaatcttcgttctgtgatgaaatgaaatgaaatgaaatagataaaacctgtttctactcttctactgcagaagaaagggttttagatgattaaggcaaacgacaacagtataagaaaaacgaccatcttttaagaaaactacactacaagttggtgtttgtgttggggtttatacctgattattttaataaagaattgaacattttaatacatacatgaatgttgaattattaatatttttttatcaaagaagaacttcattaatcaatcaggcaaattacaaccaaaccaaagccaaataaaatcgactccaaagacaactaaagctaacttatatacatcctagcgagcttttgacccttagaattcctcccctatctaaaagtgttaaacacactttgatactctctctaatcattttgtcaatacaatctattgacaaacacttatgttcaataacaaaaaggttcctattaatcaaaatgttatagaccacaccaactaaggccgcatattttagctctgctaaattagagcgagctccctgtgattctgtccaccgaacccagctcccaaactcctttgaccaggatttcaaatcctgccactactcaactcaactaattactcttgtagagagtgcccatgatcctccttagcaatttcacaagcaggatagagatctgaatccatagtaatatttctactagcaacctgatctctggtaagaagatgagagtgcacaacttgacacaaaatgaatctatgttttagtgcagccatacgacaccaaataacccgatgaaatgtaactctggtcaagttagatataacactatcataaagagaattgattttgaatttacctgtgcagcctacctcatatatatcccttggagagaagcaacgacttagattcataagctttctctaataccagcttacatctagcttgagttcatgaatccaaatactttgactctttaagtaaatcatattgatccacttaaagactgtcctgcttcaaagctagagcccatgagtatttagccatagctgctttattccactttgtcccctctttgaagccaagaccccgaaatctttttggtttgcaaaccaactcctaagaggacagatgaagcttgctaaagtttcctccttccccaaagaaagttcctgcaaagtctattcacttccttaatcacactctggggaagcataaaaatgtccatccaatagcttcctatgtcgatcaaaacaatatttataagctaaattctgcctggatatgtgagatgtctacttgtccaagtggacatcttcctccttattttagtaataataatctcacaatctacatatttccatttggttggcctcaaggtgacccccagatatttcaaagggaaggatccctctccaaattttactgtctccatgatctttctcttgtcagtgttatcaacagtagccaagtaaacacttgattttcctttattagcattcagaccaaaacattcactgaattgcttaaaagctcttctgatacattgcatagaatccaccctccctttgcataacacaatgagatcatccgcaaagcaaagactcaccaatttaagatccttgcaaagcggatgaaatttgaaatctttagaattggattggacaataaggagtcgagtgaagtactccataaccagaacaaatagtaagggacacatgagatgggatcaccttgtcttagcctttagccctgtgaatctaccttgaattctaccattcaataccaacgaataggaagtacctctcacacaagtcatgatccaaccaatgaataatgagggaaacttgaaagcctttaacaaattttccaagaatcctcagtcaattgtatcataagccttgcccaagtccccctttaataggcatctaagagagatattcttcctttgataccctttcaataaatcctaaatttataatataatatttaaattaaaatgtatttaccgagtttttcggtaaccaaatatattgagagcttagagaagataacagataataataaataaactgatagatttttatgtggttcaggcgttaatgatccttagtccacgagtctatattattagcctcttagggtaaatgttttagagattacaagatattgcaataaaaatcactctgcttctcttgaaagagagttttctaagaatttctacaaagtgactgtaagtaagtaaaattgttctctacttgcttcaagaaaaataagactatttatcggcacacatgggataaagggaataccctttacctatctagggtttcctattccacgcactactaaggtatgtactgtgagaggacgatctgaccattagctgatagaaatcttcttcatcatgtggtgtacagccacttgtgaggaattttgtacgatcctagacacgtgtcgtgcaaaggtttctcctttgcaaaatagtgatctttaaccaggccgttggccaaatagcgtacttgagggtgtgtacgcgcactagcatgaattggcatgggggacaaaatctgatcctgtttccgaaaaggatgtaaccgtctacaaggtgatattttgcaaggtgttgatgtggccaacgtctcaaaggcctttatcgccttttgagttccttactaaggaaagttctcctggaggttcattttcttagttacctcagatgacttgtgttgtgaccatatccttctcttcgatcatgccatgtgtctcattaatgaaaaattggataacatttaccccccaagctttcgagatcctttagatcacggaagcttgctattgtctttgacgttgaacgttgacacgtgctgtaggtttaggtcgcagacacacccccaaatgagttttgttctactaagggcatttatgacatttgcttcctcttgcatggtaaccacacgacatgtcagaaggtatttctggccccttttcgtgtgtggcaaggcgtgcttagcaaaaaaagtggagtgctactggcgactgagtgacatgcagaaagggaccttgacattttggtgggccccgaccgatcatacgagacttttcatctccctagctgtgggatgttggaatttattttaccaggatcttagatctactcacaagtatgttgattaa

SEQ ID NO: 381334 - DNA, 2642 bp, Cannabis indica
tttttcatttttttttttaaaaccattgtcccacttcgcttctatatgaatccgtcctttcttgtaacccggctaggtagggacgtaagtacgaatgatcatgggtatgctgtgactctttctagtttttaccttttagtttttgttttatttatttatagatagctaccaagtttcatttattgaagtgaaaaagaatagaaaatacaatgtgccgacagagccacgtagcaaagatatttgtaaaaagtttctaaaaaaataaaacatatttcttgtatggccaataatgtaaaacctcaattaatattaaagaatgttaaattttgaaccattagattgatgaaaagtatgtattttgagtatcctaaggttgatatgtgtttatctaaaagtaacggtatgcaatttgaatgaaattggaaaccggtcaaatatgggtcctattattgtaatatattatctatttattaaaataatattttaaattggtatagcaaattaaagatttttgtgtcgattcaaattattcttcaattaaattagcgcaaggcatattattagttaaagtattgttattagatattttatagtggttaacattatttatgtatcacgttgttagtagttatttatttttttatataatttaataaacggtaaataatattttattttggatctcgtgttttgtaaaaattattaattgaaccttctattttattaaataacaaaatagatttatatttttcaaaatagtaaatgtaggaccctgagtttaatttttaataattttatttttttaatataaccaattttaaaacaatttataatataaacagattcagaaaatataaccagttttatcataatatctctagatcagattattattaagttttattaagtttttaaatattagaaaagatattttgtttaaattttttttgtcttttttcttaaatttttccacttttaaaaggattgaaatttgggtatttggatagagtctttctcctctcccttcttctcttcctctttccaaacaaagaatttaatcaatttctttatttctcttcctctttttttctctcccctctattaaatattgtattaaagatatagggaaaataaatttttggataaagacataaattttattcaagttggtaagatattcaaaattattatcattaaaagaaaatgtgttgtgttgaaccagtacataataagtgtgttgttttcttctcccttcttctcttgtttaaactttataagtttagttttggttggtttggttctgaaggtgaatttcttggtgttgtatttacaattacaagaggttacaattaatgaatttattgttattggcacagtaaaagaggtgatcaatatatttataaatttgtatgtgataatagatgacatttattccatgaagtttgtgcctcataattaagagtgaccaaatttgatcgaactcttattttattttgatcttcaaaatgacatggtaagatgagattaaataaattaagaaatatattaaaaaatttaggcactattttttattataaaaattataaataaattattaggatggcagaatgggctattttcgcgaatcaggtcggcccccaatccaacgaggcagccataacccgaatgttccaggtcactatcttggtttttggcccgacccaacctaactcaatatagttttttttcttttcaaatcagcgcttatttatttcgatttagatattaattaaaaaaatcaatttatattcttataaatatatatatattagacacaaaatatcgtaattttgctaggaaagtacatttagttttaatataattataatgtaataaataatttttttaaatgttagcttaaaacagagaaggttaattacaccacatactgaaatttttaattttttttacttttatactgttgggcgaaatttttttaaaaaatactttgcaagttttatactgtttactgtgttaagttttcactgttgttatactgttattttttagttgttccactgatgtttttagctgttctgttttgtgttctgctggtgttttataaaaatacagtacttttttaaaaaaaaatctgtgtgacagtatttttataaaaattaacttaaattttagtatttttgtaagtttcaaaaaaaaaaaacatgttgggtcaaatcctatccctttaacaaaggtcgggcctgatccagcccaaattaagaaagctattgagtcggtcggtatcggactgggcaagattgccattgccacaaattacagtacagtaattattaaaattgaaactcaattgcagccttgcaggcgtgtttttattttaatgcttccacttaaaaagtttcatatatgtaaatataaatatatatatatactagtaaaaactacgtgcgaggcacgtatactaaattttatgctagtttttttctatgttatttgaaagtgatacaataaaaaattaaagaaaaaacattattagttattaggtgagattatttgaataaagaacaataaataatcacgtaaaaataaaaaataattatttgaataaataattcaatatacacatttatatatatgaatctcat

SEQ ID NO: 381335 - DNA, 626 bp, Cannabis indica
tgacttaaatattttgtatataactatatttttggtattgtataaaaaattatatttttggattttttttaattatgtaaattaagtgtaaaaatttaaatttacttttattatttgttttggatcaaaatcgaatggtttgatattttttaaattaataattatatttaaagattttttagtaaacatcaatgcataatattcattgaagtgttctatatatatctggttcaaacttaatttacaagaatccattaaattggataaaatctcggatcctgatttttttttctactaggtattccaaaataaatattttggttaccaacaatgtaacatactactttttttgtatgtatccaaattttattttatgtgatttttagatcacaaatggatgaattatataaattttatgataaatagtgaatatggtattattcttgctatttttggaattatatgtgaattggctcggagccgaaatccctagctggtaaaatattagaaaataataaaattagtaattatgaaaattatggaaactattatcgggcgaagttttatttggatagtagaaactaggaataattatataagccactattttttgtaaaatatttata

SEQ ID NO: 381336 - DNA, 4790 bp, Cannabis indica
tatatatatatttttaaaataatcaatctataataaatttatttttataatttttactagctaatttatttatatttaattattttactaatttttttttttaaaaaaatatttactaactcaattttgaatttcaaaatttaaggctatttacgtctcaaccctttaattatctacaaatataaacataaggtttgaccacaatttttttttttcttttaaaaccaaattggtaatgaaatattattttattttatcggggatgaaaattattatgaaacccgacaaacaagaaaacagagaatttgagaggtttgattgaaccaactcgatgtcgtgcacagttgtgacagtggcaaacccgtgataatagctttaagaacagccaaatgaaaggaaagaacagtacataagtaccactatatctatctatctgtatatcttcagtagtactacacatcttcgtcttcaatcaccaaagtcaacaccacacaaaagtcagctttttgccactcccttttttcctttttcctttatacatatatctgagactgatactaatctcatatcatcttctctttttattttcttttttaatatatgcagtaaaaaactttcccaccaaaatgaaatccatgaactagtcttgtgattttttgtttttactgtagaaaaagtttgaattgttcgttcgtttatcgtcactgtcgttggttctttttcgttgttcaattacttgtcaggattaccaaaagagcaaggaagactaaaagggataaaagagaagagcgtgaacatcacgaccgaattattgttattattattattattattattattattattattattattaaaagaagaggggaaagacaaaagcccattttatagcctcaattggactggtaagaggaacttcttggatacccacttcctgttctcacgttcggttttgttacgttttttttttggtgcttaagtttggggttttagggttgtttgggtgaggggccttttttggtcattgtttattgattagaagttttgggaagggttatcaaggttggaggtgggttttggtttacacttatcaacagaaaggagttgattacaagatgtgggtgttgagaacttgaaagtttagctgaagaggttttaaagagttgaagattatggacttgttttgctgttttaaagcttcttactctcaggtactcaatcatgtctggtttaaatttacatgtatatagtgtcttgtattgtcctaatgttaattttattgtctataatttatttaatcctcaagttatttggtatgaaaagctaatctttcagctacttgagtataatattttcttaattcatggacttggggtgttttagcttaagcttcgttgttgctttttggactttgtgcagcaattctgagctgggttatgccagttatgacctcatctgtgttgttatgctgtaattttcgttttggtcgttggctttcttttcttgacattgttatgtttggtgctctcggttattcaaaaattcatttggtcatactgatgaggttgttaaaccccaactctgttttttttgtcataacttctggttttccaaaagttttgtaaattatgaagctttgaaaagaacagaattgtctctacagtggaacttactgcttcttctatagttgcatcaacttagtggaatcttctatattgtgtttctaattgtttccctgaacttaaacttaaaagagtaagaaaagtcagtacatctaaatttgtgcttggtttgtacggtatgcgcctcttgatttacagattaattggtttgttacaaaatttacttcattcttcctgaaactaaaggcctctttattttttgaagttgaaaccagtttttgtctttttatattttggcttcattgagatatgcaaggaaggatccctggctgatgctttattccttctttcctcttatgtagcttattggagtacattcttcatctaactcaggtaaggggagaagccatgagaggttagtcaagtatggtttcagcttgctaaagggaaaagctaatcatccaatggaggattatcacgttgctaaatttgttaagatagaagggcacgaattaggcctgtttgctatttatgatggccatttgggagatagcgtgcctgcttaccttcagaaacatttgcttcataacatcctaaaggaggtcagatgttgctttacatattttacttcagctggtcatgtaatcagaaaatgtgttcacactttcttttcgccttctaggaagagttttgggttgatcctaatcgatccatctcaaaagcttatgagaagacagaccaggcaattctttcacatagttctgacttgggacgtggtggatcaactgcagtaactgcaattttgataaatggtcaacgactttgggtggccaatgttggagattcccgagctgttctttcgagaggaggccaagcagtgcagatgtcaacggatcatgagcccagtactgagcgaggcagtattgagaacaggggtggcttcgtctcaaacatgccaggttttcaatggaaacctctgctttaatatatttagatatatatttaatttctaattcacctcctcaaagttataaatagggtgccaacttcattacaaactctattttacacttgctttcttgaaaatctaatgcatacaattgaaactcttacaacagttctaattacaccaaaaattgcaatttcacattggctgtcttaacaagcaaatatgccttactctaagtgaataatgattggtgttcctacttttgagtctattgaattatcctttccataaattctctctacataaatggtagttgaatggggtgcctatttatcctgctctgtacatgaattaaaaagagaaatttaacttacagtttttttagacaacccccattataatttgaaactacaatcagcaaactgagcaaagattctctgtttctttgtttatctatcttttcaaaacgaaataagtaaatgttgtctcgtctcactcagaagtagacagaagctacagagccaagttcaaagatatgacaagtatcttaaaacaatttatatattgttctttattgggttgaaaagtacttaactcctatgttcctgctcgatcatttatctttattgtgcttgatttggctttcatttctcttctgtaatccagcagatcacttgttagaattttatttctttttaatttgttctacgggaataatgaatttaattctataataggggaaagtacagacatgtagcataaaatggatacattgatttcctttgtcacaaactcaagtcctagtgattttattttccaatcctctcacatattatatattccgtttcatcatttctcaattcacttgtagtcaaatgtgtgacaaacgtatttggtggtggtctacatttattaatttgcatttgttgttaggaagttgggttaattttcggtctcttctttaacttgaattgacatatgtgggctatcctttgcttcttcaggagatgtccctagagtcaatggacaactggctgtttctcgagctttcggtgacaaaagccttaaaacacatttgcgatcagatccggacatacaggatgcaactgttgatgtcaataccgatgttcttataattgcgagcgatggtctctggaaggtgaaacaatttgcctggagttgatctcctcttttctgtgttttgtttttaccttgcctagtgagtatatgtgaaatggttgctttcttatatgatagaaaaaacacaaattctactttaaattttgctattcttcttttcctcccctcttatgggcatcatcaaacaggtaatggcaaatcaagaggcagtcgatattgctcgaaagacgagagacccgttgaaggcagctaaacacttaacagctgaagcagtgaaaagagatagtaaagatgatatatcttgcattgttgttagatttagatgatggtgtattgtattattgctccacaactgcagtttatactggcaaaataaaaggaaagcttctccatgtatggaatgaaaggaagataaaaaagaggaaatctaaatttagattcttgaaaatgtgatggacctggtggtggtattgtttgaattcttttgtgatagagattaggctctaatgtatatttttataattattgtatgttttactgctttgcacagacaatccacgaattatgtggctatgttgaatatgttgatgtagaaattgtgtttcaaatcgttaatggagaataaatacattcacatatgtgtactcccgaaggtctatgaaaggggcagtgggtaatgttgtaggggattaatggtgagctggcaagtgagtggttttgagggttttgctagtgtgtgaggggtttagcttgggacgtgttagtgagaataaatgccgaggtaggggtgttcattggatcacatccaatggatttggacctgtctgatccaatccaattgaattgagtcatccgatccgatccaatggagatttgagtattttgtaatcgctttacgacaaaaccaggttctcgaaatccatcttgggtaatcaatacaaaggccttgctgctattttcagccattaccatctgatacatttctaattagtaaatatcccgcgtttcgcgggagatatataaaatattttaaatatctcctgtttcgcgacaggtatataaaatattttaaattatat

SEQ ID NO: 381337 - DNA, 1275 bp, Cannabis indica
ttttaaatttctaaacttttaagaaaatatatgaaagaaagatacagtgttctttataacctcttttacattgagattttgatctcatattttctcaatatctgtcaggcgtacacttgcagtcactatacctgtccaatttgcagtaaatctttaggagatatggctgtaagagaattatctcccttcatctcttaatttctgttagcaaccctaataactattttatctgctgcatgaaagttgacgacgcagtcaatttctcatttttcttcccatgtcttcaggtgtattttggcatgcttgatgctttgctggctgctgaggaacttccagaggaatacaggaaccgttgtcaggtacatgctgataattgtttgatttcgatagttctttctgataattgatagtcctttgcatatatgataaccgatgtattttgtttgtataataataataaagccttacagccttggctttatctggtgtgtttggcatgcataaagatttgttatttgtttattttattggtttgattgaaatatatgttatataaattccaatggaacaaactttctcctctacattgataaattcattgcttcacttgtctagtaactactaactagtgtttaagtttatgctgcattatttcatcaggatattctgtgtaacgactgtgatcgaaagggcagcacacgatttcactggctatatcacaagtgtgggagttgtggttcttacaacacccgagtgatcaagactgactcagcgattcctgactgctcttcgtcacattagacttcgtaaaaagatgaagataaaatattttgtagatacttgtataggccattcagttttctttgccaggaaatcagtcaatgacactgaagtttgtcttttatttgctatgtttgcaaagctcagatacatcaaattttatagatgttcttgatagttctcaagtatttagaaatatgatacaggagagagtaaaaatcactgaaatgcggtcatgtacagtatactactaccagtttttatagtgcataatttaatttaatttaattttatttattagctgatctcttaaatgagattatcatcacacaattgtttatttatttgtttattaggataactagaaaataaactgttatttgcgtgcggttgtattattttttagtgataatttatgtatgtatatatatctttatatattaaaagtgcctatctaacggcatttcttggtttaacattcttggtttaacagaa

SEQ ID NO: 381338 - DNA, 1720 bp, Cannabis indica
aaaaaaaagaataaagggatataaagttcatcctttgctttatttctttatatatatgatttttttttttttgcacaaattgaaataaaaacaaatgcatgcatgaaaaaataatataaaaaagtatccaagatataattgacataaactatatatattacctttgacaagggaaattgaaagaagagagaaaggtaacaaaaattctagtttagacattataacttcatgtgcaagtatatatatatatacatgtaatattaattatatataaaaaagtagtctcaatcatatggtggtggattgaatatataatttggaatgttggttgttctcaatgaaatattaaaaaattactatagaaaagctgatgaaactgaatagtactataaaggatctcagctgggaattctaaatttctgtaattaatttaaaataatattagttggatttgtgaatcagtgttaggtttcaaaggaattgtttattgaaataatttatactattattattagtttatataatattgtcatgttcttttaggtacgaaaggatatatttatatcatgtgatgtgaaacttgcctaaagacttagactatggctttaaaagagaatgtgtctcaaggttgatttgaaagagaaacaactttatagtttatacatatttaaaattgtagaatagaataattaacaagcattttttttttctattattaatatgtgaaaattgtgttcaatttttcaacttgtcattttcatggtcggctgcttaatttactaacatggcttttggacgtaaatatcttaattatatataataaataatataattgggaggactgagtactcattaccaaacaaatggcatctccctttaccattcaattttaattaaactataaatatatatatctttatatatttctattgtaatagtcaatattttaacaatacctagctagtaaaatgactttttttattattattttttttaaaaaaatagagaacaaaagcaatttaccccgagagttctttttctttttcatacaaatgtaataatgtaaaattttacacaaaatgaaaggacacaaattgaaaatcttaaagagttaatgtacattcaaaaatttacatatatagtggcctaaattgtaagaatattgcgcgtaatgcttgttactcgacaatacgtatttttcatcttcataattccccttactaaattgttagatattgtaatagctgttactttaatataaaatgtcatattttcattcaaaaaaaaattgtaagaatatcttcattgttcaaaaaaaaaattgtaaaaatatctataaattaagtttcaattttattttttattttttttaaaaaaaatcaggtagaggtagctgcccccttgtcccatgtataggttgacactaaaggtaagtattactataaaaaataaaatttttgtcagtatattttttatgttggcgaaagctagatattgcactggtaaaaatagaatctactttctgccagtacattttttcgctggtaaaagagattggcaaattcgcattggtattagaacttttgccaacacaaaacaaaaagtacaggcaaaaataacttatcctagcatgtaaatgcactaaaaaaagttagacttttcccaacacatattacactgcaaagtctttactagcatattaacgcattgggaaaaatct

SEQ ID NO: 381339 - DNA, 3474 bp, Cannabis indica
aggaaaactgtcatcttctctgagcaaaatgtaagagatggtcattggtcatacaaaattctcttacaaaaatgggtcggctccaataaatctataatatcaaacgtaaaaattttttgttagtatcatttatttgtattattttttaagtggtagatattaaatataggactttggaattaaatcttgaatgttgtttctagttatattattttcaagagaaatgatatttggcactacatctatatccatgatgtgtagtattttgtaatttaatattaagtctcacttattttattataatagtaattataaaaaattgctaaccatttataaaatatcatttcataataatctcagtacctagtagcaattagcaatgcttttttttgaaatagaaaattcaaagtagcaaattataacacttgttgtttcaatatcatttaattttcttaataaattataaataaaaataatacttaaacatcacaattataaaatacccttaaagattaaggattacaaacgaaagtaaacaagtcatattaaacagtaaagttggttactagaaacttttaaaataaaatgtagctagaaaaataaaaatatatacataaaataccttcatttatttgtaaagaaactcaatgaaaactatttcaaacaaaaaaaaacaagtaacaagtaacggtaagaattatacagtagtagttattcatacattattatatagtggaagtgaaattttttattttcaagttttaaataaataggtgcaagttgttgttgtgtctattgtgatgctttggtcggtttcttattgatagacctcaaattagatgcacctatgctaggtgtaggcagtaggataagggaggatgtatatggatttatatggcatgttttgaaattaattaagattataatttcatatcttttttatatggaatgtattgaagaatatattgtaggagattgaaggttaagggttgcttattttgatgtgtaatgagctttggctcttggaagagaaattgggactctcgaattttctagaattatcaataaagattactctcttttcttctatttttttatcttcttattgtgatgtatcatttggtatcagagcaacaattgagataggggtatgactcgaatggcgagtaaaatggaagtaattaaaggcttagtgggtacggtccaagaagatttgggtactgcgatagaagaattagaaaaattgtcttcattggaactaggaatatagaacttggaaaacgatttgatgatttattacgaagccaagaagaatgacgaaaagcgccaaggggggaagaaagaaaaagacattggcaactggaaaaacaatggcaacagataatagtgcacacatattaacgactaggcgactagtattatttgggggactgcccatgcatgttggggattcacacagcgaccacaatgggatttgacatacccaaatagcccctcgttgggacaccaaacctcatagaatcgaactctcttcgtttgattgcaaaaacccaaatggttggttgttgaaggctaaaagatgaagaatgtctagaaactgttgtaattagtttagatggggaagctttgatcggtttcaatgggagcatcatcgtaggtcatttatgacttgggaggatctcaagattcaactgattcagagattcagaccactacttgttgggttcatgtattgtgagtttcttactctcaagcaggaaggattagtccgtgagtatcttaagaaatttgaactccttgcctcatcgttagatggaatctcagagaaaataatagattctagttttactaattggctcaatccagatataggacacaaagtaaaagttttgggcccaagtgggcttgagaaagttatgaaattggcccaaacagtggaatccaagatgctggcccaacagaagtcttaagtctttcatgtgaacccttgggtcacaatttcttggagtcgcaactgaggttagtacaatttcaactgcaaatagttcactcctgttcaaaaaaaattagagatgaaggtcgaccccctgggtttggattctgatgactaacgaaatttgagattcaacaaagaggtctcggggactttttttttaaaatgtgatgagaaattctctcctggtcatccatgcaaaaaggtagagctataagtcattctcgtccaaaaaatctgtgatggtgagaaataagaagaagacttagaaggcttggctgaggtggctaaacaagaagatacaaggttggaaatcaagttgtggaggtttcccttcattcatttctaggtttgacagccccaaaaactttgatattaaagggccacgttggttctcagtcggtggtggttcttattgataatggggcaactcataattttatctcaaaagttctaatacaaactttgcagttgaatatcatagccacaactccctacggtgtcgtattgggtacagaataatcaactgagactcaaatatgtaagaggctgtcattcacaatgcaaggagtggaaataatcaaagattttattcccttagatctgggcaacattaatataatgttgggtatacagtgattggaaactttgggtgtgactcacataaactaggagactcactatatgaaattcttattcttgtgtccttaaactctatgatgcaaacaattaactgagagtgacatggattaatcattgaacttggggctgccaccattgaggaagagaacaatgaaatacatgctgaaattaaagaactattaaatgaggccaaaaaatatttgaaatgccaaagaaacttccaccattctgaggccatgaacattccatcgtcttacgagaaggcacatttccaataagtgttcatccataccggtatccaaaagcccaaaacaatgtcattaaacaactggtgaaggagatgttagctgcaggcatttctcaaatgcgtgtcagtccattttcaagtccgatgttattggttccaaagaaagatggtagttggaggttttgtgttgattattgggctttgaatcataaatttatgccagataaatattcaatactggttatagatgagcttttggatgagcttcatgggccaaatatttttacaaagctggatttgaaatctggctaccataagatttgtgttaaattggtggatcccaaaattgctttttgcacacatgatggacattacgagtttcttgtgatgccatttggtctcactaatgtcctagcaacactctagtctacaatgaataaggtttttcacccatatatttgttgtggtgtgttaaatcttttttatgatattctagtttacagctgcaatgtacatgtgacacaccttactatggtcttacaactccttagtaagcataaattttatgcaaaccttaagaagtgctctttta

SEQ ID NO: 381340 - DNA, 2327 bp, Cannabis indica
aatatttagagacaatacaagaaaccggatctcgatctggtacgcaaactcgcttaaacaggaccatcggtaaggaaaagtgggccttatcccaaaatctggcgaaggaaacccgcgaactgacgagggcccaggagcccaggtcttacacaaccactcttcttctcttctcgactcgaggtctttaaaaatcaaaataaaccaataaataaacaaaataaagcaacggaataaaaataaaaataaaaagaaaaataggagaagaggaaggaagattattttagattagactagtggagaagaggtaaggtataaaggaaggtgacatagccgacgctaccaaacgaagcaaatgcgacagacacttgtgaactggttggggtgctgggacccccaaactcccattcctcctcacttcttcttcttcttctcctcttcctagtcctaaccattaccattttaccaatatcccatttttcccatttcacccaaaacaaatttcataaacctcgctcaggaggagaggacccatgtctatggctgcagccgctgccactgctggagccttcaaggccaccacccccaccaacgagagcagtgccagtggtaacagcgcagacaacccaacggagaggaacacctactggtgccacgagtgcgatatgagtgtctctctctctccctcctctgactccgaacaaccccttctctgcccacaatgcttcggtgactttctcgagctcatggattcttcctctccacccaatcattcctttccacccccctttccgtcccttctcgaagacaactacctccaccgcctaatccatcacctaaccactcgttcttcctcctcagaagacttcgatgaagatgagtcctcctctgacccatctgcgcctctcccagcctcgaaatcttccattgacgcaatacccaccattagagtcgacgaatctcttctcaacgatgaccctcttttgctatgcgccgtctgcaaggaccagttcgagcttggcattgaggccaagaagcttccctgtaagcatctctaccatcctgaatgcattcttccctggctcgctcaccataattcctgccccgtttgtcggttccggttgccggcagagcaagccaatcgggactcttttggatcctcggaaggggttttgaggttagaggacttgatgacgggagatgaggactggtttgattacgctagtactttgaggtatattgctaggaggcatgatcttctgttttccgctggcaatggtggtagcggtggcgttcagggctcgttctcttcacacccgatttcggatgtggagacagagatcgagactgagatggaaacggtatccggctgtccaattgcgggtagagctcgtataaatggcgaagatggtggattgggtctaattggggaggtcagtgaggagatgctgccctttctgaagatttgaggtttgtgctgtctatttccttacatttcttttctgttggactaagttttccattcgttatagttgttttgaatgtaaaatgatatgttcctgagttttggtagtttcattgggcatattaaaacattagaaattcattatattttaagatttctgggctagctatagtgtagcaagacaaatcatttaatctaaatataaatggtaaagttggcgttctttaattttttcgttctcatttcaatgatccacccatataatgttgaaacttagaataagattcacaacaatcttaaagaccaaaaagagagttgatgctggatttagttttagtggagctagacaattgataaagtttgacttgttcgccaaaagtgcctttaatattcagatctattaagttgctagtgcttatgtcataatattattttgaatatgaaatttagatagttatgatctactaacctattgtttatatgcaagtgacctacagatatttgttactttccatgctttttttagttttgtgccttaattgtctttgtcaaactacttgaaattgggttttggaatcttgtttaatgtctcagttaggattattaaagaatagggtgaattagatcatggaaaaagtcttcaagaaaaacatttataagactgtgctttatcaaagaaattgatgtttatttcatttcctaggaatttaggtggcgtttggttggaggtaatgaaatggaatggaattgaaaggaaacaattttattccattcctttgtttggttgcattttcaagtattggaatagcattccaatggaatgctctttccaccattttggtggaatggctattccattttaaaa

SEQ ID NO: 381341 - DNA, 3378 bp, Cannabis indica
tacttttccacaaattgattggcctgtatataggctatggataaacatttctcccccaaagataatatggtcatcgatctttaagttcagcagcacttaatctgcaaatattaagcttgagaatgtaagcacatcaaaactaaatacaaatacattccccaatggctaagcaagaaccattcaagccaaataaagtataattataatttcttttgaaaaaaaaaacacttgagaagcagtgaactgtgaagtatgaagacatgaaacaagtaaaaacagaaagggagcagcaactgagaatgcagcaggcaaatgcttacatagaagaacaagcaagccattatggacggcctgggattaaacataaagaatgatcatgaatcatgaagctcagaaacagttcctttgaaacaacaaaagaaatagtgtttcataacttaaaacacattgatgaatttctgatagtaaaagagtccaaagcatcaaaatccatacatcagttttcactaagaaaaactgctaaggaaaaccgaaccaattcaaaataaaaaacccctgaaccttttgggtttagaaaaattacatttccttagcagcccatgtattattaatcaaacaaaatacaaggaagatttaatatatatatatatagactgatatgaaaagtcaaataaaaacttatgcattatgtttataaatcaacaaagatagtgttaaaaccaaatcacttcatcaatagcaaaaccaaaactttcgaaccaaagacaaataagaaaaaaaggagaaaatgaaagcgaaataaagttaaaaatgataggatagtaaaagttactttctcaaacttctcacaagaaaatactaaaaacaaccaaaatgataataagcacaagaaacaattaacaattcgaaacacaaacagagacaaaaataagcaagccagctgaaatatgtcataccaagtataagatggatagccggtgatagggccaccggttccctgaaccctaccgggagccagctgcccaaactgtgaatgtggataaacttgctgcaaggcctgcaatatctgaggcgtaggattagaaccgaacgaaccaagagcggagcttcctccacctatactaccaaacccattagacactccactgtacccaaccacaccagaaccggcctgaccctgacccacttgactcgtcggaactaaaccctgagtcaatgtcccggccatcattgccggattaacagtcccgggaatcattccagctgcgggattcacaaaataccccctaccataaattggattgaagccgggattgtgaccgaacattgccaaattttgagctgcagccattgccaacatcgggtgtggctgtgactgcggctgcggctgcatttgggcctgagcttgagattgagattgaggttgaggttgaggttgcaccgattgatttttgtttttcccctcagtagccttctggcaatgtaattgatgcccattgaacatcttgtgcggctcctgaagcgcctttctgagcccctcgggagtcttatacacaaacaaagcaaaacccctcgatttcccagtctgcgtatcgaacccaatggggcctgtttcaatttccccaaatttacaaaagaaagccctcagcttctccgggtcggtttccgatggcacgttgctaacgtatatcttccgaggcgccggtgtggatatcacgccctgggccggaggaccgccagaaacaaggcccacagaggcaagctggcacgaagcgatcctgttcatgatcctcttctggggattcttcagggccttaatagcggctcgccgcttcttgtacagaacgaagccgtaacccttggctttcccggtgttcttatccaaaaccacgttgcactcctcaatacagccgaaaggttcgaaaatggcggttagggtttcgcgagtggtgtcccagctgagaccgtgaacaaagatctttcggtgggagacgtcgcggtcggcaatgtcttggactcgattcaagaaggctgcatccttgagggaggcgtcgcagatgaggtcaatcaactggtctctggagtaaggttcgaggagactagagagtttttcggagttggactcgtccgagtcaacttcttcgttaaagtcctcttcttggaatttttgctcggcgtgtttgatggtgactttaggtgtggcctggttcttggttttgagcttcttcttcgtgcctttctctgatttttttattagtgtcctctttcttgtttttccagtaggcgccatggaagagggtttagctttaggttttggtcggaaaacataatagtgatggaagtctcaaaggtttgtaaaaaatattaacttaattaaactcatttataactaatataaatgtaaaatgtaatactaactaaacatctgtctgggtggtgtagttggttatcacgctagtctcacacactagaggtccccggttcgaacccgggctcagacatttttaaccttttctgtttttcacatttttgcaaaatttagaacccaaacaaaacccatttaatacttttgtatttccttattataaaaagaaaagatacaagagttgacaaatgaaatacatatcaaatttttaaagcaaaataaagaaatacatatcaaattaaaaggaaattacatattaaagaatagtacaaacggaagaagaagagggttgttgttgttgaggaggagagttagtgttgagattgattccaggccattgacggcagaggcagcgctggtgttgtgggattcggtcgtacagggatcgggcattgctcttcgtaacacattcttctttctttccttttcttttccttctgtttttttattttttatctgtagtttcatagatttatatagcgtgtgcatcagcctaaattcagcaaaattgtttaatggcaaactattttgactggtcaattaagtctgagactttatttacatattttattcctaatctaaaatgatgtacacaacacaagatattatatcaaactaatatgttagcatttgttttatacatgcacatatttgtactcattcttaattattatattatttctttcaaaaaaaaattattatattattaacaataatttttttctgtttcaataaaaaaataatctaataataataataataataataataataatgcttaacaatatttttaattcagcagccaaaccttccttgtgaccagagccaacccgggtagcgagctaagcctacgcctcgagctcccaaacgtccaaactcaaaattgtaaaaaaaaaaaaaaattattagtagatagataaaatattacataataaaatattatagtaaatatt

SEQ ID NO: 381342 - DNA, 1522 bp, Cannabis indica
gagcattgttattagataccagtggtatttaacatgttgccttataattaattggcaatcctccttaaaagttattacatcaaattatatagaatccaataattaattaaactaacagtgacattgaaaaatgctaaacaccaatctcacttttagcatttctcatatataaattacctttcctcacactaactctctaacaatagctaactaatttaatatagatgatgtgaatatgcatgtataatattttataaaaaagagaaaaattgttataataaataataataacagagaataacatatcatctaataaaatgcagggagttggaataaacacattcaatccaaaccaaaagctataccctcttgttagtgggacagatatagctcagaacgcagaaagcaaagatcaagcaaggtacgtacgtaacaacacactcttcattaatatataactatgttatatatatgaatgtacatatatattaaacttaagtgataatattaaacaacaggttctgtttcgatggtactttagacgccaggaaagcaaaaggaaaacttgttttgtgctcgcttgcaaattggggcactgattctgtggtaaaaggaattggaggggtcggtattatattggaaaatgaacaatttctcgatgctgcccaaattttcatggctccagggaccctagtgaactccaccgttggtcaaacaatcgacaattatattcattcgactaagtacgtatacgtactctgataaaattgatttgtgagtaatcaattactgtttataatttaccaactcaaataactgagtggggcattttgtttaacacattacagagcaccatcggcagtgatacacaagaccaccgaagtaaaaatccgtgctccgtttattgcgtcgttttcatctcggggtccaaatcaagcatctaagcgcgtactcaaggtctatatatgtattcaaataattgcataataattaattggaatgagtatagtgtttgaatcttacaaagtcataaatatatatatacagcctgatattgcagcaccagggattgacatattggcatcgtacactccattaaagtcgcttactgggttgaaaggcgacacacaattctcaaaattcaccctcatgtccggtacttccatggcctgtccacacgtggccggcgtagccgcctacgttaaatcattccacccgcattggtctcctgctgccattcgatctgctattatcacttctggtatataaattatatatatatatatcatcttataattatatacctaccttatttatatgttatttcactatttcagtaatgtagtagtatacatcatcttactttaaagtgaacagtattattatttttagaagtgtcatgcataacatattggtgaattttaatgttagattttatacattttgatctataacaaaataatacccctaactaattataaaaggttaattagtaattttttcctccgaactttgacatgta

SEQ ID NO: 381343 - DNA, 7598 bp, Cannabis indica
acgtctttttaatttttgctgagaaagtcgtatttttgtaattttgaaaaattagcttcgtaaaactataaataaaaaatttaggtagtaaaactgtaaataaaacataaaaaaatatagattaaaaaaaagaaatccatagagagcaaggataaatatccattacaagactgccaacactgttttaatatattctaattacagaaacatgtcaggtaaacaaagtaacggccactaaaaaatatcccatttgacatttatcaacatataatactacatcttcggtaaatcgttgataaaaaataaaaaagaaatttagagaaattcttttgtacaacaattgttgacactatactgctgctggacacaatgtagagcatttaacattcccgcctaaaagttacttttaagttttaagtgacttattttaaaaagtgatttatatgcaaaactcttctaatgaaaataagtgtctcaaagaaagacctttgataagaacaacaaaagacaccgtttcaagttacttttaacaaaattttaatatttcctaaaatttgtttctaaacttttcatttcatactcattcgaatcaaagaaatatttttgtaattatcaaaaaatagactatccatatattaacccaaaaagaaactaaaatcatatacttctctacttcaactgtgtaaaggataatatacatacatttaaaaaaaaaaataccaaatcataatgtaaaatcttaccggctgcaactttttcactatcaggtgctggtcgaacaccctgttaggccatccaaatagaataaaacataaataagacttaggggagactaatagcaaattaatctgataaccagcttgagatatgtatcatgctaattggggagagagatactacaattctgtctaccaacagaaaaaactacctgatcagacacaatcccgtttgcttgtctggcaagaattgctcgagatttcagagttctttcagatgccggtgccttatcaggttccacaccatcctgattgatgaaaaatgcatgaagaggtagaaaaactctaaaaaactgtacatgcaaacacaaattgctcataactactatgaatacgggatgcatataccttcggcctaccaacaggcagtgttacccgagaggacttgacttgttgtgaggcaacctcaacggccttactcccaccaataaagtttggatgtgaagtatttatgtagtccatctgcaaattagttactaatagcatcaacagccaaatttttagcggtatggatgagaatggaatgcataaattttctaaaagccgtacaacatcaaacagcattaatatcaaaactttaagagtatctaggggatagcatcagatcccttacaaagaaggttgactaatatcacaaatgtaactcttttaatactataattgtgaagctaataacccataagaaaaactgaaagaagatcataacaaactaattgcaaaacgaacacacaattcaatcataacaaaaaggtcaggtcaagccaaagactgtacaaaacataaggaaagccatataaactaattgacactattcactaaaacatttgcagtagattttaaatataatattctcaaaatcccatacttatacaggtgaaaaatttattgcagtcacaaaaacaggtttttttcactaaaaacaacaaagttttaagttactagaaaccaataactaagatactatagcagctgcaactataaagatggactatgacaaaggtcttgcagtatggtagacataatacaagcaacccataataaaaatgaaagatgaccaatcctgtctgaaatagtaggagttagtaaatgatacaattgccattagaaggccaacaaggattatattttaccttcccttttaaaaagaatccaaatttaatgcttaatttatatatatatgtaccattagcatgcacccaacaggcatgcagtcaaacaattcaaaatatgtttatgtcgcataaaactaataaaaacatacctccatctcaattatgtgtccaatcattgactctgaaggctctaggccttctcgcaaaaagttacctataacttcatccatgtgctttctcaaaatagggaatcgttgcaactcatttactaagcaacgatgactaatctggaaaaaagattgttagttgagagtcaaaccaaagatgtacagaagtacagactacagagacatttgggtgggagtagataaccttcatcaactcatcaaatatgaacctggcacactgaaggcttggatctaataaacgagcaatttgcctcctaatgagtacttcaaaaggaacctagaagaaggcaacattaacaaaattttcaaaacccgactaatatcttaatttagaggaaggcaaagaaaataaaagagattttaaattactaaagaagtacaaacagaagagggacaaaaagaagacatacttctggtacaaacaatgcagatttggggccagttgcattttgaatggcagtccgaatgtcatcatcagtcaaatcctcacatggatccacctcctgcaaaaaagggcaaatcatgtcaagaaaatttgtcatttgcacatcagttttatacacccaacaaattaaaaaccagaatcctagagttgttttgttctgtaaagcacatgtattataagcaaaggtaactaggtcctagcattagttattctgctgaaagcccacaaatgaaagctccatgttggaacctctgattacgtttaaaagttgtttaaataatatctagtaaaataaatactgtatacaaaaaattgttctagaaaccctgtatgatgaactgcaccatacaataatggaaataaaatccaatagaatgcaatcaattcaacaaacagtataattgtgcaggaattgtagagtatactaacctctaaacttctaacaaatattgactgaaaaatataatgaattcttgctccacctgacagctcagatgttgacatttcctcatttttaccttccaccattgaagaaaatgctgtagtcaacaggaaagaatgagacatcattcatgaacttaagacggagagcagacaatacagagtcgtgaataagatacaggactcattaggcagctaaaagtaagaataagtaattaaagtcaacctaccttcagaatactttgaaagaatgttcaggagaagagctccctgaccagcctatcaacaacaataaactgataagtgcaatataaagcaaataatcaaatctcttttcagcctatcaacaacaatacagagataaataaaatataagcaaataattacatctctttagattagttaaataataaaaactttaaacaaaaaaaaattccaacttgtagaagtagaagacaaaaatgaaaacaagcaagtaaagcaacaaaaactgaagctactacaaccacataataccaaatcaagacacagcaccctaaatcacagaggtaaaactgaatatggtggatcatgcaaagatctcaacgacatactctagattctgtgatttctccatagctggcatgttctttggcaactgcaaccagcgcagagctgatgcgtgacttgagttcagggagtactttcttaatatgttgcactaggatctgcaaacaaattatgaagctagtttagagtatgagaatggtatcggcaaaggaactaaaaaatctagaaaataaggctggttcatgattatgaaaataagttatcaatcaaggtcatgcttataattaaatataaataatggaattgttttgttaatataaactcctgaaacaacagcagcggcaggccatatatgctactaataatttagttgttccacaagacttaacaatgactagcagctgccacgatcttctacctggttcaacttctttgctaactgagggacaccacaacgatcagctagaccattatatacctgcataagagcgatataaaataccatatgtgagacttttcaaaatatttatgcaaagacattatcataatttcagaaaattataggtataaccatacaggacggctgcggaaaaacttttcttcagctacaagtgcatccttaatactcctgttaagcaaaatatcctgttttaaaaagtaaatttaagaactcaattcaaatcttaacaacttaatagctactaatataatagcaactttgcaattaataagtagcaagatacattaataaaatgtatgggattcaaaacctcagagagaaaggaagaaagatcagcaaaagtcttcctaacaataaaaaaaatcgaactcttttttgttccgatttccaatgaagataaagattacctcctgactgcgattcacaacccctacataaccaagttttaggggtatcacttttcccagcaacagattcctggcatcagtacctctgtccatgatgtccaactgtcatcaaaaaggaaagaaaaaaagaaagtcagaacctttatagtttccaaacattaagagcacattacaatttgaaaaggaaatacgtgaaaacacacacctttgtgattactcctatggttctcaaacctgccaaaagaaaaaggaaaataataataataatgagatagctatcatcaaatatccatctacaattctgtcatttaaatcaacacttaccatcagggtcagccattccagcaacctgaagagcatctgaatttgccaaatctgaatttgcaggtgtcacagctaaaattaaacaggtatcaattttgatataagacataatcattgttctgattcgtgcttcaatgtcagtcggctggtcaccaacaggaacctttgttataccaggcagatccaccagtgtaatatcaagaacattcggcgaaaatattttcaggcgaatctgtttgtctgatacacctttgtttcctcctgcttccctatctgtctcagcctgtacccaaaaattcatgttcatacatgaagaaaaaaaaaggtaagccaaccattgagacacttatattatgatgacaataagatcactaaaccgttgtataaatcagaaagtcactcagatagaaatcaaagaccaggaatgctgaagttggtagcactgtagttttactttgataaaagatgagggtttgactgattgccgaatcaaagaagtaaaagtttcatctttttcctcagctttttcttctttctctccaaatttacaagctaaggaagttattacttataaaatacttccagtttcagggtattgatatcccacagttacacttcaactttatggataatcatttctatataaattataaggaacatttcaaagtttaataccaaggccatcaacaggccatgacaaagcaaattttcaaaagcaaattacttgaaaaaattacaataaatgaatccttgcattgtgaacgacttatcaaatgaccagcagtttgttacaataggtgttatttgttagaagcttttttttttaaggtaagcatatcgtttttagtagtgattattattatagacaaatatggtcgtaaaattcaataaaaaatggtagatgagaaacaaagcatatatataaataatatatatacattaaaattctatagaagggcaccattttttgtaagcaggtttgaaaattcagttacacgtatgtctgtttgttttttttcttcctcattcgcagagacgcccagaaaagtgacaccctactgccgttgcacttataaataaataaaaagcttgactaggctatggttgttcgacatatcaaacaaaacatttatcaatgaatatgtaaataaactatgcaaatgaaactctacttgaatatgtaatgaagtactagtacaaatgtcaaatgcagattaagtaactatcacgatgacattatctttaatccccaaagaacatgtctttccatcagagaaactctaaaaacatttctacacaagaataaacactgcttaagaaaaaaaaaaaaaacgatttcaaacctgaatttccctccgaatttcagagaaatcgtgaaaacgtctcccaggcaagtgaaggaactccccatactcgtcatcggttccatcagcattcttctttgtctgcagaagctgaagcacgagaggtcggcgcgtacatatatcagaccccctgggaagaaagtcccggccaacaagagcctcgagaacgctcgactttccactactttggcttccgacaacagcaacctgggggagctggatgctggattggctcccaagctgagcgaagatatcctgaagcttgttcactatagggatcacggagtttcctaaaggcgacgacgacggctgatgcgatgtcgcggcttcgtccgccatggatggatcacagagaagctccttagggtttttgaatcgtagggagaaaaactaggagagagagaagaggtgagttttggggttcaattgatcgaatgagatgacggacttaggtgcgcagaatggttaaagtacgaaccggagctgaggaaaaaagaaaaagcttatttgcacccaaaaaaatttataaatgcgctcattgtatctttaattatattaattttttatttcaatacatattttttaaataaatgatttttttttttttttgtaaagcaaaatactcagcaaacaaaagaactacaaatggtcaggcttctctacatttaaaaaggcagcagcaagagggtaatacctaaaaagaattacatctttgagtaataacccacttagctaaagagtgagcaaccttattacaatctctattaacaaactttataccaacacacccatgtaaaagattagtagagaaaatttccaacaaaggcacccccaatctgcccaaggaactctgtctgacagcaactgattaatagcagtttggctatcaaagttaacaaaaaaaggtctagaattcattcgctgaaccagattcaatcctaatctgatagccaaacactcagccagcataactgaaacacaggcggtctaaaagcaagctttagcagctatcaaacgacccgtatcattcctgataacagcagccattccacttcccttttgattgttacacagcacagcatcacagttcaacaaataggtgccagtcggaggagcctgccatcttctaatccctttatctttcttcactgctctactctcattagacttttccagagcatggtcaatgtaatcaagagcccacggagtccagctcttcaaaggagtaattttattttggaaaattcgattattcctttgattctaaaccagccaactcaaacccaaaaaggattcaaactcctgtttagtgcatttttccctcatgaacattagaaagtccagcagatccgtcatcaaaccaaggccttcaggaaagaggtgccagaaccctactgctttccacacagttttcaaccgagggcagttccataaggcgtgaccaatagtctcaacttggctctaactgttggaatttattttaccaggatcttagatctactcacaaggatgttgtttaacatcctaaatat

SEQ ID NO: 381344 - DNA, 1294 bp, Cannabis indica
tatataatagattaattacaaccaatcaatcatattcatgtgatgatgacttgtttctttattttagttcttatattaagtctacattattagtattgacaaggcacgatttcaactatgtgtctttatatttgtaacataaaaagatcttaaaagtattttataatctttattaatactctaaatcattgttaatgcttaattaggtatgtacggattctaaattatgtttttaaatacactaaagtcgaagattggctagcatcatttgctctttatggtaagcacctggcataaatctaaagcttgcttgtgggggaagaatttatttgtaacaaattaaatcttctctctctatatttttattatatattcttacatatatataaattaactatatatatgtatatactgtaaagattgactcaccaaacttactaatattttcggtgtgcgtcccagtaaacaaacatttaaatttccgttatgtctgatgtgggcaattagctacaactaaacttgattatgtgggctttattataatgtgaacgtacgtgcatggtattttctgttcggagatcatttaaattatatatataaacacaagagttgtatacttatttgtggacaaggtatagtcaatgcatgtgagtgtggcagatatcaagtgtggtgtgtatacattatacatctcagattaaaaaatgtattgtatatcatgtatatataaatacgtattatattgagtttgcatgcatgtattatgtatatatatcgatatcgtactggtattagtaatagtatatatacgtttaaactattaaacttatctctttctggatacatatttaaaaacagtgtacatatataaaaaaaaaaatttaattaaatacaatcttatcttatgggtcatgatgttggactttcgatttttagcttgttattcctttttttttcttcttttttattttattattttattaataatacaatttattacattaaaaaagttttaccaatcatttatctagactttgttttacaattactacaaaaattttacttttaatctcaacaaaacttgtgactaaaagtaaaaagttacaactaattattaattatcattattatattgtgactaaaagtattagtcacgaaaaattacaatttgttgtatgtgactataaatgtgtttttagttcacaatatttattgtaactaaaactaaaattgaatgatcttatcaatacaagcggaagaaaactaagcttgcaaaagatgcaaggcttagagg

SEQ ID NO: 381345 - DNA, 2378 bp, Cannabis indica
tttttttttgtaagattggctagttttcttttgaatatagctgtgatggcaatatgtaggtgtagagcgtagtgtaggtttgtactcaaatgaacgattatgaaaaagttcaacatgaaattgaatattcaattaattttatgcaggtcggtgccttcataaaagcatgccaagaacaaattgacgttttaaaaaacagcattaatgatgaagaaacaacttcaaagggctggcttggcattcagaccaataaatctaatgctgatactgtagcacacaaacatggggtggtaagattcagtttgcattctatagatcgttcatgtctatagtgttcttaattgcagaaatcattcacttcactttagtagtgatgtcgcgattataataggattttctcacattttatatggtatcttactcgaccgtatttagaaaccacatatatgaatattgtaatttggtcaatcattattttctaaacctaatttcataatttcagattttgagtttgagtgagaagcttcactctgttacctcacagtttgatcagctaagagccatacgcttccaagaagccattagtagagcaaccccaagaagaaaatttaaaccaattgccaaaccaagttctgaaaatttatctcaatcaaacaattttgagcctagagaagctgaacaatttcaacctgagcctctaagacttaagcaacagctcttggacgacgaaacacgtgctcttcaggtaatcattgtgatgaccaaccaaccagtggtgtttatttcagtgcttcatcatgtctgccttgtgttgttcaaatctcagtttttaacgttcccttaaaaattgaagcttttgttactgatttgcaggtagagctgagtagcctcctagatgcggttcaagaaacagaaactaagatggtcgaaatgtcagcattgaatcatctcatggctactcatgttttgcaacaagccaaacaaatagaacaactatacgatcaggtaagagatgtttattcaatatatatccttttagttttttgaaaaatacaacaacttctacttcaaatttttgcctggaggttcacgataccataaacttagtccataggctgcccatgtgttgcaccgttgtgaatgttggttgattttacaatatttgaggaacaaaaagctataacaattgctacatagataccataatgcttaattatacaactcatgataaaacttttagatgggcagtgttaatttatatcataatgctttcgaaatttcatactactttctcttgcgtggacaggcggttgaagctacgcacaatgtggagcttggtaacaaagaactgtctcaagctatccagaggaatagcagcagtaggaccttccttatacttttcctatttgtacttactttttcaattttgtttcttgattggtatagttagtcttcttcaatcaactaaaaattatagttttctttgtacttattatattgaaaaggaaaaaaggaataggaaatgggaatatagtcctgaagtttttgagttaaaattttatactgaattttatatgctgatcaagtgaacaaattgaactctaaatgccatgccaatgtcataaataatgctcacattttgtaattagtgttgtcaacagaaaaccaacacttgagtttatgtatacaatcataaattaaaagcatatgactctcgttaaagttcacgatccttaatgtcgtgacaatagaatccaacccaaaagatgttatccaaactaaggaattaaaaatcgatattttccacctatatttccatgatgttatctttttgaagctatatatttttgggtagataccgttttgaatcttaacttgcattttgtaaaaattactgattagattatttgttttattaaataataaattaaatattgtatttttcaaaatgatataatctaaaagtgttatgataaaattatttatattttttacaactgttcgtactgaaaattgttttctagttagttatattataaaaaaaatattaaagattaagctcaggtcacagtattcattttgttatttaacaaaataaagagttcgatcggtatcttttataaaatacaagatataaagttgtattaattaaactctaaaattagaaatatttctccaaaaaatcaatattccccatgcatatattatttatgattattttctaaagactttcagtactttcaaaatatacatgaatattctttatttataaaaaaataaaaacaaaaagtaacatgtttaatgaagtgataggtgcaggaaaataagatcgtttttttttttgaaagaaacgttcatttaaatagatttcagacctc

SEQ ID NO: 381346 - DNA, 761 bp, Cannabis indica
agtatagccgacgattttaaattgtcagctatactaaatcccattgtttaaaactgacgagtttaaataatatttatttgaaaaatttaaacacgtgtctctttaaaactaacggcaatacttaacgaccctttataaccgatgggtatagttatttaatatcgtcagttttaaatactcataaatttttaatagcgtcgattttaaaaaaattacaatttttaaattagcagaaattgtattttttatagtagtgagtcttctacataatagaatatataagagtttttctctatgaattttaaccattgttgaattttgctctctaaattctttttggtattgttgcaaaaattttccaaaaattataaagctcactgcaaacactctgtttgactctttcagttacattctcctcattttttaatataatttgtttatgtggtcataagtcacaatataattacagtacaagtatatttaacaactttaaactatctaaaattcaatgtattgacattaattaacatacttaaacaaaacaatgcatgtacatattctcacaatttattattagactacttattatatatttattttttgtctggactcctgaactatatcagattagcgtctggttactgttacattaacaaaaaaattttaaaagaaatgagcatattggagaatattatcctacatggattaaatataaaagtattgagtcatatataagaacatgggctactccactcattgcc

SEQ ID NO: 381347 - DNA, 2171 bp, Cannabis indica
ttggtaattttagtccccttttgtttttgagtaattgtttgctcttaaattaaataaaatctgataaatgtgataacttccttcagaacttaccttcagcttctctttaagaaaatctgcttcactaagaacatcacgaggctccccctccaaacgcttaagacaagcctcatatgcttcaacgtccctatttacatcttcaatttccttatcaagttgatcagacaataccctcatgcactcgagacataagggttgctcaatctggagatattaatagaagcatagatattaaaattccttattgtccaaaatcaagttgaacaaccacacctgtgagtatttaaaacaaaaacagcaacaacaggatcagtatacacatacctgtgtctgattggtggcaatttcaaatgcacgtttcaagacagttatagtggaatcaaaaccaaagttgtttgattgtgaagaacaattggatcctccgccaggtgcaggcatatggtttccacctgcatcggtcgaggactcagatttatacacaaccacaaaggattcatccattgcttttcctgggtggcctatgtccgactggacagctccaccacgagggcgcggagggactcctggaggctgagttctttgcggtagtacaacaaaagaatgatccattcgtgttgaagataacacactactggcgccgtgcattgatgagccctgcatacctacaagagttaattgtcaaactcagtgactctctgagcaacaaaacaatcaatataatcaatatataatcccttcagcataagattaccacattttaacttgtcagatactcctacactgaaatatcaattaagcctacataaaattacaagttcaaatgttcttaatatatatggtcaattattttatttccaaacagaattcattccatttagttcaaaggccattaagtaggtaagaattgaacacccataacacacacagccaacaaagttgctttacttcaacccaaaactattcaaatcgctagcatattcacgaattaaagcaaaaccttaaagtaaatgaaaaaaaatactgtaaattgagttcaacaagttcgaattccttaacttagttatggctaatgctgaatataacgaatttgtggttggaaacaagaaaaagattaaaaggggctttagggttagaaaaatcctgaccagaacgagatgaggattcgttaaggaacttttcggaatggggatcaactccgacgatgtagagaggattgcgacagttctggcaagcccatcgtggaacactcggatccaccgggaagctccgacccttttcagtcatcgcctctttcaccgtttccaataaattcaacaaatcacacacaaccaaaccaaatttcccttctctttataatgattcaataaatttcaatcagtttatctaagagattttcccggcaaaaaaatcgtgtaagctgggtaaaattaatcatctgaatatttgttgcagtgttgcactcaatttagtttgtttatttatttaacactcatcattttttcaatctaaacaaagaagaagataacttatcaaattttattttatcaaaaaaaaaaattattatttaattaaaaaattgcaaataaaattattttttagaacttcattaaattaagggtgtgatttcttaattatatttaattagaaaagttgaagtattttctaaaaatatgttgtaatattaaattttttatatataaaaattgagaatcaaaatttaaaaatttaaaaaaaaaatcacttttaaaatttatttaagtaatttttttaattataatttatttatatattttttattattaatattttagaatcaaaccccgactcaaaccttaaatttggatctcgtactcgtacctaacctcatacttagacttgaactccggataccaagatcccagagacccaaagacgtagaccctaaaaccccgacctcgagcctggacctaaactccaaacctgaatcccgaaccccgacctagatggatccgaacccagacctaaacctagacccgtaaaaaacagttataaaacacattttttatttttgaatgtaaaatttaaaaaataaaagtagttatagaataaacttttattttttgcttttaaaa

SEQ ID NO: 381348 - DNA, 917 bp, Cannabis indica
agagagagagagagctcaaaccaagtatttctccaatagaatgttgtggctatgatataaagaaagaggatattaatcgattgggagtgggagggagattttggtttgtaaaatttcaaaataatagtgtgaggaagtgtggagaatgatggttaaggtcacacattaacctatgtttaagaatgaagaatcgttttccctaaaaaagtgaagaatcgttaacgtgggctttaggaataacatagaagaaagaaaaataaatggggatgaagaaaaaattacagtaatttatgagttttgacgaagaataaagtatcattaacagaaaggttagtctctattaaagttaacagaaaaaataataaaatattgttaaaccaacaaataccgtttcatagtcacttttaatgtataaagatatctacaaacttttaactgtaactatattaatatataatttttagggaactattatttattttaaggaagtacgaaaaaaaaaatgtactaaatatatatatatttgatattcaaacattgagtggacttttcgggtttgggttcaagttttttggatttgagttttggaatcttggaatcgaactcactttttggagactggattttttgagtttcgggtacgggtggatctggttcgagttggaacgggttttgatggtttgggttgggctaagcttttttttacatcactttttcaacaaaaaaaattacaaaataataccattatacaatacattattatcatatacatatacaaatgcaacacaatgtcatacacaataatacaatatattattataaccataaccaatagtctattttactacaaatacattaattacacacaatttgattttttttttactttttccaaaaaaatacttataatatatata

SEQ ID NO: 381349 - DNA, 5845 bp, Cannabis indica
tttgataatttatgcattaacaacttagatgtcagtaaagacagcagttccttttgcttgggctttttcctcttcagaacttggacataagcattcagtccaagccactcaacttcacagtttttcagatgtagaaccggccggaggttagagccaaggcgcccacccctggaatgcatccttctctttatcagagaactcgtatacctatagaataaacaacatagttgctcaacaatagcacaagaacaaaacaagaaaagttattatactttcgacttcaaattttaaggaattgatatgcctaataagaaatccagccaatgtgtatataattagtccagacttcgtttaaacctcatgaagaaagataataaaattgtcagaggtgagggtggtggtataataaggtgagatgcatacctgaatgatttcttaataattttccaatagaaggcagtgcgaaatctacagatgtatgataagtcacagaagtagcagtgaaacttcattgcacagaccaaaaatgcttgaaatatatttaatctgacaacacccgcagagttgattttggaatcatagaataatggatgacatttcggcctcatatagctgcacaacttcgattctaaacgtgaaccaggtttgtcatgccaagagacagtcaggcttgaactcaaatggtttttcaaatgcctgaaagttttgatgaaatgagttactccagtgacaaacttgtgacgcagaaaacacagggaattatcataagaaatctttcttccctaagatagtaagatgagtgtgccttaagtacaatgacaatgttttctttgcaagcaacacagtaataaatttcttacctaaaataaccatatttaataagtattatgcttactattcttctttaaatggagcttgcagtagaagtcttaactaaactcaaagatcaataagtaatcaagtaataattgtggtagcacaagctctccttgtcacatgataaattaggattattattatggtaaaccatgacttaagggaaaaaagtatatagctgtatacagaaatttagtaacctggtgtagtctgcttggacttctaatgtgcaacaattgataagcaagccactccaacgtatgaatgagacaccatcttcaccaatacacagcctgtttgatggaagcttagatatgtggccaacatcaaaattaacagaaaatttatccgcattcatgtagcagttataatcctgaaatcctcttgataaccttgagaagaagccttcagcctgctgttttgaggtcgatacgaaaaggaagtcatcaatgaatctaagtagcatataacttgtgtttgatgtgtggatctgagcaccagaagcataagaaaagttatattgttctgatccatcttgaatagcagtttgacttatcctttcaagaaatggaaagatgaccttcctgtccatgtctccatagtataatgagcaaagtaaagtagataggacacttccttgagaaatacctacacgttgcaaataaaactttttatccaactgcagcacattgcgctttatatgctcatttaaatcaaataagagctcattcttcgtcacagtcttgctgcactcctgtgagaagaaataaaaaatcaaataaaatgagctttccaggactagaaaataacttcaaaactacagagtttgaatatcaaaaaacaaggaatgagaatttcaagtaagtttacagcaatacaaataaatttatgaagcatccatagaattctctccactttatttcaagatccaagcagaaccttgcaagagtgtattcacttttgatacactcaattagatatcaaactgtgtggatgagaagttaggaataatgcaaaggattgtattattgaaacatagaaataagaaacatttatttcgttctctccaagggcaaagctcaaaacagaacacattcctacataaccccctgacagcataacctaaaggaataataagacctggactttttccttaatacacgtctagaaatatttgagattggtaaaatctgatgtatatttccttgagtgaaatgatacattatatagcctttgcaagaagagtctaactaaatacaaagatatacagatttaattcaattcctaaataagagtgtaaatactaaatactaaggacagctatgaccaattcaggtaagctgtgatttcctttctatcaataacaaaataaattaaaattacctgattaacaagaacactattagttgcttggaatgggataagagatgttgcacttgatttgatattttgatccagtaatatataatggtcttgaacccacaaggaactctttgtacagcgaacttcacaagactgtttaactgtatatttctcatccctgatgacatcttttattacagaaagcagcatcttctgttcgacagaatcaaaggcttttgctacatctgaaacaataatatagacaccaggagtgtttgatgatccatttttcagctgaatcagaaacggacataaccttctatagacatcattgtaatcaaacacagatgatcctaacctctcaggctctttcaactggatacctttcagaacagaatgtgtatcgcgaagaatagaattaacagacttgaaattgtgaaaactaattgtcttttgaaccaactgctttttaccaattctggaagatttatttttccaataagactcttgcagtggcattcttgacggtgcttttagatttgcaagcaaccttattctattttctttgggaagaaatctaagctttgagaaaccaaatcttctacgcattacaatatctctagttgttgcattatccaagccaacatagctctgatctttcaaacaattagtggccatctttttcaccttctcccaaactgacttcttgtagtaaaacacatcatgtttcccacattcactttcagtgacatagaaattagcttgcaacaacggcacaactacatatgaaaagaaccaataaatccaattttctagaagtctttttctaatcctgtaagtagcttcattcaattcaccggatctactagtctttaaaatttggccctcttcatgtcgtagcacctgattactcaaaaggcataaagaatgatcactgaaaaaataaggaaaagctgacgttttcagtttatgcatacattgtttaagagaaaatctttcaaatttccgaagctgaataaacttcgatatgtttctccttaatattctccaattagttggagttcctagcaattcaggaggtatgatactcctacaagcagcccatacaaatgaaaccacctgacttttcaggcaataagatttaattgcattggaatctttggcttgcagagaatttttgctctgatcatgagatttcttcagtatcttgttcttatactcactctcctgaaacaaaaagtcataattacgttttttcccctcttggggcagagcagtggcaattaaataataagaactaaatcaagagcaaaatattttccacgtgatgagattcttgccatctgcaaggatacaccttttttttttctttttctataacacaaaatttaacactttaatctaatcaaaagaataaaaagtggtaatggaagaaaatagttatcgggtcccttgtatcttgtatcagtaatggaagaaaatagttatcagggcctctaacaaaatcatgtgcctctaaccttaaatgagacttcagaactctctatctcattatgatcatatgctgaatcaacacaatgcttattcaataaattcaagtgctggcaattctgagctctgcgaatgagaatcttgagcaacttcattagtgagtgatacctggaaattagagacgaacaaaatgagaactataacagcggggagaaaaaactcatccttttatgatccaaagaaaataaaaagggaaaagagccagaatcaagatatacagatcctgataacatcctgtcgagcagcaagcctcaattaccccataatagaaatcaagaagaatgcttatgattagtgaacagaacaaaaaaaagcaactaagtagcagatatctttaataaccagccaaaaggtagaatatgctacaataaaatcattacaggtaaaatgcatgattaagttgagatccaaagtattctatgcttacaggcatacagaagcagcatctgagggagaagaaccaatattttgatagcagggttctctgttagagtcagccattataccagataagccaaagatactctcaagaaggaggactgaatcagaagtgttaggtttcaaagaatttagcacatctgataacattaaggcaacacaagcttaaaaacccatgaaaagaagaagaaccgtcttcaatattgtaaaactctataagccccaagtagtcgttaggaaagacaaatatggacgagtatacaactgcctgatctttaaagactcgccatcaacaagttcataaaaaccaaaaaatattaaagactatattggtgcagataaaacagtcgaaatacatatgggaaatgagcatacatgctgtatttacatgagcacaaaaggatacgtttccttgggaaaacagatgaggaggtttccgaattatagaataggagctttctatctatttgagcctctttggtggttttctttggaacttctctcaccatataacagcatttccacaaattctgccagagaataatgtgaggcagaaaaatgatcctaagaaacatgatgcaatataatggaaccctttttttgttagaatgttttactgacaatctcaaataatatgatcagggaatccagttactaactttggaatgaaactttgacaactacggaacactccaatgattttcaaaaaaatagtagcaatgtttgacaatacaagcaagtattcaatgatgcaaacataaaacatgtttagatgattatctgggagagtgtaattatagaaggaaaccaaaagaaaaaaaaaaaaagacaagtaaaaccctgaagtagcaatacgcttttatgaattggcaaactccaacacaagaattggcattcggaactaattagagtaaactgtctatcaaacaaatagaatagaccataaaaattaacagttaacaaatctgtagatcgtcaagaagttaaaaatgaacacagatagatagaaatgtctgcactccatcaaatgaaacaccttttcatggtaggagcaagcactgtagtctgagtcacatttttcaggaagcctatgtttatgctccataacttctgtacaaggagctatagctgttccttgaaattgtttgcgttttctactacgctgccaacgaaatggtcttgaacgctttcctaatagttctagactctgatttgagtattgttggacagactggctggaattatctccaccatttaccattgaatcaaatttcatttccatagccgcttcagatgaactcatttggctatgtttttccgcatcattacttctctttttatagaaacaaacacaggtataagagcttaaaagtccatcactacttgacgtagtaaattgtccctgattctttgacaatggaatgacatcatcttctccttttatcttctttttggggcctgagatattatttgttgcgttattatactttacaagcgataacagaccatacaaatgtagacagaaatcttaggtatttgagccaatcatagtaaaacaacaaacattgcaatttccaaacatagaatcataatatcaataacagtaacagtaatcaca

SEQ ID NO: 381350 - DNA, 3619 bp, Cannabis indica
gctcatggacaaatcctattatataaactatgaaatatcttttaatctgtatttagataataaatttgaactgcactggaggatttcattaagcaagttaatgtacggtaataatgcttgtaaatcagcaaaactcacttgattctcaagtaacttgcttgaatttgaggcaaagatgtacttacttctctggaatcatcaatttgaattagataaaacagctcacttactccattctgagtattacagtaaattagaacaaaacaaattaaattttcttactggtcatcagatgctataagagaaaaccaaattggaccaactcttctttcatgcctggcactagcagcgtccaacacagcttgtggtgatatcattgattccccgaaagcagtttcccttttacgccggacccttcgcacctttataggtttcacagatgctgaatagacaggatcaacattcttgtcatcctcaacttttgttttgcgtttgtattccttaatttttgttctacgtgcttgaagttcaatgtcagcaaccagtgtgggttctgctttgttgtcagacccttgtgaactggactttacagacttagtcctgtttgctacttcaaccaaacaagttaaaggtttccataaatccaactttccttcccatgacttggcaccattcccagtttctttatcaggaaggggttcactaggctcagaaggaatagagctctgcaccaggtcaagaacattggcagatagaagcaaatgcgtttaaaataaaaataaagaaaactgcaccagcagctacaaagtctattgaaagtgaataatgtgggtaggagaacgattccctcctcctttacctgcctagaatgcggagaaagcttatttgaaggctcaggtgaacttgagctttcttgatgattttcaacagaatcatcctctctcttaacgggtttttcagcagaaaaaccacatcctcgtaaagctgctgccttcctcgtgacagatttggttcgtctcccagtcatggtggcatgagctgatactcttggagtgttgatcaccaatgaagaaagtgacctttcctttcttcttacaggtagtgtaactggcgtcacaacctcagctgcctttacctttctccgtttaataggaaaaactttcgctctcaaatcttgcaagttgtgatccggcctaataaagaaaccaatagatactaactcaatatacaatctcatgaaccaaaaactcgaatttcactcattagtatgtgatttaacataatgcataatgctcactatggttctagctcaatagaattccttttcctcttttgcatcagaagagaacaaaatatactacaggctccccctcttcagtttataatgaactaagatcgtgaaaaattatacaaagcaaaagtaatagcaggacttaacctcaatttctccaatggaacacaacctagatggatattgcatgttggacagcactctaactcttcatcggataacttatcatatatacatttcctgcaaactggacgaagtccaaaaatataagtacggaattctcaaagatgtcacattgttttttcaagaaaaatagtaattaatgcattgaacattttcattaacattaataggaaacgaggtcagctgctatactatacataataggaaacttttacagggattagatatgagcacgggtattcacctttgaacagtcacaagtaagaaaccagataagttttcttattattataacaataactacagaatgttcatgtttaaacaaaataaatatataaataaaatgaaaatgaaaagaagaaaaaaaccatacaagcactataatgcaactatactctataaacccgaggctgctagttcattaacgaaaatggccttcaaaaccatgggagtcagagtcagagacaaccacagcataagcacacatggctatacttaatcgccagttccattattcaagcgttccaagccatgtttaacaccaaaaattaatcccaacataaattaacctccctaaaatcttcctagtacagaagataaaacaaaagagatttcaccaaataccaaaatagcaaatacccatattgaaaatatagcacgcccatattaggaaagaaaaaaagttaagtcaaaccaaagagaaacccagataagaaaaaatagataattacaaggacccaaatcagaataacacccaaaagtgcaagaaaacagtcgatgagattcaaatttaatgaatcaatacgacccaattagcttaacagaacaaccaattagagtcagacgagagaaagagagagactcacacgtatgaaggcattcagatatggtggtggcatctctgaagagcttatgacagagtgggcaggtcatgcatgcctcaatgggatctctactcactttgaccacctgattcgccatcttcggccgcttcaccgaaacaaagaaaaaaaaatctaatcttttctctgacaccgcttacttctcttctctttccaactcacccacgtgtccaatcactgcatgttaatacacacaacaaatttacgtccatttccttaagtttacctgcattaaacccaaaaacacgaatatccgaagaataagaaagagccgagaaatcccattaaaataacgtggaagacatttcaaagaaaatgcgttaagaaaagcatataatttttattacccctgtagattgatgaggaagaaagcagaagataaaaaccgaaagagtccgagatttaagagatgggtacgattgatttcttcaaatttgacgtgggttttggggatttttgcttgttgcggttgattggcctgaatcgcaaagccttctctcttcgtcgaaaggagcatgaaccaaaagagtttccttttctattttttcgttttttcgttttcttaaaaaaaatagaattcttgagaattttgttttattaataaacgggggtgatttagaattagtagtattaattaattaattaatctattaaaactaataattaacagatttagaaaatgtacacttggggtgcgcattataataacatgcgcactcgatttcgtataggcgacgcatagtttttgcaggtaaggtgcattttagcatgcaatgtacttttctttctttctttattttgtttggttctttttggaaccgcttttaaagtaaatggtttctatcctagccttctattctatctaggtttgaagaactgaccaaagttggtactgttgagggttcacttaatttgagtctattataaattcattaagaaaaagtaaataatcttattaattttgccattttatttaattggcttgaatttgtcacacaagtaattaagaaaaagtcacttgccaactactaaaaagctcttttttttacccacccttagacttaggctatgacaatttttaacttggatggtcaaaaatcataactgaagactaagcatgtggatgtctcctctctttgtcctctttgtcacagggcggatgagaccattgtgcactgcctggttactagtcaaacagttcaactggtgtggaacagagtgggaattggaacgatttgctcaa

SEQ ID NO: 381351 - DNA, 2000 bp, Cannabis indica
acccactaatccttataaaagggtcataccccttattagtgactaaggatgtgtgtgggtatgtgtgtgttgagagtgaaaagagtagtgttacacactccttgcatatattttttttctttccttttgtgtagattgatcaaataaaaagataacatgaagaatcaatacatatgagaatacatatgagaggtatgttcattatttttaatactctaaatataataatttgattttgagttacttgttgaacattataattgttaatgtttaaatcatttatatatttatgttttcataatgctcaatattgtaaagtaatttaaacatttcttctatatcaaaataatcatcttaaagaataaattatgataatactttttttttgccaaaataattagcagtataattaaaattcttttttaaaacacctattaagagagaaattattattttgaagacacctaattttgttaaaaaagaaaaaaaaaagaaaaagagagaacgtgcaaggactgcacatgtttttttaaagtttgactttcaactacgaactactaagtgataatagtctctaagggcacctccaaccctagcaacgttagtagggcccattttcaattttataactattaagcttttacactaaccaaccaaggaaaaaaagaaaaaaaaattaaaaattaaaaaaatatgaacatcaatggtaggcaggagcaatatgcttatattacccatttaaaaagtgagcaattttgggcaaatggacccacactttctgatagtcacaagtatagaaactcccattggagttgcactaatagaataggcaaaagttttttcggtacggtatttcactgacgtggaaccttaattcgtgttgattgtttatgtaaggttattcttgtaaataattttaaaactgtgtatattaatgtaaaaattctccaaaaaaaaatctcttttaaaattatatatatttttaatatttttgaaaaatatcacatttttcttttctaaaataagggtccaaaaatattttgttttctatgactcattatatttctagaccgactacacttttaagccaacacttaagataaactttagaagtttttacaccacatattgaaattttttactttttttctattttactgtggggcggaatttttttttaaaaatactgtatattttttatattgtgtactgtgttaagtttttactattatttttagttgttccactattgttttcaattgttatgttttgctgttttacggttgttttataaaaaagacagtattttgtagtttaataaaaattaaaaaattccccataaccttatgtataggtgaatacatatagaaatatatatttgctaattttttttttaattttaattaattatttatttggttgagaaaaattaagacgaattgaggaaagtgcaaaggtagatgaaattaattctttgacaaaacaaagttatacgtatgaatgcaaaccgtgtttaatttgtccattctcatctgttggactttttaccaattgtagactcgtaattaacaaattgtacaagttataactccttatcttattcaatcataacaacaactccacatcaattttgatcatagttttcttctcaacaaataaataaataaataaaataataaaaaaaaaaaatcttgaaatattttcacagtatatcatatatcttgtccttagaattaatcagttgccgtaattatacattctcattttaacaagcacacgtaaatatgatataataaattgatatgatttcagtccaaaaaatcgattataaacatacggctaattcaacaaagttttaacttgcattacttttcttcaaaagataaaccaaaataaatatatatataaatatatatatatctattttatataaagtgtgcctatataaccgaattcttggtttatgagaaatttatgggtgactttttatttatatttaa

SEQ ID NO: 381352 - DNA, 1453 bp, Cannabis indica
ttgtgttctaaaataatccaatattaatatctctaaaacttattaaaataataataaaaagtaaaaaagagatagatataaaaaatgctatagtatgagattcttctatgacattttttttcattctaacaataatcattaattaaaaaagaaaaaatatatttatctcatcaaacatcttttaatgaggtgctcttataattttaaaatgtcatcctcatgatcatcacttcaatctattcaacccaaaagccataaaagggttttaaacagctaggatttttttaaaatgcaaataataggaaggtagagatattattttttggaatgaagacaaagattagggttgaggggccattttggtgtagtactggctagataagtatccaacggtaactcactattttgtctgtaatatattgttttacatataataataatgatattcaaaacacacttggcatagaaaccaaacaatgagaccattcacacatgccaactttgaaatattgcaacaatgtgaccctacaaattccaataatacttccaccaaaaaataaaaagaaaaaaatccaataatacgtcttatacttatatgaaacacccacattgcctcactttcttctgccattgcccaaaaaaaaagaaaaaagcacttgttaccatcaaatactatatgtatttatattacaatgaaattattgaaatttaaattgtcatattaattttcaggcaattgcaccgaaaattatcaataacaacaccacatatacatatcttaccacattaaattatacatatacatatacatataattatcatggagaaattttgttatcatataattatttctatgaaaatttcattttgttaatgtttatatgagtaatttcttctagttgtttatattcaaaagtaaaagaaatagtgtttttaattatttaaagtgtgagcttgatgaaccatattttttttttttttttgtaattgttaaattgaatgagttccattttaaaaaatatatataaattctgaactccagatttgacctgatcaaccctgagcaccacatataactcaatcaatgtaaacattattcttcgaaaaatacagcataattttttaaaaaaagaaaataaaaatcaaaatgtatgacaactgaccctacaatttaagtgccactacactagcaccacaaatccacaaaggctcctctaattctaaactcaatcatctttgggttatttttttgttttttttttcttgtatttgggttttatttttcatgtgacacatgtcataaatcaaggtgttacgtttggtagttgtgtcacaagatcttcagacaccagaacacagttctatcttggcccataacatttccaatcaaatatggcccattatctatacatgtaggccaccgccacaattaaaacaattttctttttttttt

SEQ ID NO: 381353 - DNA, 1575 bp, Cannabis indica
aaaaaaaaaatatagaatgctatatggcttcacaatgaccctgactttaaggagttgaacctttcttgttttataaggaaaattgtcttgtgtattgtagtaatagtaacttatgtttcaattcttaattaacaaatgatgtgcataagcaaatgaaatgacatattaatgtcaaaactaacatagttcacttgagctatagacatgacataataaaataacattaaataagaggcaaaaacaaactgcattgccatcaaaagtttctctaattatcaacacattaatcatcattatgtacaaaacttcctgagatgttaatgttaatggacatacgttttaataagcaggtgttgaacatagcacttacacaaaacaaacaagaaatcaactcagcaacagtatccaaaataatcccaattcttctataactttgccatagttgagtaaatttgcatatcgagacaaaagtaaaattcatatgccttccatttaaccaaaaaatcctatttatttatgtatgtattttgaaaatgacaaacaatcttattttgaaatacagtacaatgccaaagcacacaaaacttaaaatactcccccagaaaaagaaaaaaacttacacttgggcgaccagttttgtcataatgcactgcatatctttttaagtccccaatttcagagaaaagttcctgagttgcaagtcatatttcaagacaatgttacaagaaattcgggtatagaaagctcttaagacgaaaaagtgtggcttgagttgtacccttatatcctcattggtcactccattgtccaagttggagacatatagttttgtgccaatctcaatgcctgttattccagcagctctgatactatcttcaaacaaatcatgctgccatgggaaggccttggttctgcggatagactgatgaaagcatggagaaaagaggccagatagggaaaagaagaaacgtcagcttataacaagataattctccactcctcaaagtgctcagaaaaataacggcacaaatgcactgaggacgacagagctttaggggatgagatgggacagacatattgagcttctccatcaattatttgtcctctttgaatttgagtttcaaatatttgggtttttaaatcatatcagattgtctagcatatcaaaaagcatctacagatttgagcttgccttggcaatggtgtaagcagatggctgagcattcaccctgagagggcccctacgaactggcccattcattcttccagcagcagcaccaccaccaccattaaaggacccacgcgaaccacgtcctcgacgggctctacctctttctctaattctctcacgattacccttgctgctctttatcatgtcatcaagcgacatatccaaaggagtagtcattgatggggaacagttacagaaatatacacaataagagatctttaaaaggacctgcaattaaaacacaattcacatcagcatctgcatcatcatgttgaatcgccacacataaacaataccaaatcacaatattagcatatatttcaaaactactaatcaactaattt

SEQ ID NO: 381354 - DNA, 1057 bp, Cannabis indica
aaattatcactaaaaataatagtgattacagtattacgttattacaatttacagtatcctagtaatagtaatttattgaattgatcgtagaaaataaaattgtggtgaaaattaggtgaatggttacgtatcatcccatgtaagctgttccatattttttgcaatatgttatgtataacatttataatgtgtatataggaatatcaataataacaaaaaaaaaatgtgtaaatatgtttgtctggataaaataatgtttgcacgcgatacatactttctgccttattattatttttatttttatctgtattaaatatttaaaaatatatatatttatattataatacataatatggcgagtttataaacaacaggaccatacaagttcatgatgagtatatagtatatagtgactaaaacattgcaacgaatcctttaaaaactttatactttattcaagattttataaataattggaaccttccttgctgttgttgatatgcattaacttcatatcttggatgttcgactttataataattttaaataaatagactaagagagtttaagaccgaaagcactgattctaaagcctaaactcaatttttaactcatttaagaaatatttgtggcaaaactattttaatatttgtaattcttatacatatgattgtaataaaaaaaaaagattatgataaaaatatcttatcatatgattttgttgtaagataatccttttgattattaagtgctaactcagaaatatcgacatattattggactaagtattaaataattattatttaattaaaaatatgcaaatttgaataaaaaagttaaattagattttgtttaattaagcaaataaaaaaaattgaacaaaaaacataaatatttatttatttaatatgtgatctaataatatatcgtcacatatttttgagtttgacatataaaaagctaaaaagaatacaactaccataaaaattataaaagaaagtaattttaccacacttttttttattcaaaattatatgtgtaataattataaatatta

SEQ ID NO: 381355 - DNA, 1741 bp, Cannabis indica
aaaaaaatatatatattaatatgagaataagatacatattgggtgtggtcttctaaaaatggggtttccaatatcatttagatgtaaagtattttacttgctttttgagtaaatctataaaattgtgacccatcaacaagaaaagaggtagtaaactcgtgtagaatactactggtaacagaaaggtcaaatttttcagagaaatcattattgaaaaacttaaaaaaaaaaattaaaaaattattatatacatattgttgttgttgttatatgtaaccaactaaccatataagtaaaaaccacggctttaagcgtttatagtccaaaaccaaatttaaaaaggcacagaaaaacatatatactaggggcgtttgtttaattattattcttaaaaatgttttatttcttctgagtaatattattatcaaacatatctaccatacaataaaaaccaacatgtttttgagggaataagataaagaaaactgttaaggtaaagaaaacctgaaaaccctttatgcttttatgagcactttggctgaaattcagtgtcaaaggttgaataatggtaatttatttgtatttttttttaactttttctactgagttgtaatttttaaggaagaaataattaacgtttttttataacatagttttcttcaattctttttctataaataatgctgactcagatttttttattctattattattatttattattttctttaatgtagagaaaactttggttaagacatgctgtatgtacttgtacatgctttctgtttggttcaactatttttcaatattttgattatttgtccttaaatgaaacatatcacatgcaaaccctaggcgaattaatgataaatgatgacataattgtttctttttttcttttcatgaagtttaatctctaaagacaaataataaaatataaaataatataataaaataagcaaataatataataaaatctaaaaacttttaaaaatactttattttaataatttttattttatataaaagttatatctttaattatatattaatttttttaactgcttttttctttaaatttatattcttaaaaaatatatctatcaaataaaataaattatattttcaatattatgacagaaaaaataaataaaaatttataatgaaatttttttaataataaggtatactatcattttatggggtgcaaatagaactcccctaaaatacatatgaatattatataggaaatttctctagtataccctcttaattaaaggggtgttctagtagacctcctatctattttagcatatagaaaaaaaatttagtttattttttttatgatcgcgtacgtagtacctatttagaatcacatataaattttcaaaaaattatgaatacttcacaatactaaaaataaagttcaaataattatttactatgtatataagaaaaaatagccacgagtgtaacaaattatttgaattttatttttagcattgtatattattcaaaactttttaaaaaatttacaagtgacttatataagtgcaagtacgcgatcatcttaaatgcaaaaataaataaagagtctatctaaacaacttactatataaactaactttattttattttagggtatatacttttttggaccttgtgttttgtaaaagttaccagttagactctctgttttgttaaatgacaaaatagaccatgtattttctaaaattgtaca

SEQ ID NO: 381356 - DNA, 1862 bp, Cannabis indica
ttttttatttttattttttataagagaatcaaatctgttgttataaattaagagtattcatttgcaacttctacaataatatttgtaaaagtagacaaagtaggtgagggattgttgacggccatagcaactttgagagcatcagtttcaacttcagtaatggcgagttgaagctgcgatgcccaaagaaggctatgaaaaagtgtcataacttcatctcatgtgatttgaatgtgccttcgagtaagcagtagtcacatgcccatgaacatcccttacaatcgagtagaaatactgattgctgcatcaacattcatttcaagacctgaaagaagaggcggcagtgtatgtagtggcttccaaggttcgggaacaacaggaacagttgaagatgtcacaaccggttcatgcttcatatttattgatgttaaatttcttaccaaaaaaaatgatgttaaatttacatcaaaatcgaaaaatgcttatcaaatttgtcaaaaaaatgagcatgagcaaaattgaaacgtacaaatttatctgcccaacagcgacaataatagtaaaagataagatgttagttacggatgagaaataatattgaacatttctgtctcatgtttattgctgtagaatgaaaatggaaagtaaatgtatggatgcattttctattagatttgtaacatttttagactatatttcaacaaattttatttttaaaagatgtcatttggttttgtattttatttggttcaaatttgatgcagtgcatgtatcattattcaatctaatatatttattacttgaaagaaaaatctaatataattattaaaaggtagtaataaattattgaacaatcaaatagtatagtaatcatttcgcaatatatcaatctttatatatatatatatatttatatcctatggtttctctctagggttgagagtctagtgctgctgcttgtgacttcttttctcctctctggtcatggcttgccaacctgtttgtgggtttggcagtggctatggttgggagttgttgattgtgcatctaaaggggctctttaatggaggatcggcatcttttggtattggatttttggggttttcgcttgatggccaggcttggttttagacgtttctagcatggggtgtaccgtggggagggtcttggtttgggttgcagaggtttgttgatggggatctgttgtttgtctacctgtcgtggctggtttcactactgtttggaagtcattttcgctcacattagggtagtccgatagcgacaattttagatggacgtcaaagattcgttggagttaggcttcacggtggagatctcggaatgatttggtccttcgagtttcgggtgattctcctcttagtggcaaggttgatattcattgttgtgaggacaccatgtgttggtatttggtgattacattaatcttcattggtgtttttatttccttgtttatttttcagtgattgtttgttttactatcttatacttttaataattgtggtttgtcaccctcccattggatcaatgggagtcgtagtctcagtggtctgatatggggaatccctagattgttattcattctttgttttatggatcgatctttcagtagttttgtccttggtttggttggttttgttatttctcgtttattctagttagaataattggggtgcctttgacccaatttttattggaagatctttcactgattgtcattgataagtatgatctcacacatgttcacatgttcattcaggatggacatctagtattcttcacattttttcaatgcttaacaacttatgagtttttcagttgaagatgttgttaggttttttttt

SEQ ID NO: 381357 - DNA, 5312 bp, Cannabis indica
caaatgatctggttatactggaaagcgtgaaatgaatgacaaatttttggtcaattttaatcttctttttaacacacattaaaccacagaaaatggatgaagtcatcgtgtattgagtctcataagtgccactgcgccagtcaaaaaaatgactacacaaaatgatatatacacgtgaccggggcgtaactcttcttgctcatcttcttttagcatggagaagggctcaaatgaaattaagctcctcctttttggtccgaggttgatacgtgtggttttttggccagcattgaaatcttcttttgtaagtcaagatttgacattcgctccacctccaatgctctctcaagctttaaaaatataagcgagcaaataaatcaaataaataatacacgagtaaccgtgataagtataggtaattgtattgaatagtgttggaagcagtttaaatgagcacctttgctgctcgtgtactccattctcctaagatggctcttaatctctcgttctcttctacgtactgtataaatggcataattaataaacaatgaaatcgtgccattaaattgttcatacggcaacatacataaatgtgtgtttggtaatacctgattgttagtagtccgcacacgttgaatctcggtgtccctttcagctagcaaagatctagcgagccttagctctgactgtagttgattcatctgcagcataaaacatgtacaccactttagtttgaccgtgtcaaatttaatgtggcggtatttactatctatctaatgcccgtgatgtaattttaatcatttaacaacaacccaattgattgtccaacgtagacataaacaaacccttcatttgacagagatgtcatcaccttcatctttaaccagaaacgcctaaaaaatcaaagttttagatccaaactgaaaggacgcggcatcttatattcccatagtggaatttgaaatccacaaattataaccacgaaaacttactagaactgtaatgggaagaatatctgaagagaccccctgaaaggacaaaccttgcaaacatatttgtttgactatggacatttcaggttagataaaatcagtattttatagccttttatctgttagtaaggttgtacaatgatccatcgaaccaaatttagaataggcttacaatgttattgttaaatttattgtcttatgacacctcgcttatcagcagtagtctgaaattggaatcatccaattcccaaaaagacaattctctaacatttttttttctttactttttacgttaaaattgctcacaaaatcagcaagggtaccactattacctcagcagaaagcgttctcagttcttgatcacgagctgccaataaatgggcaagatcaacctggagaagcatataatatttcaacatcaacaaaagaaatcatcaccaaaggtgaaaatcatcaagaataacaaatacagaaggaccaccataaccacctgaggtgtggaaccatcatcagatcgttcatatttacttaagcactcttgcaatcgaagaatctgcaatgaaataattcacttagatagcttattggcaggattaagttaaaaatcgtaaaccatgaaataaattattaagacatcagtccattgaacaagccaacgagcattattatctaagaaaggactactatgaacagctatagtatgtattacatcaagacaactagaattataaaatctgctgcataacatacctcttcactcaaaaagtgaaggttttcacgttgatattgcaataaagccatttgttgatcagaaagccgaccagcgtcataatacctggaaacaacaaaactttatgatcagagattatatcatatcgttgaacatatcaagccattcaagaaagtacactaatgcttcttgaaagtactaaagatccctttctgcatgcatgaattcaaacaaggttggaagcaaaaatactggctatacagagtgaggaaactagtcaaataactagaaaattacctcaaaccttctaatgaacttgatggttgaagtggagagtacaaggacttcaagacatcaggttgggagtttaaagagttgtactggtgcacatagcctagaagcaccaacatgggacaacatagatcaaaggatttgatagcagtgaacatgatactgacacattactcagaaattccatgccctaattacgctactaacaatgcaaaatgagcagataactcaccaatatagagactcataaatgatccagcacatattgcttcaactagcataataactctgcaaatattatgagtagacaatataatcatgagaaatagtcctcaaagtaactaaacattatcacctaaatcttacttatacattaaaaacggtaatctgcattgcagctggtagtgtacatacctcaatatagcagagatggagagaataccggtgtgaggtctccaaaccattacaagtagcattgcagcagttcctagcagaagaaatacacccataaactttaactagacataataatttttgtgtttcctaaaatcatcacaaccttagatgttgagcatagtttaaaaccccttagagtatcctgacacaaaacaaaatcacatatgtagatttatgaaagaataattggaaacaacaaaaagtaaagatagacataccatatgcaatagtcgcaaatggaagccgaacgatatgcttcaacttctggctaaaactataataaccctgcatacaaatacacattccatggttcacaaacaagggtaaaacttccaaaaagtactgtgataggcattgggatattaaataaaaaagggcataagtgtaattgtaataggggtattgtgtattgttattatatataggactcaatagtaaaggaaaagggtgtgaatgattttagttaagtgatctcttagctcttgggagagagctgggtctctcgaatacccagcaaccttgttatcttttatcttctatatcaatatatcatctctattatctctattttgctactgtttgtaccgaaatgataggaaactcctatcatactgatactaaaaaacatgatttgaattcagctctccaacagaaacaattgtaaaccaagcttagaagattcaattgttaactttatctttctctctaagcatgtccttgtgtatgagagatacatgttagaaaacgggaaacaaacattttatactagttagaaagcttacttgcaaacgtattttttgaacctggtataccaaatactgttgaaagattcctgaaaataacaaaacactatcttaaacacttcactcccaaaactatgtgcattctcactccctccatgagattctaaaagggtgtaaaccggttcaaacaaaagcagtcataagaaagcacaatttttcaaaagcaatcaatctatgcataggaaaagaaagctaggggtacaaaacctgtaacagctaaaagaacaacagcgcagctgcaaagtaattgggaagtaaacctctgtataggatgaaatatccatggagctgcaactgccaatgcagcataacctgcctaaaattgaacacgatcaatccaaccaatatacattatgttgtaatgtaagtactaattagacgactaaaatgagaaaaaggttctgcttgccaataaaaaaaagtaaaccacactcccgaagatgcttctcgacttgcggtgaccgaacaaaggagcttcatgcagtatatctaaaaacctaaaccaccacaacttaaccgtcaaaattcacaattgaaccaaaataaacaaaatttgttttctagatagacactgaaacaaaaaccttaacaactataatcaccaaattttagcacaggctaattacaaaatatcagaattccaattacactaccgagaaattgagcaattatcatcagagtttcgacctatgatatacgcgatcaagttctgtgaatcttcatctgcaatcacaatttttaatttttttttatactattagtgttggggttggaggaacttacagagcgttgtcttcacgagatgtggaagccaatggagtttgtctctccgttgccattcttgcttgtctttatttttttttcctattatttttccatggaacagcttccctgtaggctgtaactataacaaatctaaagaaatgcttcttcttcgttttagtctcaccttttttattttattttatttttttgctacgaattcttttttaattttttaatttttagtgacaggggactccacaaacccacttttttttttcttttgcaaaatgccacaatcccacttaatttttgtaagtgacgaattttgcgccatgtttagtaattagtagatttataacaacaatgttttttaaaaccattttgttctggaaaaaacaattgaaaataaaagtaaatgactttattttatgaatttgggaatttaattatacgaaacattacacggaaccaaataatatactcatataaattattgatatattattattttagtatagtttgtcttgattatattcattatgttataattaatgaacacatgttactagtacttactagaagatatgcatattttcaaactttagactaaaatggttatatcttcaattcaaacttatgcaatgacaaaattggaatgatatttttcaaataaaatttaaaaaatattgtatatctgtacttcagtaccattttgggcttagacaatatatgaagcccaggataaatataaatgggctaagtgaaaatcaacttagaaactgggcgattccaagggtccggtgagaaagaatctgcaagtctttgaacataaccctaattcggttatcgtctgatctgatctctctcttcgatgagattgagttttgagataggcccctgttactgtttggattgttcttacttaaatctggagctgaaaaatgttttgggtttttgcgtcatccatggtttccattagtttcatcaacatttccagtccatgaagtgtgtatttgtccggctttcaatggtcgagtcatttgctttgccaactttaaaatttggtactttgtcgtttctatgaagattatagaatcaaagccaaaacctaattcgaaatcggctcgacccattagaaaatctagttcttcgtcctcccagaaaacggattgtgattgagaatatatacgagagtagagccgagcctaatgatggcgcggcggtacagatgtaccctttttgtttttcacagccccgtcccttctgggttcgagc

SEQ ID NO: 381358 - DNA, 1690 bp, Cannabis indica
aaagtcccaagggtgacactattagacatataaattaagttagactgtttccattataatgaggagcaaatagtactataaacatatatatatgcatatataatagatatttcgtttatctctacaaccgttcatcattattagaaattacagtacatgaaattaaatgtataaacatatgaaatttcgatcaaattatagattaatataaaatatgatatacataagagaataatgacaaaatatagagatcatgcatgtgtgatgaagttctataaatatatatatatatatatatatatatatatatattaaccgtgagaggtagtgggagaggagttagcttgtgacttttaatatgtgtgtgaagcttcataatctatcaatgtttacaaaactactagctcatcatatatcattgtctgtggaccagaccatgcttctgttctgcttctttgctctctcatcatcatatctctaccattaattcacttgttctctagtctacactactcttaattagtcatacgtacctgatctacacacatatttatagacttttagtaataatatctttattttgtttttcttttattttttattttttttttaaagttagattatatttttatagaacaaagcattaaattcttatatagtagatcgccctctaaaaagggcacagaagcatcactttaagtttccacctctcttgttttggatatattggatacactataagaatcttaatttttgctagggaaattcatatttttccagcaaaagttgagctttactggtgcaattagtcatcttcgccgacaaaagcttataaaaagcttgattgattgataaactttactagcgagtaaggtcgccagtgtaagtatgctttgctggtacacttaactaatttcactagcaaagaaggatggtgagaacaaccaaaacatgcaaaaaaattcgtgagaaaataagttttgtcggtacatgtactcgtcagtatatgttcaattgccctgggaaaagcagtgaaaatattagtggggaaattcctgcataaggaaaacgtgtgtaaaaaaatagtggggaatgttttgctgtcgaaatatttcaccgataatacttttcactgaaaataaaattaaaaggaaaacgacgttgttatccttatgtcgtttttgtcgacgcaatattacttttgtcggtgcacctaaatgcaccaacaaaacttgacctaaataaaaccttccagaccccttttttttcctcgcacgcgacatttctctttctctctgtccttctccactgtctgcggctcaggtgagttatcccctaaaatctctcctatttgttctttccttcactctaatgacaattttttattttttacttttagggattgatttgtgatggatgataaaaaaaaaaaaattaggattcttcttcatctttagtaaacgataatgaatatctcctctttcaaattttaattctttagtaaatttatatgtattgagtatatagtagattgatgttacgtgcaatgtacgtataattagtcttttttaatttagttcaattaaataatgttaagtgcaatacatgtatgattattctttttcaattaggtaactaatgtacgtatttttttttaatttttgaaatgggatttgagattttaatcttt

SEQ ID NO: 381359 - DNA, 951 bp, Cannabis indica
atatgcgagttgaatacttaacaatataaagttatcgctaaaatactaaaattgaccttctcggtaaaccctacctagaagccccacaaatgcagaaccccacctccaaaaagcttactacgtgggaaacaaccttagggaagcttactacgcagaagctaacctttaaggaagcttacctttgagaaagctaaccttcggggaagctaacctttggggaaactaaactttggggaaggtaaccttcggggaagctaaacttcaaagaagctaaccttcggggaagctaaccttcatggaagctatttttaagggaagctaaccttcagggaagctaacctttagggaagctaacctacaggaaagctgaccattgggcaagctaaccttcagggaagctaaccttcgtggaagctaaccttcagggaagctaattatgggcagcaaaggctcaaaaatttccattttaagaccatcaaaacttgctcctaccttaacctacaaaactttctagaacaacaatttggggtattctaaggataacccacaatctaaaagcacctataataacatgcaacaaaattcacttgagatgagcaaagcttgagttcataaaactcaaatttcctcaaaacctgccacaactgctacaacttctaaaaaccagccataaacaaataaaatcaaactttaaaatagtttctagacaattcaaactcagatagaacaaaactgtcaaagttctcaaaaccacataattaaaaacaagctttaaccataaaaaggagggaagggaactacgattacctttgattattctaagaaattccttgattaattcttgctgaaaaaggaaaagaattggtctgaaaactttctttggttccttggttcgctttggtttgggttagggttgaaagataagagagaatttagagagagagagagaga

SEQ ID NO: 381360 - DNA, 5541 bp, Cannabis indica
acttttactaagtcctaccataggcttgcactatatatatcatattaatatcttttacaaaaatttattatttaattttgagatttattattaagtatttattttttttaataaaaaaaaagagcttttacatttttacactaaaatcattttttttatttttacgaaattctacatagaaactcctattgcaactagagctgcaacctaaattgcattaacaaatcgtatggaaacccctactgcaactagcgctgcaaccactttagaaacccaaaccgtaaatttgaaaaaaaaaaatacttaaaaaattaatatatggagtaattcccctaaaaaaaaaaaacattcgttgtcccttccgattgtttttccacccctacaccgcaactttccaaataataacattttgacgaccaaccaaatccacagttcatgataaaacaaaatatttaaagccctggagagccaaaatatgcagaagtacaatagaagaactgtaccatgaaattggaaaataggaatcaatttattcggttattcatataaattacaaatagcacatgttaaagtaatccatatagccagtatcacttgctgattcccgaaaaaacatctcacaatgaaacataatgtcaacatggaaaatcatcaagggaaccccatccacccccaccaggagttaaaatctgaagaatttccccagcctgtacctcaactgtgttcttacccccaaggttaactattcgtttatcatttgtaatcaagaagttagctccacgagcaccgtgttttcctccattcaaccctctaggcacatgtacacgcctctctgagagaatgctaaccacaactggtcgcttgaattctatctccctaactaacccatcaccccctttatgaacaccagcccctccactattttctctgagctcaaatttatgcaataaaactggatatctctgctcaaaaatctcaggatcagtcattcttgtgttggtcatatggcactggattccacttgttccatcccaggttgggcccgccccgctaccaccgccaattgtttcgtagtatccaaaagtatcatccccaaacgtgagattattcatacaaccttgtgaacaagcacatgcctgaaatgcagtcagtataacgtcagttattctctgagatgtcaggacattgcctcccacgacagcagccttatcacttggtgacaggaatgaacccggtggaatataaatttttacaggagccaaacaaccttgattaagaggaatatcaacatttactaaactgcgaagacaatagataaccgctgcagatgtcactgcttctggtgcattccagtttccatacacttctggactagttccgctaaaatcaaaatttgcttcacctttataagaatcaattgtaagcttcagatgaataattgatccatcatccatgtaatcctcttcctcaattgtcacagacttgccatctccagcacacgttgattgggatgaaactttagcagcaactgacttcagcatttctcttaccgcctcttcagcattcaactgtacatatgtcatgtaagcctgaactgtctccaaaccatactgctgaatcagttctttgatgagaaaaaaacctctctgaattggcagctacttgagcttgaagatctgataaattatcttgtagcctgcgagttccagggacctgctttgttaattcaccagagctggggaactgaagaagtttagcaataccttcttcttgaaaaatcccattttctacaagcttatacgcttttatggcagcaccttcctcccatattgacttggaaaaaggtggcatgctaccaggagtaataccaccaatctcagcatgatgccctcgacttgccacaaagaacacaagtttcttattatcaaaaacaggagtgataacagttatatcagggagatgactacccccagcagaaggatgattggttaccaaaacatccccttcctttaaattattaccccagtaattcagctgccagcgaactgtactagacatggctcccaagtgcacaggaacatgcggggcatttgcaactaggcccccatcaggcccgaatagcgcacaagagaaatctagcctttcctttatgtttgtggatatagaagttctttgcagggttcttcccatctgttcagctatacccataaatctatgattgaatattgaaagttgcacaacatctgcaaccttttcagatactttgatggtgcttgcaacaggctctatttctattctaatatttccatacttggttatgacacctttgcagttgggttctactataacagtactgtttccattcataattatagcaggaccaagcacaacatgtccataacttagtttctcaagcttgaacagcagcgtctcttgccactcatttccaaaataaaccttgtaggagccttcaacttgaggaggataagatgcaagtggtaaagcccttggtttcaatatattggtgactcctacaccacgaactctaacatcgcatattagaatattcctctgctgtaatttaaatccatactcttgttggaacaatttcacaaattcaacgtcgaagccatatccaatttcatcagcagatgtctgtttctttaccataattgaagtgtctgtgccttcatacctcaagttcagatatgtctcggttttaatgctttcatcttcaaaaccttgctcctgtagcttctgcttaacctgcttcagtaaaattgcttccctgcgggaagcctctaccactgtgtcatggccataaacagcagaatatggcacttgtgcctcttccacaacatctgccaatcccatcccaaaagcacttaatatcccacaaaacctgtgaatgagtacttctgtcatgcccaaagacctagcaatagcacatgcatgttgaggcccagcacctccaaagcatgcaagagcatggttccttgtctcatggcccttcatttcagttaattgccgtataggacgacacattgcttcatttgctacatttacaaaccctaaagcaatctcctccacagtcatgtcctttgcagatgaatcttggctctttctgtaggtatttatttctgttgcaagcttttgaaatgcttctctagttgccaaaatatctaagggttgatcttcattagggccaaatatggatggaaaataatcaggtatgacaaatccaagaattaagtttgcatctgtaacggctaattctccccctttccggtaacagacaggaccagggtgtgcaccaacagattctggtcctaccctgaaagctccaaactgaaacttcaactttgatccaccacctgcagcaacagtatttatgtctagttgaggtgcctgtatgatggctcctgcaatctgagtttccaggacttgttcataatctccagcataacgactcacatctgtcgatgtaccacccatgtcaaacccaataagtgatttctctgtttcgagcccaaaaagagtctgtgagtaaccaacaactccaccagcaggacctgacaaaactgctttatgtcctgaaaatcgactttctggtgcaagtcctccatcagactgcataaacaaaacattaaccttttgcagcccttcatcaaattttgatataaaccctgataggtattcttttataacaggagttaagtatgcatccacagtagctgtaagaccgcgaggaacagctcgaaccatgggtgtcaaagacgaagataaggaaacatgtctaaagcccaaactcatagctaactgttccactgataattcatgttgtgggtaagtatacgagtgcatcaatacaacagccaaacagcatattcccttatctaacagacctttaagtgaaagcttcaaagcttccacattaagaggcttcacaacctttacaagctcacctgaaatccctctgattaaagatgcagaagagtccgtattcttatcctcaccttgtacaagctcaattctctcatcaacttcaataacctcctcataaaggtttgatggtttcgatacagtgagatcaaatatgttgggacgagcctggttaccaatttggagtaaatcccgaaagccgcgagtaacacaaagagcaatccgctctccttttctctccaaaagtgaatttgttgctactgtagtacccattcttatccattctatcttacctgtgggtatctttgaagtccgcgggatttcctctcccgtatattcttcaagaatcctcctaatgccttcaactggagcatcctcatagtttgctggatcaacagacaagagtttaagaactctaccatcagggtaaccagggatttctgcataaacatcagtgaacgtgccccctctatcgatgcaaatcctgagcttgtctacgttgtcacttcccattctgcagaacagctatcatcaatattaacataaaccctaaaatttccaattacttataaagaaaaaaaaaaaaaagaaagaaagtaaatacccatttaactgtataacttattcaagcccctcctacatcacaatgattgaaatattaattttttttttaatcttacatatataaaaatgcttatctaacagaattttttacgacttaacagaatttttttacaaacaggatgttaattcgtatgccgagtacaatttgaaaaaaaaaaaaactaaatcatctccccaagcttcgtccaattgttccaaattgcatgcaaagttacagtatttgccactatgatatgagtacttaaataattgaaaaaaaaaaaatagaaattgttgaagaaacaaaatcagagagcgaattttttctttttttttaaaaaaaaactcgggcagccgctggtttgtgaaaactcaggctgtcaatcaaaagcggttagtgaatagctgcagcagcaatagtgataaaaactaacattcaaaaggtttgtaattcccatatagtttacaaatatactattcgtgctcatcaattcagaaaactcaatccactgaacaatttttctcaaagaaaaatccaaaagtttgtttaattaattgcctttactatgtttatagcatacaaatattagtttcagtctatactataaagactgatcattgggctttcgttttaagacttaattgcattttacctacctcgctgtctttgctttcctcagaaagcccagattatctttctcacgcaactctatcttctccttcttcgtttcgctatgcttctaatcatcaaaaattggaaacgggatttcggaatcagacttggaattaccaagaggattcttatccttttggaaaaatcagctaatggctctacaaattttggagttgatatgggactgtgtttagggttaataataataataataagggaaaaagacaagaaaaacacaaaaaaagaaataaaattacaaaaatactatgggccaattaaatatttataccgtctacatacaaatatttacaaaaataccacat

SEQ ID NO: 381361 - DNA, 6107 bp, Cannabis indica
aaaaacttattttaaagtgtaaatatgataaaatttatgttaataatttaatattatctacaataaaataaaaacaaagaggaaatccctgaagaacccattaataacctattttgattttcgccgcattgtgcaccatccctacgcgcggctgtcttaattaagaaagtcaaatagtctaatgcttagtgttaagacttttaaaatgtcgtgcatgtttggccttttcacaccaaaattaatggccctacttattacgtaacataaatatccatccctattttatagcttcatatctctgctctcatccacaatttcttatatatttcttgatacactcttttggctataaatagccaaaaaaggagcccttatttattcaacatatacatatatatatatatacttcttttgcttaacaatctatatacagtatatactatatatatttatgtgcgtaatattgattagttccaatgactattattgttcttctactgcttccctttctctcactgcaacttctttctgccttccccactacaaatcagattcccaaggtacgtaaacgtaccatatatatatatgcatagattgaaatatatatatttaaacggcgggagcaaagaaattataacaatattgtaacaatattatgagtaaatatacatagtcactttaattcttaatttgcacactatatatctatacatcaatcatttattttttttaagcaataaatattattgcaccaaaagaaagcttttacaaccaccaattagccaaatctttataacctccttcagacacatctgcctatatatacacacactatctttataacattaactatgtaaatttttatctgatcatatcttatatttattaaattattatctgagtatatatagtgtgtacatatattactaaaaataaattaaataaagagtatatatataaaatatacaactgatcatgataattaataacgtatggtacatagtgtgtgatcctatataactattcatttgaattactgaacaatcaataatcatgaccattcattaactaattaatagttaggaataggatcagtatcactatatcgatagacactgaagtgagaaacatataagataattaaattaattaaattaccaatagacaagcaatagatctggtttggaaggaattgggtacatacgggaccatgcatataatagaggatatagaagagtgagatatgattggctgaaacagattagggactgtggcagtatattatatgtagccaaaatctctttactaaccttatctctctctttttaatcaatttctatatatataggccgtacgtgatacacgacacgacaggtcatgatcattttcatttttagtcaccatttcttttttccttttttgtgatagagacaaagaggagtaaatgaattatttggcatttcatgaaccacagccaaatcgatccccagccatatacattttaaaattattttttgaatgcattgctcaattgtgctaactcatcttttttcctttgatatatacgcactctatatatatataatgtacatacatctacatatatactatatagctacttataataataatatcaataatgtctatttttgttcttttactactcttttttctttcactccaatggtttttatttctggctcccccaccacacatgatcagattcccaaggtacattctgaaatatatgatacattatatattatgattttaatttcaactctttccaaatctaaagtatatgtttctaaatataaaaggcctttattccccttattaaattttaaaaattaaatttcttaaaatctataaacataaatgatcattataaatgtacttccagtgaaataaatacagcaacttattatcacaagtgagagtgtaactatctgtattgtaactaattaatcgtaactgaaagcctaattattacaagacagtactgtaataacaactcgttagctgacaattaatattctctaacactatctaacactacttctattatttctcgatcttattatacattatgtaatgatatttaaccttctatatattaatttaaagaatatgtgtttatatatatatgttcatctcatgtacatgtcttgtaagtatagaaattgatattatatatacgtggagaagactacagctatataacacatatatatatatattataataattaaacagcattatgtgatatatatgggagcaccaaaaacattatcaccaaatgtaagcaaagaagatgctaaagttgctgatgaattagctcatttgcagttactctcctccatcatcccaaggtacgttaatcattaattattatatatttacattaattcatatttaaatgttgtacaccatataaacttaaatttaaacatacattatgtaaaatatacacatatttatgcatatatactaaaatatttttggcagggaagagaaggaaagaatatctctaatccaccaataccaccatgcgattagaggattctctgctatgcttaccgataatgaagcttccattttatcaagtagtatttgtctctcttaattaattttaacaaaaatggttttgttagtactgtagtttttatttaataatattaatttatatatatgccggttttgaaaatacaaaatagcaattcgatcattatatttttttaatttttttttcatgatgatattgataaaacttataaaaacaaaattgaaaatgggagaacaggtcatagtgaagtggtatcggtcattgaggatgaaattgttcaaccacaaacaacacgttcatgggattttttagaagcaggaatggagtcaaaatggggtttggaaaagactgtcaccagtaacatgattattggggtaatagactcaggtacgtaagtatgtcaacatatacatcttgtcaaattatattactaactgcttacaatacagacggtacattgatagagtgttgagcacttcaaaatgcctaataataatgttaaaaaaattgtgtatactatttatatcattaaaaatagtaatatattatatggctgaaccaaccaaaatgatatataatttaattataattattgaaattgatatatatatatatatttatatatatatatgatcattagggatttggccggaggctgaaagttttagtgacaaaggaattgggccaataccttcaaaatggaagggaggttgtatgacggcatcagatttcacctcctccaactgtaacaggtagctcataacaaattatatatagcacatttttcaatttatatatacatttatacaaagaaactatatcattagctaatagtaataattatttatgattgttgtaggaaattgataggtgcaaaatactaccttcctccatcggcaaacaaggaaaggtcaccaagggattcaactgggcatggaacacacgtggcctccattgcagctggttcagtagttcctaaagcttcagaaatgggtttaggcagtgggagtgcgagaggtggtgcaccatcagcaaggattgccagctataaggtgtgtcatggtggtggttgttcaaatgcagatgcattaaaagccattgatgatgcaatcaatgatggagttgacataatctctatctcaactgcctacaattctaaactcgccaacacctacttgaaagatcaaactgccatcggtgcttttcatgctgagcaaaatggtgtcttggtcgttctttccgccggtaacatcggccccgatccgtacacagttagccacactgcaccctggatgtttagtgtcggagcttcctccattgatagagatttcaggtctataattcatcttggaaatgggaaaactctcaatgtgagtccttataatttattgtttttttttcttttatgttaagggttgacatactgttatttgatgcgtatatcatttttttttctttctctttattaggtcaatttggcatttaatcattcacaactttcacgatcagttatatatccagttgtaattgggaaaggaggtagctattaatccttcggttgtatcacagcagagtaagtgtgattttactcatgagttattatttctaaaatattactgcatgaaatggttgtacatcttaataatagccaaaatgtatatgataaaaaacactcatataggcaacctagctatagtttaaaatatagagattgtaaagaaatttataacaaatgtgcagaaagtgctacagaggatctttagacataaagaaagtggctggaagtattgtggtttgtcttgatggtggggatgctacacgtttagactttgagcctttaagagcaagcaaaggaataataatgtatacggaaaaaactgtacccatttctacacaaactttcccatgggtactactaaacaatattgcagagtatgacattcttataaactacatccactctaccgcgtaagtcattttttactttatacaaacttgttggaatttgaaacactatctagctaggaagtagcattcaagtttgtgtatattgtaataaacattcaggaatccaaaagcaacaatttatccaacagaagaagttccaaaattgtataaacctgcaccagtggtggctaacttttcagcgagaggtcctggacaatttacagaaaacattctaaaggtcactttctcactctctctcactctctctttgatctatgtgtatgtcctaatataatgatgtgagtttaatataatgaaaaaaaacacagcccgatataatggctcctggagtggcaattttagctgctgctatgaacacatcaacgttcaagtttgattctggaacctctatggcttgtccacatgtatctggagctgctgctttcatcaagtctgttcaccctacatggactccttctatgatcaaatcagcacttatgacaaccggtatatacacatacctatatatatttaactaaaagtattgcaattgggcagaactaatatttgtaaattaacataatttgtacactatgatctaaacttttgttttttatcttgcacaaaccagcaagtgcgtacgacaacacagggaaaccattaaaaaatgaacgaaacctaatggcaactcctcacgagattggatctggagaattaaaccatatgaaagctctagacccagggcttgtctttgaaacaaccacacaagacaatttcaatttcctctgttactacggttatacagaggacaaaataaaatccgtaattaaggacgcaaacttgcaatgccccaaaaactcaaaaccagaactcatcacagatattaattacccatccatctctattggaaatctaaaacgacagcaatcaactcctacagtcgtcaaaaggactgtgaccaatgtgggaccctccacctcaacatacactgctcgagtcaattcaccgaaaggcagttgtaaaggttaatcctgataagattgtgttcagcaacaatttgaacaaggcttcctttcaggtgtcgtttgatggcaaaggggctgctgttggatataattttggagatattacttggtccgatggtcttaatcattctgtgcgtgttgtgtatgctgtcaaagtagtataattttacttgttgaaggaataaataagtaaaattatatcatatatatatatatatatgaataatagtaatatatcttaatcttatgtaataataaattaatgtaaacaatttatgcatgtcatgtcaggtatcatgcatgcatatatgttttcatttattatttggcaaaggtgtgtttgttcacacagagtggttatggaatacttctctatttgaattttgtagaatgtctacaaagtttgattttattatagtgtaataatataatattgaataaataaagagttttttttcttttattatctcctttttttttgcattattattatcctgttgtagcaatacttaaaggctataaacatcaacatgtatcctgttttcttcttcttctttttttttttcctt

SEQ ID NO: 381362 - DNA, 3821 bp, Cannabis indica
gcgcaccactcttaaaccttatgacgcctttaagatttggattggttgtgtgaggagaggattttttatgttcgccctacttttttctcaaataaattatcactcatagcactatatgctagtagtttagtttgatggtttgtatgatttccacattagtttaaaatatccttggggccatttgttacaagagttaaggttctgattaatgagaatgtagaaagggaaagtattcttatgtggaaacttgtataattttgtttggttttgtcatgagaagtttatggatgattcctgtgaatataatatttttagaaatagtcccacattgcaacgatactagaaagaaacatgtagtcttctataggattagtttattgatactccacctagtgctaattggttttaagttggagccccaatcattctctaaaaggccatttcttctccgttattgcaggtccatggactgaccccaaagcaggacttgcatggcttaggttttgacccttataagaatgcgcctgaatttagaggtatgtgtttcttcaagaaattaggtttgggcattcagttatatattaatgaattgatttattttctttaccatctccagaaaggaaaagattgcgcatttctggaagcagggatcctgagtacaggaaagctctttcagttaaaaacagtctctttggtctcaaatgtaagatttgtcattcaatcaattggcatgtcttcgtttgatggccatttatagatttatatatcgataataggtgcacatatcaaattttgtttgaaggcttcaattttaaatgcaatggtataaacaaagtttattgttcatcagcaggaaaggttgcccctggttttggtattggagctcttgaagaacttgatgctgaagatgaagatgtctttgcctctggtttgtatcaacctttatatcatcttaaataatcttcattttctagtcctatttttattttactaatcaagaggcatgggttataagtgaagggaggtacacatgttgatagtggacatgactttatttaaaatgtttttcatgtgaaaaaaacaaaattgtctgaaatagtactaaatattggactgctcttgtatagtccaatccttagtcctttgtgccatcctttttcatgcatgttcttattattttggatacctagttgttattttatatccaactacgtttaatctgcagattatgactttgaagagacttatgttcaagaaatagatgaaccatcaacaagattgatggtggacactaaacgaaagttgattacaaatgagagaggtgttctgcctggatttagaattgcatcaaatgctgactacctgccagaaaggtgaatattgttgtaaattcaagatgcatattatatgtctccagacattgttttcatagaattaataagttgaaatttttatgagctttattgttccttgttcctggtatgcagcaaatcgttcagccattttacaatactaatggtcattagggtagttatattaggagaagatttttaaattaatgagttttgagtatatgattatgatgatatgcctaagttaagctctttattgtgtttgtctctagggctgttttgttaactactactatgtatactgtttctcagatttgatcctcctcttgttcctaaggattttgtaccccaccataaatttgctgggactcttgagactgataacaaggttcctgatactggtccgcctgaagtttcacctccggaggatagcaatttgaaactcttgattgatggagttgcaactttagttgctaggtgtggtaaactttttgaggatctatccagagagaaaaataaatcaaatccattgttcagttttcttcttggaggaaatggccatgattattacaaaaggaagctgtgggatgcaaggcagaagcaaggcgatcagaaaaaacatcaattggatggaagagtatcttcaagcacacagaagctgacagcagagagtcgtggaaaaatcttaggagagagacctttggagcgaagctccaatgatgcaagtccatctgttgctgttacttcgtcaaattccgttaatctgcagtacaatctttctgatacatttaccactcctgcatcatttgtgagttgcatatatctgtcctcttttttaacaacatatacctatcctctttcttcctagacatttatgtaaccttgactgataattctccggactttattatcttctctgctcatttctttgtaatgcttgcatagattgttcctgtatcttcaaaagattcacgtgtccatattttattcttgtattgagagcagagcaaacttccagaagctgtgaaacccttcaaagatgatccagcaaagcaagaaagatttgagcgatttctcaaggaaaagtaccaaggtgggctaagagctacccagtttgctggagatataaatatgtctgaagcaacacgagcgcgtgagaggttggactttgaggctgcagctgacgcaatagagaaaggcactttgggtaaagaaactaatatctctacacaacgtattacagattatttggctactggagggatgcggtttactcctggtgggttggaggtatgtttcaggtgttttcgttccttattcttttttgagtcgagttatttagtttgtaatttgcagctttgatctcagttgtttacttgaaattgttggaagcagaaagctgaagacactcatgctgaaataacaaaggaaatttaccccaaaagggtagaatatcaatggcgtccttcacctattttatgcaagcgatttgatcttattgatccccacattgggaaggtactttattgtttttttttatttctcaatcctgtctcctgatctttaataaaaaccaatatgcataagcctctcttactgtagtagcaacttgaataaaagtaatagtcgttctctttctctgttcttcatcttttcctggattgggtcctcctgcaaaaccctaggaatatttgtacttatgttatatctttcttgtttgctcctgatcttaatatatttataaaaggacgaagctgaaattatttggagttcaatccccgattgttacagtgtttatggaatgatcttcatataattcaaacttttttttctcgtaccctttccagaaaaaatagaaggggaagataagcatttttagctctaagactcagtgatgttttgttcttgttttttttttctttattgattagcaaaaggataacaaaacaaaagaacgggtgaaagctccattttataattttctttctaattataataataacttggaagtttttttttttttgcagccacctccagctccacgtatgcgtagcaagatggatactcttattttcactgctgattctgtcaaatccaaaaacatcgaagaaactacagcagaaaacagacattcgaatggtataccccaatctgatgttcaagaaataagcaaaggggtagctgacaaggaaatagaatatgaggtggtggttgaaaatgttgagaggccagttgacctgtataaggtaatattagaaattgtgtgatgcatgttgtttattgcatttgttgtgaccttttgtttctctgaaatatggcaattctaaaggcattcacagtgtgtgcataccaattctaaagctgtggtaacatgtatgcgtgtatgtatatacacacatttatattatgaagagtccaaaaaaaaaaattggtaggaagctttctcctggtcttgttctctctctctct

SEQ ID NO: 381363 - DNA, 3129 bp, Cannabis indica
gttaaagtaacgaaaactaaaagatgatgtaactgttatattgtagaaatttttttacaatccgtatattttaagaataaaataagatagtgttagaaattaaggacaaaaatactaattattcttaaaaaaaaaatcagtcaattccaaccaattacaaataagctttctcttataagggcgtattcatattatattattttaaagagctaacggctatgatataacttttatcacttttgaagaaaaccaaatcagtgccagtgaagcaacagcaaaaacttttttataccccaacaaaacagtgttgacagcgcggccagaccacagccaaatgaaatgataaataagaaaaaaagaaactttcaattcattattcgtattccaacttccccactacacaattttcctttccaacaagccaagagtcacgttaaaatatttatttttctcccaacagaactgaaaatgaaaaagctctcttgtgaatgttgtaatcttttataagtcggcaactcattacatgaatacacatgttggttttgacttgcctttaacatgacatttgttgtttgttttggctctctttgactttactttttaaataattcatttctaggacacttgatttgaattccaaatctaacttcctacaaatatgagaaacgcaatatatatatctatatatctggtaacaaatataactgaggattaaattaagaacaaactttcactttcttatcttttgtaaaggaaagaaaattaaaaagatgaggtcccaccataaaattagaatttcatttcaaatcaatggaataaccatactgaccacaccgctaatatatatgtatatataaaatactagcatacacattattacatttctattccaacaaagaatcaatcttcacctagctaaacaattaatatattgggtgtttaaagtttaaacctttacttacagagagaagggaaaaataaaaacaattgagatacatctctcattcaacaaaaacgagtagaacactgtaatttgcacccctatctgtagtacacgattctgaccattcatcttaattgtatgattaatcttgaccaagacctaatattagcatggccacttgtacaagatcatattcatgaagcataagaagtctcatcatttttattttcatcatcatcatcaacaacttcatcaaagaaagggtccttgaggaggtcagcagcagagggccttgccattggttgagctaggcacttttcaatgaaggccttcacttcagggtttctgaccttgcttaaggcacaaggtctaacacctgtggaaacctttctgtatatcttggcaacattgtcacattcactataaggaatttccaaggtcaccatttctagcacacacatcccaaatgagtaaatgtcaaccatttctgtgtagttctcatcataaagctcaggtgccataaactctggagtccctagaacagaatgtgctgaatgattctttcccactatagcagccaatcccaagtcaccaattttgacctattattagagtattagaaagaagataaattagattacctgccaaaaattgttgatcccaaaacacaactaagtattaaaaaaatactttaaaacaagtaaagtcaaattgggatttctttttcttcaaacatactcaaaaggggtgtcgttgtttattcccaacaatttttctaatcagtattatcattacctgtccaatatttccattgacaaacacattgctgcagttgagatctctgtgtataacacaagggtcatgcgtatgcaaatactccaagcctttgaggatctgtttggaccatttcttcaaagctttcattgaaacatgcttatgtttcatcctatactgtcttaaattcccacttgtgcaaacctcggtgatgaaattgagggtacctctttcctcgtccctccaaacaaagtacaaagcaattatattctcgtttgttaaggatcttaaaagcctaacttccgaataaagcctctcaatcatggcagggtcatcgcttaagttacgtagcctcacttggttccatgccacttcgatgccttcctcttgatcaaaagctctatacacctttttcacagcacctgacccaagtagctcattgtaccgaccataccgtccactaggatcaatttcaacgaatggttctgaattgttttcgtcacattgatcgtgatcattttcagttggcatctacgtatgcagaaaatagaagttatatacatatgtataagttattacataatataatcaaaacaatttaaaaatagctcaagaaaacaagttacgaaatagaaacagtctagttacctctgtaagaaaaatctacacagaaacccagaaaacagagaatagagaagccgaagcagaggagccaaaaagtagtgcagcaaagaacgaatatatgggcaaagttaaagggtcaggatgttgtagacagttaattttaatactatataatttgtgattctgtaagcatataaaggtggtgaactagagttaaggtttagtttggtagattaaccatggttaaaacgccgtttaatgactaatcaatttttttctgaaccgtttaagggaaggtttaactcccgatgacttgactgaatccacggtcttagtaaacaatctctattaatgaaattgtaaaatgttattttttgaaaattaagagtatttacattcagaatgtgaaatgggttttagccacgtaccttcccgagttcactaccacgttttggttagcttttccaccatctaaacgagttctagattcatattcactcctaccagcctaaatttattttataactagttgttagagattttattataagaaaaaaaaatatataagtattacaattttattgtaaaatataatataagcacaatataagagattactattgttacatcatttttaaataatataatatataaattaaatagaaatttttatttcaaaaatataaaatgctaactttattactaaaatatcactactcgattacctaaacatttatacatttttgttttagtttattatatttttaccgcatgcacacacaatacat

SEQ ID NO: 381364 - DNA, 1101 bp, Cannabis indica
attattattaaaaaaaaaattatttttagaattgactttaattataattaagcatatactataaaaattaatttttaagtataattattgaacacaaaccaattagctagcaattattaattaaatttaactttagttaatattttataagaaaataaaatatattaataaatgaagtaaaaacaaaataataagcccaaggtaaaggtaatttattaattattttagttaattttgaattaattacaaccataactaaaagtaatgtaaccataatagttgtatatttgacgtaaccaattgaaaatcttatgcgctatttttttattattattattttcatatgatggctttgcaccatctactatacattctttgtgagcatttattcatgaagttcatttttttagccaacataaagatcatgaaccttgatattgtaattgattagcaagacatttattttaaaacattaattagcaagacatttttttataacattaattagcaagacattagagatctaggaaaacaaaataacgggtgattgattgtcaacctaaaaatattttttcattaaaaataagaaacatttttttttgatggaacatatgtttaaaataagaaactaattagtacataaagttggtgacaacttatatatagtgatgatattttcgtcgttataacctctatagatacaaaatgaagggtttttgtcgtcgctagagctataattttaagattggtgtataaaatatatctcaacacttgaggatgccattgtaagaaaaatagtgctaaggatgacaaaattcgtccctgaaaggtatcaaaatcgtcccaagtgcacattagagatgacatgtcatttctaatatacttcatccgtaaaagtgattattagggacgtcaattaattaatgtggttccttgataagtaacatcgatctgagacaacaaaatagttgtccctaataagtaaatatcatccctaataatcttgccttttgactaaatgtgaccaagttattaaggacgacaaaagttgttcataatctattattttatataaaatttatatattatttgaatttaata

SEQ ID NO: 381365 - DNA, 1553 bp, Cannabis indica
ttttaattgctttgcttacctagtattaagaattaactgttagtatggccattgttgatatctccatgttaagagtgtaaagatgcaatgttctatgccattggctaaaatcttctttcacatttcagttccatggtgaattccattatgctctctcaacttcattattatccttaatgggcataattccaagaaagatgggacaagtaatttcaatttgacacccacattttctcttcaagtaaataagatcattttggtatgctttcggtgaagccacgccatcaaggtcaatctcatccggatgagcctcgggataactggagacggccacaccaaagtagtcaccatacctagctcagatatgttgcacctgaaaattatcgtttggctaagcttctgcttatcttttattcgaacatttttcattctaaaagctaaaaaagagcttataaaaggtgaaacagttctcgaaagtcatgtaatgtcgcagaaagaggggtcgtgggcaaccgttctctacatcctctcgaagaggttgtccactccttcctcggtcttcggtgggaagaagttagaataagaaaacaacaccttgtcattgttaatattcttctcgatgattaagtagatatcattgaatgataacacattgttatataaatttttatttttagattttattttgaatttttagtagttataaataggaaatatgtatttttattaatacaatacattaaatacaaattgagaaaactatctcctatttggggatttttttcattgttaccttacaaacaaatttttattgtatttatatggtggttgaattatatttcattaagaattatatataaaaaaaataattataaacttatccatacttacctcaaattatgacaataaggaggatgatcatttcattccatgtatgtataattattagtccaaatataagatttgatataaacaagtaatcctaataaattacccaataaattctatattctttggctacgagatcttgtgggttgtttcagttttggaggaatggcgggatcaacatgattaatctgattggctaaattaatagtgtattagtcggatgggacttttagtattgggaggaacacaattattgggacctaccgtcatgagatcttgaggaggatttgagggggtagttcttctagttagaaagaatcatgttaattggtcaaaatgaaatgaacttaaaaaagactcgatgaaaatactaaagataacttttaatctatagtaataaagatttgatttttgtttttacttttctccttagttgttcacttatattcacaattatcagattcaatgtatatatatatatatactaggtgaagtacgtgccgagccacgtattgctagttttatttaagattttggtctttttaagattttgaatgtattttatttttaaagattacaaattttttgtttgaaaaaattaaatatttatattttaaatattatttaataatgtattaaaaataatattagtgtaattataaaat

SEQ ID NO: 381366 - DNA, 1377 bp, Cannabis indica
ttgatgaacacccctaataaaaccaacgcttgataaagggatggtaaatgaaggatggttttgattgtatcgattatgtctgcaagtgtgaacaatgtgagtgttatgccctagtttcatgagcacttcttacggagataaccataatgagtagtccttagccttttgcattatggagaattgaccaggtggaatcccttccaataggaaaaggatagtgaaatagaagaaacttgaagacccgaatctgcaatgaatggctacacacaagcagcgaaggaggaaagcactaggtcacaaagaaaaaaagaggcgaaacactcaaaacaaaggagggtccttggtccaaggaattgggcgatgaagactgcaacatgcggttagagaaacggctagatacctagataaaagtatggtcgagtgggtgttttaaacttagttgcaatttggtgacatattaacgtacatgtaagtttgtccttcattcttgatgtagtggaattattagattaaaaaatagtatacatatatatatattattaactttttaaatgtattttaagtaatttttataataattattaaagtaaaattaattttgtaccaatataatatggtcccaaataataatagtgtgaccaatatgaaaaaatagatgatctaataataatgttgcttctttggagaagctcttattttggtcagctatatttactgataagatatagtatatatgttatatgataaattttattggttctttgttatgtgcagagaataaaactaatcaaggctatagactttcaaggatttgttagggatgaaagattcgaccgcatttaaagaatttaataccatgacaagtacataaattataggtgggaataaatttaattattaagttgttgttgaagatgaacatattactttttattaaatagttaatatgttatagaagatgttaaatagttaatatgaataatatctttgcttacagtggatgataattaattttgctatttatttaatgtttaaatgtttgtatatgtgaatatttaaaaaaaaaatgtttgtatgtgtgaatgtccagtaataaaatattttcacatagtattgagtggtgttataagtaaatgatgtctaaatgaataattttcttaattttaaatatattctatattaatttattttattattaaaaaaattaatattaatttattatatttcaaaaaataaaaataaaaggctaattagcaatttttctccctaaactttggcatgtactaaatcatgctccctgaacttttttggccgttaataattctccctggactattaagattgttagatttaaggacttttatctaattttagtaa

SEQ ID NO: 381367 - DNA, 3368 bp, Cannabis indica
ctcatatgcagaagaatatgacaagttggcctccatgacaaatacacaggagatgtttatatactggggctactctggtataccccttatcgataaaccttcttgtgtttttggctccaggatagttataattcaaattttttttatgactttactcgtttttatgactttattcgttgtagatatttaagacatttgcaaagtttttgagaaattcgaatagtaagaataaagaattatagctatcttgaagccgaaaacacaaggaggtgaatttgtacacccattttagggggtgtaacacagaatctccctacactattatagtattttatttagttaatttgtggaagaaaaaggtttataatagatattaatttgtggaagaaaaaggtttataatatatatgccaatccattttaaaagtttgattatatgcaggagaaacaataattttataattaggcatccacacttaattttaaagaaaaatcaacctttgataaacataatctacatcatctgctcttagttctatcaagagatttgtattcagaacttcagtaacccctatggaaaatgaatgagcccctgcattctgttacaaaataataaataggtttaataaatacacttttttttttaaaaaaaaaacgtaagagaaaactaaagcacattgagtacagattctaagacataactggatgctggttattctttcaaaccttccttcaatacctatataatggtaactgtttcttctaattctattccggtcagcctgtgattatctttctttatcagtacatagctaataaaacctcaaaaattccaagtcacaaaataatatacaacagagcataaaaccatatatattttcctacttaatacatgctaacctcccaaaaattccataattgattatgcaggcaactccaataaggtgaagaacagaagcttggctgctcactaaaagcctcataaccaacaccaattttgttacattcaagcccatctaaggtaaatctgagtctctcaagaagcatccacatagaaaagttctttcccagattctgaattttgatcagagccacccttccataagagacatcaaatcacataataatcataacaaaatacaactgctgttctttattcaaatacataaagtaagtgtatacgcagttttattctcttacaagcataacaatcaagaataatcgtacctgtctaggaactacaaggtagaagtcctcaaatgatggtatatttgtgtacccagcaaaatctccaatcagattggctcttaaaaaattgtcattggatgaaactgttcgattttcaggacctacaaacacttcctggtagcataatagatgttgaaacagtttttgtcagcaagtcaaaacatgtgatgctaagtagaatctaacagcaaaatcacagctaacttgtacttaccgaaattttggaccctgtcttcacctgaattttaacactgaatcccagtgatcgctgaccaatactaaaaacatggaacctaaatgaattgaaaaatgtcacttaaaaagtactaattagcatgaagaaaatggtatccatatctaaatgaagaaaaataaggtgatccaatgaccataccaatcacctgggaagcgaacacaatgcgctgtattagcctttcccttcacccacttgtcaactaatgaggaaaaagatcataatagaaaagtcaaatctcgtgaaaaatgaactcaacaatgttgaatcatctgaaagaggcacttacaaacatttccacaagaagaaggcatccggcgctgaggtccacaaggacaacagattggctgcagagaaaagaaagaagaagggttcaaacaatgaaatacaattggagtttctaaaaacaaaaattaaatcagatatgatggaaatgtcaccgcagtatactccataatgtgaccactttcatctcgtaacctacaacaacatataaaacaacacaacagtgaacttgaaaattcttagtgttaatgacatctatatccatggaaaaggaaaaagaaatacaactttggcatatgtctaactcaaaagtaacaactactaagccaccatacagatacttaggctgcttctaatacactcattgaccaaaaaggtgtgcaaacctggatgtttttaagccggtggagaaaattcaggggcagtaatgaaaagattttagcatttaagtttaaagaaagactaattgattgatcacttacctctcacataccttcacaacttttgcactagcttctggttcacatttgcgtgtcttaacataatactcttccggtttatatgacacgtcctggaaaaatgagtgtttgcttttcaatttcacacacattgattcaatcataaagttcgaacatcaaacagaacatccaaactgtatgcataagttgaaactaaacaactttcaaaatgttaagactcatagatgttccattccataatacttccacatcttttgttgggctcttaaaatttcactctcagaaccaaataatcaaacacatgattaccattactaaaactaccaaaatggtatttagtacaagtatcagcaagaaagctgacttacccgaatgtatgtaagctcataaatggcataagcagcagatttgttgactgtcaaaaccggtggtattctcaaagtttgcatcttttgagtcgaattctcttccacttctactatttcagccacaattgatgcctctcccccactctataattacacacaccaatatatatatacataaatatatgtatgtatacaacatttataactgtagaaaaataactaaataactatgatctaccacatacaaatcggttttttcactaaaagaaacacatgaaatgtaatgccatgaaataaaatatgaaaaagagagaaactttaccgaaccacttggaacagccatgttaagaacaatcttcttggtacaattcaagttatcagagccagaattcttctcacatttctcgagtttcgatttggaaagaatctgaaccccaaacgtaatttggcctccaagaaatcccagaaagcaaagccctaacaacacatgattgtgttgtagtgcaaacccatttcggattctcatttcttttccttttccccttgaatttttttgatagtgtgaatttcaggggcaataaagaaaaacaaagcagagtacggttttggcgggttaaaagttgattccttgaagaaactgtcactaacggttcgttatttgttatccttattttaattaggctaattagcaattttcccctccaaactttaacatataccaaattatatcccttga

SEQ ID NO: 381368 - DNA, 1722 bp, Cannabis indica
attagtctggtgtgagcaagaatccaccttctttttttgaatggagagaactcttctattctagtaggtgcaaagaatcattagcttccctccttccacttgttatgatttgtccacgtatattaattttcatctgctcctttgtgtgctttctttttctcgcgtttcaaagctcctcaggcacattgttgttctttcctttacaaaacttttttcttttgtgtttctaagttttctattctgtttcttttctaatgaaattaaaatttaataataacttgatataaaagtgtcatgacaagattgattatattttttgtttttatttacgctaaaattcgactttaagttggttatactaaaaaaaactaatgacgaaaattgattttaagatctattttatattattttaaaatatacaaatttaaattattatttaataaaataaaagtttcgttcattagtttttataaaacacattgtcaaaaaaacaattacccaaatatatatcatgtgaagcacgaggaaaagataaacaatcatgagtttggacattttagtacgtaattttagtggaattgccactacagaagactagatatacattgtacttatttaattcttaaattaatatatactatataatatttatttgactaatatatggggctaggaatgatagtattgtattcatataatattatatttgatattgtttgtattaatagtttgtgtaaaattataatatctttacaataaatttgactccaactctgacctcgttcaagttttggggattcaagatcgggtctagggtttgagtttggggttcgaggtctgagaataggtcggggtctaggtccgaggtccagggtctgagtccgggtctgagttcaagtttgggatttggggctagctaggtttggggtcgagttcaagataggggccaggtctggagtctgagtctaggtctagggatttgggattggggccaaagtccctaacctttggaccatttgcaaatattataatacaagttaattatgggtcatttgttatgtattgaataatataattcacattgtattaaattgtatggtcataataattaatacaatataatattttatccaaacataatgttacttattatttaatatagtacgaatcttatagggtccaccaaacgagcctaatatatataacattaaatattatattaagtttaccgttatgcaaattatagttcttgtagagttgtattatcttgtatccaactaatgttgttgcgaacttgtgatattggacccccttctaatgataggctaaagatcaattgtgtcgttaaggtggggatgaggtgatgtgtgcgattggccttggctagaaatcaccatggggaggtttcgggcagcttccaagcagctcatattttttaatcccctcctcgatgaagtagatgcttgtcttcttgcaattgagaatgcagtttctcaaaaatgtctttttgtaatgataaaaagcgactcgaaaattgttatcaacgcgccaacaagaatatgttcttagtggaattgataattatatttggtattgtgttccatgcagtcattgatattatatttagtggctgagtactaaggaaattttaaaaatataacttaattattattaaaaattaaatttaaatatttatctctaatattaaatttaattattttt

SEQ ID NO: 381369 - DNA, 1204 bp, Cannabis indica
aaaatctcattcttgaggatgttctatatgttcctagcttcaaatttaatataatgtctgtaagtcgactaaccagcaataattttgttaaggttaaattctatactaacagcttttgtattcaggaaagacaccccaagactgtgattggcagaggtaaagaaaggaatggtttgtacatcttagatgacattgatgatgcagcctgcaacattactgttacagcagatacttggcattctcggttggggcatccctctcataaacgcttatctttactttgcaataaacttcattgtaacattgataatgttcataagaattctccctgttttgtatgtcctatggcaaaacaaagaaaacttccttttcccaaacatagtgatcttgccaaatctagttttgatttaattcattgtgatacttggggaccttaccatatcccgtctcactccaaccatagatattttctcaccttggttgatgacaaaactagattcacttggatttttttaatgaaacaaaaatccgatgccttccaaattgtcactgattttttatcctatattcgaacacagtttaaatgcatttttaaacgttttagatcagataatgcccctgagttagtgtttaaagatctttttgcaaaatttggcataatgcatgattttacttgtgttgaaactcctgaacaaaatgctattgccgaaagaaaacatcaacatcttttaaatgttgctcgagctctttattttcaggctaaacttcccatccaattttggagtgactgtatcatgacagcggcctatcttatcaaccgcacacctacaccacgccttaacaacaaatgtccctatgaattgctattcaaagaagtgcctcattatgagcacctaaggaactttggatgtctagcttttgctagtacactcactgcccatagaagcaaattcaattcaagagctcgaacctgtgtttttatgggatacccacaagggatcaaagggtatcgactatatgatattaacagtaaggaattctttatttcaagaaatgtgatatttcatgaacatatatacccctttcacaaactcaataccactaaagaaataattgatcctttctctaacattgtatttccatctccacatgtttctgacactcttgtcaatgatttccctactgttacttccaatcctgcttg

SEQ ID NO: 381370 - DNA, 1823 bp, Cannabis indica
tttttttattattactattatttaaagccctaaacttgtctttcattattagtgatttttatatatataaaattaattaattattaataataatatgtgatcaaaatatggatggaattaaatagagtataatatatttttaggttggataatgagttaatactaatttgaagagtttttttttttcgtcgataaaaaataaataaataaaatagtattaaataatgtataagatccgatatcaaattatatgagtagtaataaaacgtactaagtactataaaaaaatgtagtaactaattatatttatttgaattagaatttattgttatctaaatcgagacacattaatttgttactcaattaaatatttggtgtatttatctttattaaaacatttatatatgtgtgtgatttgggtatttacacattgcattgctttgttatttaatcaattattagacatttttccttgttatgtgctcctattgttgttctactatatagggggtgatgacatatacttcatatatttatttatttaatttattagttattaatctcttgtctctatcaaaacttgtctcaatggttaaatctattaggttcctcattacaatttttcttctttgaaattcatgctgcttattttggaaaaaatttctcacgttttacctcaattaaataattgcttttactctgtagaaaaatgaactttaaaatgacttttattacaataaaatcaaaagaaataaaccaacgtgtcttgattcaatttgtggatgcttctttatcggaaagggtggtatagtcaaaaactcaaaaatcatattcctcttttaaattggtttctcttttcataactacataaatgtactcttaaaaggatttttttttgagataaaaaaaaatcttttaaaagttcacttataagttatatacttagcatttaaaataatattatagtttaattttttaaattcatgtaaattgtaattatttaagacattttgtaaaattttaaaaaatttgaaaaaatatttaacacgttgaaaacatgattcaaataatttattgcatatgtgacataacacttttattttatacgtgtgtaaaatagataatttaaacactactttttatattatatataattcttaatttcacaaattttataggatatcttaaataactataacgcacacgattataaaatttattgactattttttttcctagataccaaaatagtaagagatgcatagatgcacttttttttggaatatattatagaagcatcctagttatattattttaatatcttgtattctaggcaaaaattaattatttttcttttgaatttcaatgttagccttttattttgaaataatatatcaaaataaaatatgcatacaattttaatttgttttagtaataatagagacacatttgattagtagctaatcttgaattttagaatattttcgtattatttgtacacttagttgaaaatatattaactatgcaaataatatgtattgtatatattttttaaataaaaatccaactctctttctacaatatacaaggatctagggttttggggtagggtgcctgcaatttcgtccacattgttgtcgggaggggatgggatttgtttgtagctagtaataagatgcatggtgttaaccgaaatttttggtaactacttaatcttttaaatataaattataaatacatgtttagagaatatacttttacctattaggacattaatgagatttagtccacgagtcacttgtgttattgttgggttttatgcc

SEQ ID NO: 381371 - DNA, 1486 bp, Cannabis indica
tttttttttttttataaatttgttgcaaattcatatgacgatttcgtcatttataaataaaacatgttctaaatttgttgctcttgataataatgaatcgtgtaaatttgcaataaagcatgtgtgtgataataatgggttggtggcttaatatatgttctcaatcgtaatgtatagcattagtaatagtatatatataagtatacaactaataactaaaacggaaggtcgaatataattaagcattatagactggtacataagattcattatttggaaaaagatgaagacacaaaataaaataaaaactacgtactgatcgatgtacatatatacgtacatgcaacataaataattaatccaaagataagatatggattaattaataaggatgtagttattaattaatttagatgacatgagtaatagctgcatgaattgcctctgccaggtaagcaacagttttgaagcccagaccagccatgttaattctcctgcaccacaaaataaatttaattatcctctaaaatattctttgagtttttatatatatatcatgatcattgttacctacatatatattaataatatataattaattatatttatttacctcgcacattttataatttataattacttatttaggacttcctctcacatttttttcttaatttttcgttgaaatatattttttaatgctcacacaaaatataatggaatttaatgtaagtcatataaactactttaattaattacccatctgaagatgtatagatatggtactctttagtcatgaattcgacttgatctggatttaagcctgtaagagagtacattcccacttgttcgattatgtggttccaattaccaggtgtgcctgtaaaattttgccattgaaatataaaatatatctttatgctttatactagtttttaattttttttttcttccttctcatatttgttaaaaaatatacctacaaaataaaaataaaatacattttaaatattataaacaaaaattatacaaattcattagaaaaaaattatacataatttaaaaattttattaaaaaaattaaaaataattattaaaattaacacaaaattatgtgaaaaataaatttaaaaaatattaaagtgagttttaaaattaatataagttaattattttctaatattgaagtgtatttataattttatgggttaaaaaaaaattatttaacttaaaattcctagtttccattaaaaaaaatgcatgatttattaattaattataattacttgcctttctcatgcaaagtatgaacaagtttttggcgcaaacagataaggcgagcagtagttttcttcaactcattactccactcattatacatatacctgcaaattagccatatattcactaattttcaacataacaatgaaaaataaatataataagactaatagtcactgcagtaaaataataacaatgagaattt

SEQ ID NO: 381372 - DNA, 5271 bp, Cannabis indica
tgggattttgttattttatttttcatttagtttcaatgtcaactttgatgggtcaacaactacaaacattatttccaagttccttctacatgaaatttggggccactaatgtttggagaaaaacacaaaaagcctaaatagagagaaaaatattgtctttaatagaagaagaagaagattccacataatcttattcaaatgtacattgatttctctcatccaatagaaactcaataactcaaattccatcaccatcaaaatatacacataaccatcttcccccaatagtcattagctagttaacaccttgatcattatttttctttttcaatccacaacaaactcatcacctttttccttttccattagttcaattagttggaccatcctcccaacttttgtttttattttttttatttcttatttttgatctttttccctttttcttaggggtagtagtagggacacacagacaacacaatattattaattgggtaatactgtcttcgttgtaaagttatataatgaggtttcaatgagtgataaagttattgccacattgcaaaagcacatggcttgtccttaggccaagacatagaatccaagaatcgtgaacatgctaatcttgactcatatagcctaataataattcttgtttagatacctctcttcaataccaagtcataatttgctttgttgtttaaagattattcttaataggaaccaattgtggtgaaaattttattggattcaaagattgaagaggaagtgatgtgatgtttacacaatgtcatataatgaaaaatttacacaaggttgtctaatcaaatttatcctaagaaaaaaaggtcatctctttacaaatttcgtatttaatagtaatactaaactaactaaacaacacctgccaatcccatccaaccatacttgttgtccctgttgtccctgtaagagaagatttaagcatattcaatacacaaagctcattttggtaaattaattattataaaacaaggcattggactcatttacctcatcaatatatctctgccaaacttctcttagctggaaaggatccgccattgccattaccattgccaatgccgatcaatgcccaatggcataaactttctgaagaaagttcattcattcttctctcactcacaaaccccacccaaatcaggtgtgtttgtttttggattcattcttggcagtttgtctttcgttcttgactaaaattccaattcaaagtcccactttcggaaaactcgagtgggcattatcatcatcggaatcactccctgaactactaccagaatctgaatctgtacaagagagaacaacaacaaacaaaccaccacaaaccacaataagtaaagaactaataatgagtgtttttcctctgcacaaatcccaaaacaatcataattgggttataccactggatgatgaggaatcactacttgaactgcttgagctgctagagctactactcgcaccaccaccgccgccaccgacattaggatggtgttctccaacatctttctcaatctcaacaggaggaaagctactcattggcatatcatcaccaatatcaacatcttcatccctagcttctactcctcctccacctcctttcttagccttcttcggctcaggtggactggcttccatcttttcacttgccctcgattcctattatagaaacaaatcaaatgtttacaattagacattgctaaatcagaattgaaataaagaattaaatttacgacaaagaaagattcttctactcaccacattgcctttatgggcattcatgctatggttgttgttgttgttgttgctcccaattgtattgttcatgagagcttgccgtttaattttgctgaccatcttcttccaattagtaacaagacgatccaattcccagagagtctctgtgtcgacagcttcaatgtcgagctcaatctcatcaccatcttgtttcaaatgcccatttctcttcttaatgatctgaacaacttgctccatcttctcctgtggcaaactctgcaacccaactcccaatctgtgcttctcttccatgttcatttccctcttgttaggatcctttgccttcggcttcggctgctttaaaggcttgactggaggagccttcataggggaaggtgtacggactggtgattgaacggaaggaggcgggagaggaggaggaggagccgggtttgacgagctcgccggagcgggaacccgttcgggttcttgtttcttctctgctctgaacgaaggctcttcacgtttaggcctctcgggctccacatgatcccaagaactcgcctgtaattcatcttcgtaaggccgttctggtccaggcccttcttccaattgctcttttagaggctgatacagctcctcaaacctagccagaagttgttcagccatggcgtaaacatcgtggcctttgggattataagtcatggcgttgtgaaacgttagcctcacatcagatgcaaaatccacaggcgatgtgtagagattcttggcgaggttcgatttaacggtacccagatccatcgggcgtttgattatgtcgtggtaatcgtggagcccctcagctagggcatcaacgggcttgttaaagacccatgcgtgcttatgcttcatcagtttagataatatcggactgcaattcttcatcaaaattgggttatcccaatgcgatcgcttgaaattggagctcgattctttagcgaattgattcgaattcgagggaaaaggacgctttaaacccgatttcttccctggtccagatttcttaggcaaagtaacgaattctcctgtatcaattcggttctgcaattgtcgagttcgatcaagctccattattagccgattcttcagctctccaagctctttcctagaaaacgatgccatgttaaacgatacatattgaggattacccaaattgagctcgcccgatctccgatgattgatcgaagacgcatcgtccgacgccgtctgggtcacggccgaagactcatcgatctgacatcccccgttaacgtcacctgcagttgcatgaaattggaattgcctcttagattttttctgcttaggaactttccccatgaatttcgctctgggttgtggccaattggtctcgtttcggttcgctaaaacggccgaagccatggaagtacggaatcagatttggccttctctacgggcccggcggagctccgacgagggtttccgaatccaattgaagcatacaccaccatgaataaggtcgtttaagttcctcacgcgccaccaatcaaccccacgcgccaccgatcaaccaaattattacagaaaattggcttagaagaagcctagggtttgaaggaacttaccctaatctgagcgagaacgataagggggctagggtggcttcttaaaggcctcgagatctacccgacaaaatttcgggcagattaatagacgaagattagagttcgattgttgatccaacggttaggatcgtcttctccagctgcccgggattgtgcccgcgtgatctggcacggacggttgttatgcgatctttgttctacgtggcgcaatgtcgttcatcggatgtataaggagattccttaaatgtgtgaattctaatttggatttgaatttgaggcgaatctgtcgtgcatttagggttttcaaatttctgaggctgtgtggggtccaccagtttgatgacgtggaccgaaagccgaatttgagctcagctcaggtctagcggcgtgaggaaaaagctacgcgcacgagggcggtgactgagtgagttggagcgcgtgaagatcaccatcataaatgcgaggctattttcgtacatgtgttcaaattattgtctcctaagacccgttcttttgcttccttaagttactaaattagcctaaaatatgattaattgacgatattgcccattcataatacagagatttccagagttttaagcaatttaatttaaatgtacataatgaaaaaaatatatatcaagaaatttatgtacaaactttttttaaaaaaaaagaaatttatgtacaaattgcaaatagagattaataatcaaaaaaataatggctggcttttttattattattattatttttttagtacaaacaataatggctggcttgttaaaattttaaaatatctgatagtgaaaaaatagatttttattttaatttttaattatatagaaaattataaatttctttccaaatttatgttatgttaatttttttacaattttggaaatttgtttccttatacgaatatattgttttatataataccaattttataaaagaatttttttattttcactttttaaaacaacttttttaataattttatagaattctacttggaaattcctattgcaattaacggagcaacttgaattgcaactaaaatctatatagcaatccacataaaaactacaagagaatccactttaaaaaccccaaccgtaaatttaaaaaaaaaaattaaaataatattatataaaataatattatataaaatattttctcttttataaattgaataaaagagtatcaccaaattttctaagggcatgtttggattgtaattgtgtataattagaggtaattatataatttagtatgtttgtcatattattgtcagattatgtaattgtactataagtgtgtaaatagagataattgagaggttccaattatactctttaactcctacagtcttcataaaaaattgaaatgatactctaacactttaatatgcaaccaactaaaggaatagaataaaaattatttatttccctttctattctatttcaatttcattatctacgatcaaatgccaccttaattactatatttcttaaatgaatattagacaatatctttaaaaggaataatatgtaagacaaatacttaaatccaccataacaatatcataataatttttttttgtaaggaacaatatcataatcatattttggtagttaagtaaatacttaaagcatttttctttttttcacatttcacaagggaaatttcatttttaatgcttaaaaaaataccttttaacaaaatttagactcataattaatttatacaatttaatgctattgttttcaatttctacctaaaatgccccctttcattttccttctctctttgtctctttttcttcctcactctctttccctcaaactcaggcagaccaccaaccaccaccact

SEQ ID NO: 381373 - DNA, 1671 bp, Cannabis indica
ctatcaagaaatagacagaacacaatagatgaaaaaatacagcttatcatcgagaaccaatccataaccaatcaagaaagagagacataacacaataggtgcaaaagcacataacttataattaaaaatgtatcgagaacccgtcaataacacattgacatagaaaaaatgaaaaatttcaaacatagcttatatattattgaaacacaattgtcaaatagtcaaaaacacattgataacctatcattaaatagagagactatataaatcatgcaaagttttagcaaaaagatagcaacatactatcaaaaattaaacaatacaataatagtagaaataaaatcatacccggccgtttagaaaatattggaccaagtattttcttcaaattgtcaacacttccactagtttccttgctactttagctaagtattctaggtacctgaataacatgcttcacattgaacttctttccaatttataaaattttctctttggcccaatattgtaatgtcagtgcgtagccataaaatgtgtacttcgcctcaatagcattcttcttgtctatattagccttcatttttaatatgtctttgtgcacataagacataattctgctagaagatcttttcccccaaagaatttggaaaaagaagctaatatcctcaacaaaactcagtataccactcgtaatatatgtgttcttcgcacgatctatgagaaatcccttcgcaaacaagcacaaccctagcagttcaagaattggtcgtaaatatgtcccatcttcacgtttccagacttgttgaaataaagattcaacgattagtcatgtccaatgtgagcattcttctcctcatctgatggaccttgcatgaaattcaggctagttatgagagcgaactcaaccacgccaaatcttgcctcatttttgctaatgtacaatcttaattcttccgccttctcaacttgaaccttcattttttgcaacatcaattggtgcaacaaaattgaagagaaaacagaagtttcagccttccaaaattagccgaagggattccctacaccctgtcaattaagtcttcatgtttttcaaactgatcaatgatagtattgaatattatactcctcccataatcacatggctgtaaagtgggttgaagtaggagcaataagctttggagctatttgtaataaaaaaaaaataaaaatgttattttttttacaataaatagaaacaatcgatttgtcattgagaaccagtcgataacccatcgacaacaatgtaaaatcaaacatgacaacaaagatattcaatagtaaatcatatcaagaacatattgagaatccatcgataacctatcgacattaaccaaacatggaaacatgaaaaccgatgcttatccaatcgagagcccatcgataatctatcgacaatgaccatacgtaacaataaaaatcaatgcataatcctattgagaacctatcaaaaatcaatcgacaataaccaaacttgcccattgattgtttacaatacttgatcctattgagaataattagtcgacaataaccaaacatgacaataaaaaaatacttaatcctattgagaacccatcgataattagtcgacaataaccaaactttatacataaaaaaataaatgcttaatcctat

SEQ ID NO: 381374 - DNA, 1206 bp, Cannabis indica
agcatcacaaaaatttctcatttcaatttgggaaaattttacatgactcaattctagaacttgatttaaaacacgagttgattgatgacctaaacgcctatgccaaacattaactttagagatagaacttctactaattttggactgactaacacactgactattagagctaacaacagtatttgaaagataacatgacttaggctgagattgatcagactttatggaaagaaaacatgaagattgtgactgatattaaggtgaaaccagctgatataacccatctttaagcactccttgaagtagcaccctccttgaactttatccttcaccaaacaataatcagtataaaactcaattagtatattattatcatttggtaaattttgaaatactaattaattttttgcaattttaggaaccagaagcatatctttcagtagtaatttatttcttattttagtgttcagaattccatttcctaatatatgaaattatgagcttattaccattaccgactgcggccttttatttaccattgtagtcttgtttctatctcatgttggaagcatcagagctgatgtggttgctagctccactgtcgacaaaccacgcaatactttccaagattttaggagttgcaatgaaggcattgtggctagtttgtgttggtttattctaagactgagggttattaggatcacatctcatattgttttcatcaaattgattatagcacacagtagcagaatgaccatacttgccacaaacttgaaaagttggtcttggaccatttgagtgcccctacctcgagctcttccagaatttcaacgattgctagagaattgacctcctccattgtagttttgattttgattagagaaaccacaatgaacacgtccagttgaatgtcctgagttggttttggctgccagattagcttgtggagcaggaccaaaaactttgctccctatgctcaaagtctgaagtatttatattttggtaacgtcctcgcttcaagcctctattgggtccttacacccacggaatgaatggctcttgtacacgagtacgtcgctctggctgcttcatggattaacggctgaccctacagaccaacacgagtatgtcacccatcctgaaattaccccaagtcaagcacgcttaattgtggagttctttcgtgatgggctaccgaaaaacaag

SEQ ID NO: 381375 - DNA, 757 bp, Cannabis indica
acgagggttggatgagaagaaacgccgtcgttcgagattgcaaaatcggtcattttcttctccatctccgccgaagagagcaggttgcttatggtgttctccgaaaaaggaggctcctcgtaggaggagtaaagaagattggtcaataagcagtgatgattggagcaagaacgatgagctattgtccgatttggggtctttctcgtttaaagagcaacgaaagatactgaaaatggcaatgaaggaacaacagaagatcagtcgagaggcacaaaaaattgtcaagatggctaaacaagcctctgcaaggatgaatgtttctggcatcgatgatgatgagctaagtgactgatgttaaatgttttgactgtaaatgttgatctttttgctcacttgctgattctggtcatattatatgaattaagattcgaaggttgtgttctttgtagaattgtagaaatttttaaacatttgtagaaaaagtttactcttatcaaaaaatatatatatattactacttgctattctgaaacatttatgaaatatatgttgtcctatttgtctatattaatattctaagtgaatggaaattgcaatgatggtgatccagtccaggggcgtccttctcaaattttggaggaaattgcctaattcaatttagtactattatgtgttttattggttttcatgaaatcaaaagtaattagctatcaaaaccgatagcaactcagttgggacatccccgagctgaaagaac

SEQ ID NO: 381376 - DNA, 4424 bp, Cannabis indica
ttctttttttttttccaaaaataacatatactttacgtcatattttgttagaaaaacatatcttgaaaattgtaatcttcgtacatatgatctgtttgtaccataaaataatatgtcattattatagtatgagagagagaccaatggaccattgatgattttccatactttgtcagaaaaaaccatcaaggttattatcaaataataaaaataaagagcacgactattaggtactaattttctatattatttattaaattaaattgttttggagtgatttgaactaataacacgataccatccaccaccacaagtattgtcttccactccaatcaatcataataacaacattgctttttccttgcttaaaggttattactttctccaaattaaccagagaaaaatgttcaactcaagagggcttcttgctctgaacttgttcaccatagttgtcctcctcaatctccatctgggtattcttgtttcgagcttctctaatgacccacttactcaacagaagcttgatagagttggaaagctccctggtcaaactttcaacgttgggtttgaacactattctggctatgttacagtgaataaggagtctgagagagctcttttttattggtttattgaggctcttgaggatcctgattctaagccccttgttctctggcttaatggaggtcaaagcttcatacttgatttttactctttttttcttcgtttgatgattaagttgacttttagtagtgtttgtgataatgcgtcaatgacatttagacctttatttttgattgtttaatggcagtttatggaggaaaaaagagatactcttacttccttttcccactaaatttggttttctaagctgtaacttttcattgatcaagcttgtgtaatttgctaaaatgttattatttcaaatgtgttcttgctcttttgtttgatttgtgtgtatttgctaatttgttaactttgacttctttcaggtcctggttgctcatcaattgcttttggagaggccgaggaaattggcccatttcatattaaaccagattccaagaccctttacttgaatccttactcttggaatcaaggtatgttcatgttataacttctacaaatgttggtgttaatggtagatattattactaagatagttgaagtttaaaattaactttgattaataatgatcagaatgtgttattttgtttactacaaccatgatggagtgagcataattaattagatgagaatatgtatcagtgcaagttagttaagggcactgtatgttatcaagttccattggattattttccaaattcaagctctacaatatcgatttcgccttgatttatacaagtcactagttgcagtttatgctccttgttaccaaagtgattatgtgcattggtttgagttgagtatgtaatttcgaaacacctgtgctcatttttgtgtgtgtttctctcttatatgatttgacttcatacgattcgatttagttggtttaattggacagtgttttaaatacttagtgttaacaatgagctgttcctgcctatttggctgcatagaagcccttgttactcaattattaattttcttctctaacttgctttaccatttctacagttgctaatcttctgtttatcgattcgcctgttggagttggttattcgtattcaaacacatcctctgatttactatcaaatggagacaaaagaactggtataacactcaatatcttctgcactgcaaactatttatgtgttggtagcttcaaaattaattcatattatttctctctttttgcagctgaggactctctgcaatttttattgaattgggttgaacgttttcctcagtacaaaggaagggacttttatatttcaggagagagctatgcaggtgattagccttctaactcactttctgctgatttaataaaattaagtaccaaatatctctaaattcaattgctaaattcatgtttgaaccaaccagttccccaatttcttcatgctaaccatatcttatgcacacttacattcatatatcataaatactttgtttgaattgttggtttcattcatggacatctatgtattaggacattatgttcctcagctgagccaagcaattgtaaagcacaactctgcatcaaaggaaaaagcaattaatctgaagggctatctggtacttgtttcattcatttctctaggaaaagttccagttccttgtgtatcttgtgagagtttaaagagctaagatatttgtttaatgcaggtgggaaatgctttaaccgacgatcaccacgatcacttggggcttttccaattcatgtggtcagctggcttgatatctgatgagacatacaagttactaaacgaactatgtgtttctcagccttttatacattcatcaagttcatgtgataaagttcttgacatcgcttctgaagaacttggcgacattgatccatatagcatctatacccccgcttgccatgctaatggtagccaaacaaatcaattgcggaaaagaaagcatgtaagtatgctattctaaactgcttatcttatttaaggagtaaacaaataattttctctgctagttcttctctgcaagtcatttattatgtttcatgaggtgaataaatagttatataagtgctaatattagaatggggtaaatagacattgataatctgcctttcttttacatacaactttttacagtataagctctttgagataacttttgtaaggtgacatttttcggttcagagtgtcatttgtagtactaccatttcatgctttatgttatagattactcatcaagtttccatctgtgtttagcttgaaccctcatatccaaacactaaaaatagttagctgcagttactatttttagtaatattagaatgtacatattgatcgtccacagttttatgtatgtaatcaccatggcgaattatctacactatcctaaaattggaaactgaacttatgcttttgtgttttaagttttgatatttttgttgtattattcacttttaacactggttattactgttgtagattgttggtcacattagtcagaagtatgatccttgcacggagaagcattcgattgtctacttcaactcacccgaggttaaacaggcacttcatgtaaatgtagattgtgcaccatcaatatgggagacttgcaggtataaagcatttttttgtgatgattggaatccatccatttcttgttgaacaattctgtagattctgataatgtacagtacagctgctcaagttttacatcgattcttgtcatgtttgtgttcagctgtacttgactgtgaatcatcagtttcttaacaagatatatgataatggattctgatggtttgacatcaaatttctaaactttcttgatatgatatgcacattatattctatgtttttagagctattgttgttgatggcatttggtgctgcagcaaatgatcaatcttgttaacttcactttcatattctttgataaatagtgaggtggtaggtgccaactggaaggattctcctatatctgtgcttgacgtttaccaggagttgatagagtcgggacttcgcatatgggtgctcaggtaccatttcaacacctcaacttctcatggttttttctcctcttgttacaattacatggtccaaaacatgacatgtttcttaaaataaaattttgaccttgtttaggaactctttttcagctagcaagcatttccattctcccatttcggtttagttttggaaaatattagctaatggttgtaccctgtctcgattttttgtatgtgacagcggagatacagatgctgtcatcccaattacatctactcggtacagtatagacgctcttaagcttccaactcgaggcccatggcacgcctggtatgatgatggagaggtaagtaatgctcataataaaacaacattcgcctactaaaatcttctgatataccaaacgggcccttatatactcgagttagttgtcctactaaattgcatcagtcctgccaaaataatcataatcttgccaaataaataacatgattaacatgtaatgctctttagacaacatttggttttaaacatgtgcaaaatgatcatcaacaggttggaggatggacacaggagtatgatgggctcacttttgtgtctgtgagaggagcaggccatgaagtccctctgcacagaccaaaacaagctctcaccattctcaaatccttcttggccggatcatcaatgtcgtcgagtctcaagcttgttagtgactcatgaggtttctttatgaattgttggtggaatcaataacttttagtaattccacaccatgctattattacagctccacaaaagtgattttttata

SEQ ID NO: 381377 - DNA, 3304 bp, Cannabis indica
cataaaacccaacaacttgggggctattttggataaatgtgttgaaatcctaatcacctatgtataggatttttgtcatctcaaggaggcgaccgaaagcatgccccacctcccctgaggtgcttatcttggaactgtcgggggctccgtcggccttctacagaaaggacacttcgaagtctaatttgagagacagatgttgatattatctttctctcagaaactaaggtgagcacggactctatgactgctgttttaaatagaataggctttttaaatcattgttgtatacctgctatgggcattgccggaggattttgtattgcttggagaatgggggtgaaactaaatataatggatgtttttgaattgggctttaaagctaatgttattttgactccgggttgttcatcttgggtcttactttgtatttgtggccctccttatggggctctgaaaaaatcttattgggactagctcctcaccaaagttcaggactgctctctaccatgggctgttatgggtgatctaaatattattatggaggcaaacgaaaagataggagggcgtcccttccatcctaatgagggactcattttgaaggaatttttgctcattttgggcggtgtggacctaggttttgttggttccccttgcacttggaaaaatgcgagaaatgctacttaccatattcgtaaacgcctggatagagctattgttgattcttaatggtggatctacttttctaatgctttggtgaaccacttccctatatatggttctgatcatgcaccactttgtcttaatgtgtggtgcaatagagaaaaattttgttatccattccgtttcttggaagtctggactacaagtgctgaatgtggtgatgttattgctctggcttggactaaaaacacatcaggattctgcggcaataaactctgtaaaaagttacagattacgaagcaggacctcaaaatctggaatgtgaacaagtttggcttttgtgataaaagactgaaagaactcaagcacatccttggactgatccaaagtgcccctgtcttgcaaagtaatcttgagaatgaagcagtcattcaattggaaatattggaaatggaggctaagattaaaaggctttggaaacaaaaatcaagagaaaactggagtaagtatggggacggtaacacgaagtttttccatgcttcgacgattgttcgacaaagacataacaaaattagttgcattgaaatatctcctggctcatggttgcattagagagaagatattaggaattattttcaagctaagtttcaagatctgtacaagtcaacaaagccgatgattaatgacgaattagattcacttttgtggataaagttgcacctgaggagaatatctttctgtgtaacatccatgatgatgaggagattcgcgaggttgtgtttaaaatgcaccccttaaaattgcctggccctgatggcttcccagggattttctaccgcaaatattggagtattgttggtaatcaggtctgtcaaacggtgaaggatttttttgcccatggaattatgcccagcgaaatcaactagactttcatttgcctcattcctaaagtggcccatgcaagctctttcgataaattccgtcccataagcctttccaacttttgttacaagagtatttctcgaatccttactgatcgtttgaagagtatcatggataggctagtttctccttatcaatcggctttcatcccgggtagatggattatggaatgctccgtcctcgctcaagaagtgcttcacgcaggcaaaaacaagaaaggcaacgaaggaatcatggcagttaagagtgacatgagcaaggcctacggcagactcgaatgggtcttcttgcacagggtcttgaaagctaacggattctccgacaaagccattactctgcttatgtcgtgcgttacctctgttagttactctattcttctcattggagcgcctcttactccgttcaatcctaatcggggccttagacagggagaccctctgtccccgtttcttttcatcttatgtagtgaagtgttatctaagatggttctaaaagcagagcatgacaatgaactaaaaagcatcaagatttcctatggagctaaaccaatatcacacctattatatgccgataatgcaattttcttctgccaggcctcaaaatcaaatgcaaagtgtctcgtggacatttttgataagtatgaattgtggtctgggcaaagaatcagcaaagataaaagcgggattgttttctcccccaacacgcaaaacaataagaggtctgatattttgaagttactgagtatgcaaaagctaaacactaaggagaaatacttgggcaaccctttcttctttactggtagaagaaaagatcactttcattttctcaaacagaaggtgcttaatcgtattgagggatggaaagctaagtgcctaccgcaagcctctcggactactctagtatgttctgtccttcaaagcatccctacgtacttcatggccacgactttggtacctgtatctatatgagaagagttggatagattggtggcgaggttctagtgggcgggttcccaggaagataaggctcggtattgtgctctaaaattttggggtgatatctacaaccctaagaactgtggtggcttaggtattaggagatttcatttcatgacatgaacatagtcctcattcctaaactttgctggatggttctccaacagagagataaactatgggtgaaggttttccgtgataaatattgttctagattcgatgcttgcacagtggaaaaaaacgaaaatgattcaaaagtttggaaaggtattcttgaaactagagaagtatttattcaaggggctggttttgtaatcgcggatggtgacattgacatttggacaaaacagtggatcccgtggaagactattcaagagactaaaagtagctttagctacaactgggttcatgctttccataaagtttcaaccttttcatggagggtactcgccaatggaatgttgctctcatccattcttgttttgatcaggatattgcagagtcgatccttagaattaaacctccacatgatggtaaggatacactttttggaaagcctcaaaatcagggttgattttagtcaaaagtgcgtactgtgtttatctacataggaggttccttggttctaaaattgtaatgccctaattcattaggcacgctacccaagatacttacaaaaccctaatcccctaaacgggattact

SEQ ID NO: 381378 - DNA, 6495 bp, Cannabis indica
tgcatattatcaggactcgtcccttgaatacgaaaaaaggcatcctcactttcattattcgttttgtcatcaatacctttttctgcaagaaatttcctatatcctgcactcttacctccctacaagagaaaaagaagggaagaaatggttatgttgatttttatattaaatctttcggttagtgggattttagaggactattttgaaatagaaacaacattaagtgaaggaaatgcttgggaggtaggaaaaccttgtaaataattaacatctggaatataaagaagaactgatctggctctttattttgtacaacttgtgcctgaacatgaaacgtatgagataaataagagaatattattttgacacgtaaattgataatgtctaccatgggaaaagtgtcttaaacaaattagcatcgtattgagaagatagcattgatactcagcatttctcctctaacaaagaagcacattctcatcataattagaccaaaaaagaaaattaacatttttagaaatgttatctgtatgaggggctagataggactaaccataacgggatcacccctggttgaatcaacaacggaattcatatgatagataacatctcttctgtcttcctgatatcagaaaatacaattgaataagttataattttataagagatcaccaagaaacttagaaaaaatggtaagtaaaataaggaagcattcctcaaattacatagaaaaggaaccattaagaatttcaacaaagatcctcgtctgaaaaatcatatgggttataactcaaaaacattttagcatttacgatcacgcccctagtaatctcataatgaaggtggtcaaaacacatacttgtgcatgataaaccatccttaccagtgtgctctcacaacctagccatgcataaaatagattttcctcccttccattgccagaatacgtatattgcacgacatagcaatcaccactgaaaagctttcgctgttctgaaataggaaccagggacagttcatccccatctacccgccaaacctggattgccaaaaagattgtaccaaaataaagtaaatgatcaaataaaatactggcaaaactgtgtctgtgagatttgtttcagtaaaacttactttaagggttcccctgcaatctataagtggctctatatcttcttcaggaagctctttcacctcataaccattttgcttgaatattgctggaagaagaaaaaatttaattatatcaactgcattgtatcagaaccttcaaggtcaccacatcagtacatatgctgcatttctttgaacttaacaaagttagtgaaagaattaaacctgccactttttcccggccttcttcaaataaccgaggctcaacctttagaggccaattagcaaagtaagacctaaatttggaagtttctaacccttcagttatcaaagataaatgtgtcccagctgatcttccttggtttctgaggaaatcctgtaaccagctagtcagtaatcacatagaaaatacagataagaattagtcgttacaccccatcaaaacaaaagggaattcctcttattgtacacctcaaaattacttattttgacattgtgatatgatgatagatttcatattcacaaagtaatgataagatgataaattcatgatttcccaattcaatattgaaacatggaatggtaaaatgaaatcgataataaagtcactgtcttccatgagtgcatgtttatgtataacagatagtgagggcagaggaagtctcacctctgcagctgaaattgatgtcttccgctctgtgactgatgtaagtcttcccatccaaacaaatatttcagcttcacaatccaacatatagcacttgtctgcctcaagcacttctctagcaaatgaatcactttcaatttgacttagtttaccctgataggttatcctgttgaaaaataataataaaacaccacctaagggaaaggcacgaaatacatttaaaagggaaggccaacaaaactaatttcataattaataggacttgatatggtatactgctaatcaaagttgatgcagttattctcttcacatgtattctaagtgtcaattatgacatttatcaagcagcttgaagagaacaaccatcttattcaattgggacgtaatggagtacataatagacatagttactgtttgaaaattatacacatgaagcttccatttccaatttaaatacttcctcatatttgaatgaatccgaatactaagactaaactagagtatatgtgtttctacaaacattcttaaacgcaccaaaatagtttaacggattggatatcagactgatcttgaaagaaagaaggtgactctcggggaatgggagcatatccaccaaaaaaactccagaactcacccacttcagaatcgccaacaaactttccatcctctgcagaacttgaccagttaaaaaaaatgttttcataaaagcaaacaaggaagaaggaagaagatgccaacctatagttgccacctcacagtttccactatgcttggtgtctttgatatattgtacaacctccaaagctttagctctttcttgagtgctagaattgcacccactaaagaggaatatttttgatgcagtatcaagaacgaacacatcattgtggttcaaagatgaccgagaaaatggtacctggtgaacatgcaaagcatatagatcggtaaagacacacacatgaaagtaatttatatgattcttgaattttttttattactgtttaaatagaaaaataaagtaaactgacagaagtaagccgctgttacatcctcaaaaaattgatggatgcaaacctattgaacttaacgacagcaatggcaattcttaaacaacatacagttaataatatacatcttacttctttaacatgaacaacatgatcccctttgcaagttaacaatctgacttcatatgtgtcctcatttgagtgccctttttgagaggaatatacaccttcaataggtataatacagggtttgaagtatgaaagaaacttttctgtttcttggccttgaagttccctgtactgtacagagcaggaccctagggcagcatctagttcaagtgctttgtctgatgccaaatctgagtccacctgccaatgagattaccaaacttaaaacgtcatgaagatttggtgattacatcaatgtccaatgtttgttcaaattttatgtagttcctcaaatataatatctcaatagattctgtgatgcaactgtgatattcatttagtgaattgcgttactgatataagttttaaagttgtctcctagataatctcattcacattttttttgaaaaaattacccaataatgtgaaacagctttaaatctatggaagcatgaacaaaaatttatggatttttctgccttaagattgacaactaacaattaattacatgtgtgccacaaaaaaataaaataaatcaaatgtgcaatagtaattgagtgataaaggacaggaaaaagaataccttgtttgtgtcatttcctagccaatagtgaatgtcatgcagaggaggcccactttttggtataattgtctgtctcaggcaataagcaagtgaagttgtcaaattattagcatatcagaagaaatattggagtgaacatgttgcaaatatttgatttagcggggcggatcattacaagatatgaatcaggttggatcatagccggatcagatccgacccgatccatttacaattatacaattagagttgtagtgaaaaaaaaatcttaacaaatttctgatatcaactttgattcagagcaagtgaataagaaaacaaaagagagagtgagagagaatcttcacgcaagcattaaggcttcatggccttaatggaaaaataattagcaaatctgaatataacttacatgcaagataagatatgaatttccgctgtagaacttcccatatgaagtctttggaacagcaaccagttggaggttctccacacaccaagtttctaaaccactagcattagaatataaggatgaagcaacaaacttgaacagagaatcaacattggttttgtatttacatgtaagaaaagttagtacaaggcgtagctactaactaggaaacaattttgagagaggaagttgccggtattaggtgaacatggattacacagaaataagtaatggtatgtgtaatctatttcatatcagtatcaattttcatccattcttggctgaaagagacccaattattcatatacatttatgacttaaatgaacttgagcatgagccagttttcatgttaagagagttaagtactattgttcaaccagtggcaaaggaattaaattcatactataaagaagcttccacatgagatcttatgttgtacagtattattatttcataaaactagatgtttccagttaccagagaaaaaatctgaaacactatgctagtgtatcaaaaactcttaatgcaattataatatatatataggtatatataattcaataatgaaaaaacacacacacaagaaaggatacggttttgttcctgctccttgaaatgcttgatctgtgtctttagcatagagagacattgtcttgcatagctctggtgcccccacagcatatgattgcaataacttctttactctaatctctgatggttccaaaaaagaaaaagagctaaattgtgaaggatgaatctgtgtctttcagtctaactgacaaaactactcaataaaacagaaataaataataattagttcagcaaaaagtcatgccaccaaatatgcactttcattttggtcatgtaatccaatactgaccgcataaagacagcaaagcacccaagaacaatgagagcagtctttctacctatcaaaaaacgagtcaacttgtagctgtgtgatactattacttactcagtacaagaagaaacttgcagagtttcttatctttaaatcattttgataaagaagcatactttggagaaatgtatttgttttctccaaaaatctggggggtaagtaaggaaagcaatattaaggaggtttatagaccagaaaattgattattttgtgtaataaaataacgatccttatatgaacataactaattccttcatgggtcagtttacaaagtctgcatttctcttgcatagtccttgcaagttctcctatttatgtttttactaatttgggaaaatcagcttttagataatctgaaatacaagtgttcctcctttcattgagtaaagaaggagctacggaagccaaaacaatatataaatataaatatcaaacaaaccccagaaatcaaaaagtgggagctataaaaaaaatgatattcaaacttgaggggatgtgaaataaacaaagagtggcattaataaagttagcgagtaaactcttaccagtttaattttcttttttgtagcaaaacaaccaagagagaaagctgattacttgagatgttaatgagcagaaaatacaaagagagggaacagagaaaagccaaaggatattcctttgttctagtgcatttgatgattgtttgacttgaaaaagatggttggagtggagtttagagataaattgttattaaagcaaacaaagaatgctggtgaaaaaccaaagaaagggaaaggtaggaattaaacacaaacaaatggcatgctttgattttctcattatccagctaatcagggccccacttggccactactattcccaaacatggcatgcccaagtgaaagtgacgtggtaaagaaagatcattagaggtaggttggtgtcgttgctgctttctgtttgtcgtttatttcttgagcgtatattcattttgtggctatgcctatgtatgtacatgtgaagtgaaaaaaagtgttttaccccaccttggatccgaaggactttgttcaaggatttggtgatttaatagatggggttcattgattaacctttacttgggtcaattttattgtcttttcttaatatcttagctgtttttctccaagtagaagtaaaagcgtcaccgattatttgtgcggcatgtcttgtcttggcctgtaaaagtttttctttttcaattagtctctcggttttaatatgttcgttctggtattacgacatagatataggagttaaatataatgtataattaggtataatgctaatctctgtagtcaaaactcaaaattaacctcaatacttttatagggttatgctatttagattggcactcactatataaactttactgacatttcttctaactcgtaattttgagctttaggtaatattttatttaaattgaaagataaaaattttattctaacttgtgtgaccttataactgaaaatgaagctatatacaggctctttacaaatataactgttgctcctaaattcgcccaatatacgtggccagtcaagagaggacacgtggatcagataact

SEQ ID NO: 381379 - DNA, 1610 bp, Cannabis indica
taacaaagctatacaaccagacaaaataaaaaagcatatgggttctcgagtttaaaacttacctccaccatctctagaagatgacaaagatctgtcacctctgatcactcctttgcctgttacttgaacaagcttggatgctcgtggtgagagtgaagtcaacatgctattggtggatgaagacaaagaatgccgtctcaataaagcatttttctcaacaacatcccgtgaaagctgtggtgaaccttgtcctctcagtctagcttttgcagattcagttggagccatatagctaggcagtttcggtgtgtcatgtacaacattctcttgagggtcaaactttggaggcaaagaagctcttctttgactggttttctggctatcattgcgtatgcaatcatccttgcagcttaactcctgatttagttctttaatatctttatttttccccataatctctattggctgcaaactaatggaagattggcaattatcaccaggattatcaaatttatgcagttccaagtcctcgagttcagattggtttggtgctaccacctcaatatctttcaacttctcagtagaatcacaaactttagcttcaggctctgaaatatcaggagcagcagagcctaatggcttcctcattttgcgtttcggttgtgcattctgaacctcaaattgatctgaacgctccttcgagggatcagtagcttttcttaaactagtcttaactttacgagtctcattttgtgaatgttcttgaacagaatttacagggagacttaaaactttccttgggttacgattgcgcttttcagaatctgatccaatttcaacttttgcactagatagtctactcgatcttttttttgacttgtcttgttcagtttctattgatcgagagctctcatgcttcctgcgtgattttaattcagagttttccttttgttcagaaaagggtttccagaaacgggagatggtccaacgttcaagccacaaggttgcagagttaggctctctagaatcatactggagatgcagtggaaccgcagtaggcaatgaatcaagaagctgaaataaaaaggagagtaaaaatcaccataactcacattatatacataagaactaaagcgataataaagccactggatgtaaaaaaacctcacattggaaacaaatgcatttttcgacagcctcgtgacctcagtagatgtaccaactcctttgaaatttgaatatatagcaccctgataagccatttgaaaatattgtaagatactaagatgcacaacaaggaggcacttcatgttaatcatcattaatccgacaccttgaattatatcttgtaggagacaaacacttatattaaatattactcatctaaaatttcagcatctcatacccgataatgctcattttaagttaattatcactcaatgtttataagcatttggagagagttggtacggcaaaaataagacactaagggcttgtttggaacgccgtattaggtcatattgtattgtattatattgaattatattttatgtaatatttttatgtaaaactatatatggtattaacttttatggacacctaaatatata

SEQ ID NO: 381380 - DNA, 1243 bp, Cannabis indica
tcatagaaaaaaaatatttttggtctcttattaagaaaaaaaaatatgtaattttagaaatagataaattgttttaaagttagttattttaaaaaataaaattattaaaaattaagtcgatgctcctatttttactattttagaaaatacggagtccattattattaacttttacaaaataaaggatccaaaataacatttactcataatttaattatgtgcaatataagcttttcatatatacatatatacactcatttaatattgtcaagtggtacttaaaatattgaccattacgaacacacttggtatcatgtagaaaacaccatgattaaagttgcattatatctaaccattagaggaactcattatctatttatgaaatttaagtttgagatttttttttttaagggatcacataaaatttaaaatcattttatgaaacaaagaatctaaattaaaaataagacaaaatataaaaattaaaatagtattatcctaattttttatttaagtaataaaaagaattttgttatgaagtagaaggataatctcaagtatccacactaataaattaaaatatattgtatatagaagaaaattatgataaatttttgttcatatgattctttagaaataatcatagtcacctttcaagtttgtgtggaaagaatttattagggacccatattagataattggaatctttttattcattatttggtgaatatatttgaatcaaacagctgtcaatggtgtaataatgcaaatagtgaccctctaaaagagcaacactatatgtaagttatggtttgcaacaccctatattgttattatttatatttaagttattttaaggaaaatgatgtgaactcattgtttaattatattaataataattatataaaacatgtattggtgcatttttattattttattattgaaaataattttttagttaattttttttttatagttatgtatattatgttgcacgtgtgattattttattttttctctgcagcgatggatttaggtttcagatttgtgattgaagagagtgactcgagactagtagtcaatgctctcaatgggaaggagtctcattgggctattgagaactatgtctccttttgtattaagtcatctccttcttttatatgttgtaattttatgaatgttagtagaacttgtaactatgttgcccataatgtggctaagtgggcgtttacccaccagatgt

SEQ ID NO: 381381 - DNA, 2973 bp, Cannabis indica
gtcggttgtttttacccctatagcatcgcctgggatagcgtcggtagcgaatttcaccaaaattgacgctactaccgatgctgaaatgccttaaaaacatacacttttttatggtcacttaagcttgtctcaagtggttaacacctctctaaacctagaggttataattatatctcttactatcaatgatatttaaatagtataaaaattttaaatttaaactaagacataatgtggtataagttcgcttattgaagataagattgccagtcattttgtctaaatgtaagctcatctgattttctctctcattaactactaataagcaaagttaataagaaaaataaaataataactaacaaaaatttataaacaaaaagaagaataataacacaaaaaagattaatatcatatgtaattatgtacgctcatataatcttttacactattatatatatgtttgaacaatcatctttattaattagagcaatcgctcaacatgatagacaataaatcaaacaaggtcgaatctcccgtaaacatacgatcagcaagccatcgagaattttagcaacataatgtgtagctcgatttgcagaccgcttaacaaaaagtaaagaaacatcacaaattgacctagcaaattcgtacattcatcaattgaaatcccaaaattagagcacatttgtaacaaactacgaatagcctctaccaccaccaaactatccatttcaaccaccaccggcgtactagggtatgtcttcaacaaattcaatacctctttgatgcccactgcttcagctacttccgaaatgactttccagacaagccaccaccaaacaacccaacacatcacgaataacaaacccagccctgtacctccctttcccatcaaataaagttgcatctacgttaatcttaatgcatgaacgggtttagaccaaagctctttgccatcctctttatgtaaagggtgcagtagaagaatgtttcctcttttttaagctatcaaccattgatcaagagttttaacatcatatgaaaccacatcttccactgaccgctttttattctaccaaatccgctaattccacactgtcttgatcgtcgttaacacagatttttgttaaccaaatttaagcctaaccgtgacaatcacacacagaaaaaatgaaagctataaaataaaaagtatgaacacacggggtttttacgtggttttgcagttaaaattttgcatagtccacgagtcaatcttattcagatttctgattctttttctcaggccccttttgatcttacttgccactatttataatcatatagtgagcagttaattacaaagttaactgtaatctttttacgacgatcattccctagaatcatgggatttgattacaaatcacgctaagtaaatacagtttttatttaaatttcacacaactgtgaatataccgcttttattgggctaaaatgatcgcgtattatagatatacagtaagtcttatcccattgggatgcctccctgggaatggagctgatttaactttgatggcgagctggagcttgtcatatgtcttcctgaggttaatattgcttttactttaattttgacaactacagtttttggtgtcgagatgatctttctcgcgtgcatgccctcttacagcgagatggacgcctcgctatctatcaccttgattcacccctcttcttatacttaatttatatatcgtgtactatatgctaagtatttctattgtcattatatctcctccacgcgatgaggttaatgcctcgtcttgcgcacttgcagtgacatggtttctcatcgagacacaagtcaacagttagtatattttttatctcgcataagattgttcagtcaaccaagttataaacatactctgttaattatgcttttaacgagttattccacgtcaagtgtaattacgatcgtgtgtttaagttctccattcttcctagctcgacatgtgtcttcttctaatgtgctcgctgaatttcgggtataacaattaccccttaaaaagttatcttttaatgaacagagttttttaataagtacaaagggtatttttgtcatgatcctctttttgaaaagacgcatgtcctctgattttggcgattgtgcggtttcgaggtacatcagcattaaatgaccatgttttccactttcgctttgaattatatccgtacgatcaaacatttctctgatttgacgaagccaatatcatcagtataaagtaaggaaaaaggaaccacctttgcattatttcctccattttagaaagtttgagaaactcttaagctttttcgccaagaatcaccattaagtttgtatgaggacttgcatgccatctctgtccttgatattttttctacaagtttcctccgacttcatcttctcaaagcgatccttgctacgtttgaagatttgcagacggagtaaccagccattgccctaagccctaactcaaaatagtaagttgctttcttccttcacatgtttgctacattgcgttaattttctacttagtttgtttgtgtcgttgttatctcatttggttttggtagtttttagggttaatctgtatttaggtccatactagggttcaggaaatatgtaggttgtttcaaaatctccaactcattacctttgggtttgataaaattctccccaggaattggaactgctttttgcctgcagcaatgtcccgctctggttcaagaatttatcgtccaaaagttttagaatttgagtttcctacaaaatcaatcccgtataaacctaatccttcaaaacccactaccaaattagagttgaacgatcccagggttagggaacacgtagtgagaacccaccaggaagatattgctactcgttacaggcgtttcttacaagaaatctttgaaggcaaacgtcgattcttgtgagaaagagtgcttggctag

SEQ ID NO: 381382 - DNA, 2808 bp, Cannabis indica
aattttcgattggaaagtagcgactgaaatcgcaattttcaatcgtcgactccaacccagcgaaaaaaatcgattgacctccgagacttcttcatcacaaagctcaccttatagtcgttcagattgagattgggagaataaaatggaagagtcgattggttttttaaatgagtgaagtgtggcacggtgtaaatgagttagggttttgagggtttagttttatttatatatttttgaaagttaacgggagcatcaaacctacgttaaatttaacagaatattctcttatttgtaaagtatattctgttaaaccaagaaatgccgttagataggtacttttaatatataaagatacccagatgcaattccatttgctaaattatttacccttataaatctagtgtatgattacaatataactatttttcacccaatgggtaaacctagaacactcataccatatatatagtctattataaatttatattaatgagtgtatacatgtacacctacagtgtattcaagaaaaagaaaaaaagaaaattaaatgtaaattggtaaaaagctttagtgggagaaagttttggtgtttcactcaattatctatctgtacttttctttaatttgttattattatcattatcaattggttcattatctctttttaaaagttagtatatattttaaacattgatggtatttaatcaatatgtggtggtggccactgggtcaatcaaatattaagtaacggttttattaagtgtgtcacatgaaaatgaattaagggagctttaaattgcttcatgcagactttatttttccctatacacttcctttcagctgaatggagtggacatatcctgataatggcagcatacccttttcattttgctttgttttatttttagtgggtgctatgaaaaggagtttaaagctatcctaacctctctctctctctctctcttcacacacatatacaatatatatacatctgtttatgtacttcaacttaactttttggtgttcaagctgagtaagttggtagctcaaccacttgtgttgtgagtattaagaggcattgtaagggttttagaagagagaggcaagaagtatgaataaacaactaaaagaaatctaattgagatcaatacagagaaaagagtgccaaaaaaatgtcaatgtcaacatatacattttcatgtatagttacttgagcaggcttaagtggttgggtgatctaaggctcaaattatgtgcctaaaaaaaagaatacaattacattttcacttatatatttatatataatatatattttaatgaagagtagggaaactaaagatgattgtactcagtgaccttagtgactctattgagtgcattggcttgtaaaatataagttttgcttaattctagtgggcaacctatctaaagcactactttattgcactattatttgcccttaattgagagcctactgaaagaagacagccaaatcccattttcatgtaattaattacaaataattgtatggaagattttgctatacccaaattgataatattaaaatctggtcatgttggataaataaaaggaaaataaatatcagctgcaaatgctgtctagattaatatgaacaaaagacagaatattagaatataaaaattgggtcacagattattagctagaagtggtggacatgccaatttcttaatctcatttattatttatttttaataaaaaaggtaaatagtgaatggatttattatatctttcccatattggttatgggattattagcattttggatggtgaagaatagggataataacagagagagagaaaaaaaaaaaagaaatgaaaaaaagagggcatatatataattataggcgaaagtagctaggcatcttatcttagtgatataatacgttacaagtgataaatgagagaaaaccaaggagtgtggccaaccagcttttattagtattattatagggattaggagtagtaggagtgtacttgtcaattttagcatcagtacttttgaaaacccaacactcttgactctcaagtgaagtttctgtgggcacacacccaactcaaccaaattaatctacttcactaaaacttccatgtgcatacatacatacatacaatcatacatacatacatattcatacttatttcttttatacaacagggattataatgtcttctctttttcatacacgccccaatcacttcagctagcccaactaactgagatataggattttcaaatatcttcatctcaataattttatatgtttaggttttcttttatacaaaagaatattaataatacgtatctacatataaatttatacataactaatatagttttatgtataattctcttgtttaatcataatcatagtaatatcatgtttggagactcatcatatgttgcattatataacagtaattttatgtaatttaattagaagcttttttatttttacactttaaaataatttttttttgtatttttacaaaattttacatagaaactagcgctgcaacttaaattgcaacaaaaaatcgtatacaaatccctatagcaactagtgttgcaaccactttaaaactcaaagcataaatttgaaaaaaaaaattcaaaaaataatatatgagataattccctatttaattagaagtgaagtgatgtaaattatgtatgaaagtatctttatatattaaaagtgcctatctaacggcatttcttgatttctaacggcatttcttgatttaacattcttggtttaacagaat

SEQ ID NO: 381383 - DNA, 1306 bp, Cannabis indica
aaaaacaaatggtttggatttggtagaaccaactaattaatggcacgtttacatatcaatggactatttattattatgtatgtcttgttatatataaatgcatacttattatatgaggataaaaaaaatgagataggacctacttacataaaaatcccacttaaaaatttaatgagactagtgagaagttatttatgataattttgaagagaatattatgattcggacaataggaaggagtccgaatgatcttgtcctcaatatgataatttttgatcgatcacttggataattatgattcattacatatatctctctccacaattagtgcaaattcactttttaatttctagcctcatattcatctaaaattagctaattacaagaaactattcgagatttttattagttgggtttgcaaattttgtttattttatccatgaataaaatttattaggataaaatttcaagcactctctccttgatctcatgtggtgttaaatgagtcactctatttacagcatatataattcattatgaataattgaacgtattcggagctcaaatatatgtggtgggtgcttacatatgtatgtatatttatatatttatgaaatcaaataaaccattcatgacagtgtattaatatatatatatatatatatatatatatatttagaagtaaagattgcattaattataaaaaaatcatctgttataggaaaactttaaatttgcagacaagtatttgttcaaaaataatctcttaattaataaagactcgtaatagaaaccaaacgtacatgcgaaacagcataagaatatattacaaccatcaactgcatgcatctagtaaaatataaaataccattttaaataacatagatatactagaaggatttaattacatagtccttaacttaatatgggtatttcaaatttgcacactaatgaatattgcgttcttatcttaaattatatatgatatcattttgagaataaaccaaacaaattaataaaatggtatattattctctatcttcattgaaaataattctagtacctctctcttattcaaactatcatatttctaccacttgataacattatatatatttaaaatttacacatgcttgcgttgccattaatgcgtttgagattgtaagtgcatgtttgcatcataactaaaaattgttttttgttttaaaaacagaaaattgtttttaaaaacaatttggcttgtttggtcttgttttttaaaaacagtttttagaaaacaaagttacaaaaaacaaaaattttgaaa

SEQ ID NO: 381384 - DNA, 2967 bp, Cannabis indica
tcaaaaaaaaatgaatcttcatgatcacttttgcccatttttaccatactactcataataatcatgaccacgcgattatgtatatagctacagtaaaaaccagatacagataaaaaagaaaagactatgaccatgaaaaagtccaaaaaatggaaatcaacatatctataaaagatcatgtgaaatcgttacgagctattattagctctgaaatattcaaaacaacaaccacagcaatatttttccccaaacaaaaatgtcagttgaaaaataattagatctgtttttagaaggtgtcatcatcaatcaaaccaacttaatacgaagcatgaagcagcaagaactgtcattggtaatatttcagaatcattttcagaaatatcttcatactttctccagctgccctctaaattcaaccagttctcataatgatgtgaactccactgtcggtgtccacaatatcacttatctccccgaccttaagagcatatgttgcctcttcgaaaggcttctgcatctgaccacgcccaaatggacctgtaatgataattaacacttggttaggagaacctatccaaggacatttttctgaaaaaccaaaggttgacacagacatcaatgacgttctaagaaacaagatgtagttcgaatggtcaagctcacgagtccatcgaccactgactagtgagaacagattggttttaggactaaaatatattagatgatacaattcagtgttcagccatttttaggtttgtccatgtgaacaagttggatatgtttatgcaaatgtcaaaccaggatagagaaacaaattaatcatattcacgtatttgacaaaaaaaccactaggtactctgtaggatagagaaacatgtctggatttggtaaaaaaaaattaagatgttaaataagattgaaaaaagctacagaacctaaacatcccaaatacgtgaaagctttacaaaatctgataaataattcttctttcacaaaaaaaaacaaagtcttttttttttatattctttatgttcctcaaataccatttacgcgagacatgtaaaatgcaggaagatctaagttttaacaaaacagcaactaggttagcaacacagcatgtgtaacagatggaaagatgtatgtcataaaaggaatgataatcatggtccctcccgggatcggttattttcaattttagattaatatacagcatctggctccaacgaattgcgatttccctatcgagccaggtcatttcaggacaagcggatcatttacggctgttattcctaaattattttaacgttttacattcgaaccgaaacgtataattctggagataaagataaacttctttgcttcatttattttgaatggtcaattgtcagataacagagtaataaaaataaccaaaaatagaatatctataagatggttggtcaattgtcacatcttgctcatattatgacaccaaaagaagcaaatttttatcagtataggttataacttctagcttcatgagatttgttaagtaataaagtatatagctcttggccaatctaatctctcagtttccaaaaggctttctagcatctaaaatggagcaaaagaaaatcaataatctatgctaagctaccattctgtgagagaactattaagacttatggtccaaatctcaacttcaaaggtgaaagcttcatcaatttctcggtttgagattattcttatttttaatttttatatcctaaataaagcttccattgacagatcaattaagtcctttgttttaggacttaagccctaaaccacagattcacaaagcaagaatttaattaattgaacaaaaagaaccttcagattttagctatccactccatcactcttgtcaaaccctattctaagaacctaaaaccctaatcaattaacattctctaatagagttacggaccagctatatcacaaaaacccaaaagctagggtttttcatgatccaaaaacaaaaattaaacaaattcaatacggataaaaactcataccaagatcaccaccgcgcttggcggagctgcaatcagagatacgagaagcgatatcttcaaacttagacttgccagaaacgatatcttcacggagggctttgagttgagaaacagcggtttcacgtgttgtgtttttgattatgcgtccttctggatctttccaggaggcctttctcctggaaccctggtgtttgatgagtatgtgagaagctttgacttggtttccagaggaagccattttcggctttttcttgttcaaagaagagattttttgtctgtctttgttatctctgttcttgcggtgatgatccgccgccgccgccgaagacggtggttcttgattcttccttttacgatcggagccggaggactcaattttgttaagagaggaaaagaaaggagaaacaaactccctacaccactaatatttaattatcccaattttagagtatgaaaggaaaaaaaaacaacaaactctccttttatatatatacaaaaataaacatttttctctctcttttcaaccttctaagttctatcatatccaatcaaattttactattttccaataaaaaaaaaattaattagcaaattttaatatacatcctcttctcttgaaattagggatgaaaaatatgccacccaaatttaatttagagcattgctattagacactaatagtgcctagcacttttgccacatgtcgtgttgcgattggctagcaatactccctaaaaattattatattaaattatatgggacccgatacttagttgtaccaataagatattgacacataggagagtgctaggcaccactggtgccctttaacatttctctttaatttaagccaactaatccaattcaatttaattgtaaaaatttaaattgaatttaggtggcgtttcgttggaggtaatgaaatagaatg

SEQ ID NO: 381385 - DNA, 8304 bp, Cannabis indica
cggcacgaatgttgaagactcattgtcaaagccagcagctcaacaacttcaacatatcctcaccctagtgatacaaagcattattctgaaagcagagctaatactaggcctcgaaaatgagcaattcttgtcaactcctagaattcgtgcatagtatttcgagctagggcttctaccattttagtttatgactgagtattctcgaaaagaactgaatttcgatcatattagacacgtgattattttggtcatgttaatattgttagtttagggggttaggttgctacctaccctgctctgcctatataaggaaaactatcatttgtaacagattaatttatacaataaagataataaaacaattgcagagctttttctctgcaacaactcatatggtatcagacgaaatagctcaattcacaacaatggtgtgaagtactcgagctaatcccgacgacgcttcttcttctcagatcatccttgagcctcaaattctgacctcagccgatgaatctgtccccgtcgatcctccggtagctcctccttgctcttcttcttccaaatatgatcgacccattcaggaagatccttcaagtcattactttctaagtgtcggagatcacccaggcctcctcctggtatcctctgttctgactggaattaattactaatcctggaaatgtgcaatatccatggctcttgccacaaagaacaaaacccctttcatcgacggtacctttacccgaccccaagcttgcgatcctcttcttggtctttgggttcgttgcaacaacatggtaatgtcgtggcttcttcaagctgtctctaaagaaattgcccaaagtatcattttcttcgatcttggagcggatatgtggaacgagttggcttatcgattcaaccaagctaacggcccaagaatctttcaacttcagactaatcttactcatctttaacaaggtgatcttgacatcaactcctacttcaccaagttgaaatcatactgggacgaattgaaagagtttcaacttgcgattacctgtacttgcagcgccatgcacactcttctggactattacaattgaaatcaagttctccagttcttgacaggactcaatgaatcctatctcaaaccctccttatcgaccctataccttttatttctaaagtgtttgctatggtggtccaagaagaaagacagtgcaccattggtttggttcttcctgttgcttctgctgcccatccatcatcaacttcaaataatgcttctcgctcaaagaagccttgaccatcttgcacttacaaaaaacctggtcattacatcgataagtgctattttttacatgggtttcctcatggatatggtgacaagaagaaagctacgaatagtaaatttattatcaatcaaatctcctcttccgaggatagtactactgatccaacatcacaagtcactgtcaacaactcatctccgtgctgagccaaacattacaacagcaagccccaagagttgatctcactcccgcaccagccacttctaacatgtctggtaaaacctcatccaattacttttcttggatcattgacagtggtgcaacacatcatatatgttttaacaaatcttgtttaaattctttcaccaataaactttttcccgagaatgtagctttgcccgatggcaatcaagttcatgtcaccaatattggtatggttcaaatcaatcctgatataactatctttgatgtactttatgttccacaatttaggttcaatttattttccatcaatgcatatcttcaacatacaactaatcttgtttctttaacctctttatgttgtatgattcaggaaccttaaggtgattgggactgctaataagcataatgatctttacattctcaagcaaatttcatttacttttccatgtaataaatcacctcgtgattgtaatgttcaaactgatccaaacctttggcatatctgcctaggtcatccttatatgtacatttcaagaaaaattaataaagagcttaatttttctacttctatatctcacaatacacattgctctacttgtcatttggtaaagaaaaaatgcttaccatttatttctaatcataattttgctcgtaccatattttacttgattcaccttgatatttggggacctttcaatcccataagtgtcgaaggatacaaatacttgttaactattgtcgatgataaatcatgcttcacttggacatatctactcaaagaaaaatatgatgtccaacatattatacaagatttttttaccttcatatgcactcagttctctgccaaaaaggttgttcgaactgataacggcaaggaacttaatcttcattccttctttgcttcaagggtgttcttccatatcactcttgtgtagaacagccccaaaaaaatttcgtcattgaacggaaacaccaacaccttcttatcatttgcccttttcaaagggctcacttcattcgaggtgctatacaacaaaactcccacttatgatcacttacggagctttgggagccttacctatgcttctaccctcttgtctcaacgacacaaattcttcccacgaagttgtgcctcagtttttattggctatcctgatgggatgaaagcctatactctattagatctccaaaccaaccaaatatatcagtctccagatgttattttccatgaaaatattctcccactcaaaaataattcctccatctcttgtagtgattttttttcatcttaatgtgctcccttccaacaacacctcttcgggtccacactgtgaccataatcatcacacatttccaccccatgccactcccaatggattcacaaaaacttcttcatcctcaccagtcatcactctactgcacgatctcacaaaccattatatctcgatgattatgaatgtcaaatagttgttgctccagcttcaaccatacatcccattgagaatcatcttgactatactactcttccccctgagtttgtaacagctgcccttactgcccataccatcattgaacccacatcctatgaagatgcatccaaatttcaggtgtggaacaatgccatggacaatgaaacacaagctttagaaaaaagctaaaacttggatagtcacttctcttcctttgggccataaacccattgggtgcaagtatgtttataaagtcaaatataaccaaggtgcggtagaatgctataaagctcgccttgttgctaaaggctacaaccaaaaaccaagtgttgattacattcaaacatatgcccccgtggctaaattcaacactgtcaaaatcatgttggcattagcagccatcaactaatggacccttcaccaaattgacatcaataatgccttcctccacggtgacctccatgaagaggtatacatgaagcttcctcctggttacaaaccaactcaacccctcccccccaatcctgtatgcaaactacagaagagtctttatggcctcaagcaggtctctagacaatggtacgataaattcagctctacccttttaatagatggtttcatttaatcaccatctgataactcactcttcacaaaagattcccactgaatttattgcactcctcatatatgtggatgatatactagttcctagcaacaataattatgccacatctgaattcaaacaaaagttatacaacaaattcaaacttaaagattttggctcattacgtttcttcctcggtttggaaatttgtcaaaccactttaggcatatcggtgtctcaaaggcccttcactttgcaattactttctgagaccggcttccttggctgtaaaccagcccctactcccatggaatccaatctcaaactaagcaaagaccaaggaggtctcctttctgacccttcctcctaccaaagtctcattggcgaacttgtttatctcacaatttctcggtctgatatctcctatgtcgtcaatcgtctaagtaaatatctaacatctccaagattaccacacttgaacgccactcatagaatattataatacttaagaggtaccccaagacagggtttgttcttcccatcctccagtatctataccatctctgcatatgctgaaactaacttatccccatttgcaatacaattgaaacttttttctgatgttgattgggaaagttgtcaagataccaggcgctccattactagttactgtgtgtttttaggttcctctctcatctcgtggaaatcaaaaaaacaacaaacagtctctcggtcctctgcagaagctgaatatcgcgccatggcacacgccacttgtgaagtcacctggatcatggccatactcaaagatttttgaatcactcccaccagtcctgtacttctatattgtgacaacgatgtagccattcacatctccgaggaccccgtttaccacgagcgaaccaaacatgtggagatagattgccacatcatttgggagaaagttaaccaaggcacactcaagatgatacatgttccttccaagcataacctcgcaaatgtttttaccaaagctttgtatccctctcagtttctaaatattatctccaagatgggtgtacaaaacttatacactccaccttcaggggggctattagacacatgattatgttggttctgttattattgttagtttaggtggttaggtttctacctaccctgctctgcctatataaggcaaactatcatttgtaacagattaacatatacaataaagataataaaacaattatagagcttttcctctgcaacaactcattgatcatgttagatccaccacaaacaagcaacaaacacttcaaatatctcaaccaacattgataaaaatagttccaccagcatatatgccattgacccatttcgcttcttcgaatatcctcccaaaatgcttgctcctgctagatatgtaccgattgtttatgcatatcattcagtatatatatgttcttatatgtgattaattgagtttaaagtccctgttttggtaataggggcatttagtaattgtatctcattgggaatataattgtgataattataaattggatgtgcatgagaattatactattatatagtgtgatttttgtttcagtatagatacgtctcgttaggtgattcacgatatagttacaatcggtaagtttctgcacgtggcaagtattttagaggtacaatttgatttataatattatgagtgatatgtttgactacttattaatttaaattgcatttactttactgcccttatgtgtttaagatgagaagtttttcttaaaaaggatattttggtctttttgatcttaaagatattcatatgagtgtataaaagttattaattaaattttatttagaattttttcctctccaattatggtctatgaattattgtgcccttaattatttgagtgttgaaaatattcctcaattattcccaatattataaagttgacattttttgttaagttttgtcacaagtggcaaatacaatgttgatgtagacgtttagaccattgtcatgttaaaataaaaataattttaagcgatcgatgaatgtttaagagaggggtggttataaatatttggcagttgaaaattacacttgcatatgaaccaaattaataagaaattttgataatttcgagaattcattttagtgatttcaaaaccaattaaaaaatacgttaaagatcttgcaatacgataaggatgaaaattttgaaataatcagttcaaaatcattaaattaagtttggaattgagatattatctcaagtgatcaactcatggacactaaaatatgtgtagttgataagcctcatcgtaatcatatgttaatggaaattatgttatctaaaattagttataaagttttatcaatattttaaatggaaatgcacatttagattcctaatcacatctaacaatgttacgtcatttaaagttatttccaaaatatcataagaacgaatgatggtaaacttagtttactttattatgacacttgaaaggtgttccactgtcgttttaagaaaactagaattgcaaagaatgcttgcatattttttggttgtcttaaaattttcttataataatctgttaagcttcattcttagtatcaattttgtattaggaataagttatcatgatagtcaatagggtaaacttagaaactgcaagtccaatttagattatcacatagtcttatcatagtgggaggatttttaggaatttgatacactatgatttagatagtgaaaccaattttgtggttgacgacggatgaagtgatgattcgttgttcttcaatgaatgatggtagttctgaaaaggatttttgaattaaatccacaaaatagaaaatggagttcacacactctaactcaatctagaatctattggatgcaactagtatttttaaggtcatttgacgcaagtcaatccataagaagaagagaagaactaatggataaattgagactttcgagagtcaaacaatggctaagagttttatccaaagagaataaattgacttaaagaaaactttttctaaaatagtcatgttgaaatccattagtatactcttatccgtaactgcaacttatccgtaactgcaactcttatttacgaggcttgacaaataaaattaagatagcattgttatcttgataagttcattaatatggatgaaaccacaagaatttatagtatatgaaaaagtcaaagaaaatttgtaagcataataaggtcatttatgaacttaagcaaacttcaagttcctagagcttaaaatttaatacatgtttgttaaatctatatgctttgaataaaatatcgattaaccttacgtttacaaactaaggtgttatccaaatttccacacaagatgatgtggcatccatctagatgaaacatgaagagaatttcataacttggatgggcagttcgctccatggtacaccgtccatagtgatttattacttataaataaatgatttaaagaagaagttgtaatatccagacaaagaatgttacaccgtccgactaacatctattttacagtcaactcgcatgaccaaagtaaatgcatctaaaatatctacaaggatactttctctaattgtccaaacatacaagtctcgatcacatccctaattttatgggatagattcacatcgataggagaaaagaggaaactgacctagtttctcttttttatttctctttatttagaaaagtaattaagtttcttaatttatttttcatttgtttttggaaaccaaactaatataattattccttataaatagtagagttatttcgctattcagggattcaaaaatttccatagagcacttaagctactaaaaccattgtaagagctttagaggaagatcaagcacttcttggttcttttccacaattcaatacaagtaaaagaagagtagactattaccataatcacggagccaaacctctataacaatatctgtgctctatttgcttaaatcatcattcttaattgtttctaatcaatttaattgaattattgttgttggctaaaattgaggttaacattttagtactttcattgagagcaaaagaacataattattgttttgaatcttttcaggacacaagaagatggttgtacaaacacacaggagaaatcccaatgagacaactgatttgatggctacggatcctaatgtgcaaactcttgcaaatcgaagatatccagtaaggaaggatcctgaccctactattcctcagcctttgataggtcctcaatcaataggactaggagtgacaactcctccggccgagttcactccaggcgtgcaagaatttggaaccaccaatacccaggctgagtagactaatcgtagtactgaaaatccatctactggagatcctcgaaggaaaatttgtaatgacaccaaactatagaatttgcgagccattctagggcaaatacaagaacatactaatacacttcaccctgatcaagaagatacctgagcatttataattttttcctttgaacagaaaaatgccaattccaagagtagatggatcaatggatggaaatcataagggcccaacaagaagcaattaacaatcattctaggcacgacactgtgctgatcaagcaagcctattagataactggacaacaatcagtgatagatacttcttcagtaagaaagagaagtatctggatgggttgaatcccaaaattaaacacgacctgatg

SEQ ID NO: 381386 - DNA, 2039 bp, Cannabis indica
aaaagtgaatagttagagtacctaggagttggaatcttaattgaagagatggaaccattatggtaggaaaccctgaggaaagaaccaatattcgtggaggtcatgagtgcgatctatttcgcaaagagggtagtaggattccggtcacttatctagtcaaatgaacaccaactttgacctgtttgtcctcgtgggattagccttgacagtgtaatagtaaaggatctcctctgaggagggaatctctagtgtattaattttgcagaacacgtgttccttgcatggagagcgccactggatatatgggaccaactccatgcaaaaaacccatcaaaactggtggatgcaaattaactaaagatggaaagcatgtgccacatcagaccagggacattacgaaggccagaaacttcacgacggacctccactagtaaagggatttcacccattttacctctcctgttattcgtagaaagatttctctcagcgatgggtttgctttcaggaatggtttctaaggcaaccacaaactgagacattgtcatagagacctttgtttggtcctatcctgcgaaaaacctttcaacaattggaataggttccccctcgatagccatagcttcacttacaaaggggtcttcattcaaatccatggaatgacaagtaatttctttgaaacaacaaatggatgcaaagatggcgttctccttcacaaacactatgttgctacacaacacaagtacgattctagccctaacctaagcaagaagctttcttaccctaaatgtgaaattccaagaaactcagatagggggttagtgcacttacttatcaaaacggaagggacagttggcatatctagaatgtttgcctgaaagctttggagccagtagatgttgcggacataattaacttgaaaataaaatgttcccctggaagaagaactttgctagttcagttgaaggggaacaacgtctgggaagatttcctttggaatgacgactaaactcttgatcaaatcctctattgcctcttgcatacaaaagattgtagaaaaagggtaaacgtagttgcaaagaaagtatgaagttttgagtaaaaagaataaaaaatactgacaccaccatagacagtttttatttgaaaaaggagacagggctacgagagatcaactgtttagagtggttatagtaaatccaatggctaggaaagcgagaggtcccatgtgattggcctagggcacaagcaaatgtcaaggtcctttttgccacatcaatcagctgctagtaccacccctcctttcttgttaagcacgccttcctacgcactaaaagggatgagaaaaacctcctgatgttccgcgtggttaccacacgaaaggaagtaaatgacgtaaataccgttagaagaatacaactcatataaaggtgtatccacgaccagcgttgaggaccatagcaagcttctgcaatctagagaatcttgaaagcttggggggtaaatattatccacagtttcatcaatcaaatacgaggcataatcgaaggaaaggacacaatcaatacattaatcatctaaggtttctaaatcgaatgactcttacatctagaaggtaacgagagtcgatgatctctgggagtgactcctttcggtgaggtacccgaatggagataagggttttggaggcattagacacgtaagatccttgtaaaatatcgctccatagattttaacttcacggatcagatcttgtcccctgtgctaggttatgatagtgtgggtatgcaccctcgagtatgctttttgcccaatggattgggtggatactatttcgtaaaggaaagacctttgcgcgacatgtgtccagggttgtgcaaaagtcctcaccagctgctgaacacaacacggtgaagaaggttcctaccagccaatggtcagatcgtcctctcatagtatagacctcagtagcgtgtggaagataaaaccctagaccccatgtatgcctacaaatagtataattctgttgggttttgtgccct

SEQ ID NO: 381387 - DNA, 2235 bp, Cannabis indica
tactacttgtttgtgtagtctaattttgagactttatcttttatactgtctaagtttacgatatagatcgcttgagtaaaagttatttccgaattctatatgacattatctatgcctactttgttttagtcttgtttcttacttagatttagacttgacaaaatgtctcattttttcaatcacaagattcttatgtatctagaactatagtgttgtgtgtacttttagaaagtaggaacaatggaaaccagtagcagtaagtgtattaccaaaaatagcaaaaattgatcattgaactttgtggggaatgccactaaggtgttgatctcattgtggtttgcaaggaatatcactatgaaagttgaggttagaaattgttagtttatgtccaaattactagaactttgaaacagagtacgaaaaactaaaggagaatgagcaacccccttgagaatttcttcttttgattggcttacagggtgtactttcagtgctacatattaattcatttgtttgaagttgttttccaaattaacttaactcaaattcctttggcctttctcaaatcttgccaatgcttctacaatttgctagaaattactttagtttaatatttcatgtatgcttgtattgggaaacttatgtgatcttttcactgatattggaatcatctgctcttgaaggcttggatcattccagcaccgctcctattgaacaccatagaagtctaagtctaatgaatgatgattatgggattacattttctcggtccatgactgaaaagctagatagactttctgagagggaaaaggtttgtgtcaaatcacatgcatgtgattgtgagttttgcttctttcttatatattaatctagtactattttgtgcttgtcagcaacaacttatagtgaatctagtgaagatccagaatgatggaactgtagaagtcgatttagataaaagtacacctgttgcttctgagtggttagagcgtcacaatattgaaccgcctattactcttcatgataagacttctgggtcctgtaaatcgattccaaggttgaaaattgtcatacttgtggttggaacaagaggagatgtacaaccgttcttggctatggcaaagagacttcaagtacgtgtaattataattttttaatttttttttctcaaatataaacctgcattgatcctatctatatgatattttgggagaatatgtacaatgtaactttcttctaggatttaggtttcacatgttattaccttttcctctgccttctatcttaaatttcggagttatatgctaactcaattgatagtgggctcgtccaaacatacaaaatcccagttagcatctgttaatcttatggagtgggttgttagttcttatatttataatccattgacaacgggatacaattacaagtagagcttgcgaatagatctctgtttcttgtcaagtgtagtatatcatataatatttgtgaaaatgggcaaataattaatatcgatgtttattaaattgtcatatggtacttttcttagtaattagtaagcctatgctacattctacagaaatcagaaagataaatttctctcatgtttctaccccttgtttataggacagtatactccattactagttagctattctatgtttcaccttaaattaagattcggcttcaacttgtaattgcaggagtttggtcatcatgttaggttggcaactcatactaacttcagaacttttgtaaaatcggcaggcgtagacttttatcctttgggtggtgatcctcgaattttggcaggatgtaagcagtccctgctctggaactatttttttcttcttcttcaattacttggtgaaaaatgcaatttaaatttatgtattgatctttgatcttgttgtttgacctttttatatgaccccttgttgtacacagtcacaagtcaattatttgtggagttgaggaggctattatacgaatgcattcgtatcttattaatattagggagtgttctttatttttttcttcgtttttgtccccattttctcttttctcaagaaaaaggtacgaattagtgtcatacatggtttgttaattagaatttaatattcgatttgttttgtgctctctaatggctgttgtaacggcaacaagttcatcatctttaatttatatttctacatatcaaaaaattacaaatattgaaccttaaagttttagaaaaca

SEQ ID NO: 381388 - DNA, 550 bp, Cannabis indica
ataaaaatgttactaaatgccattttaaaatattaatcattctgtatggataacttgggaatcaaatcccttttaccatatttctttagtaataattaattgagtatagatttgcaaaatgtaatggcgtgaatagagcacgacattgtgtaaagcagggacgatttgcccctttaagtgtaagatggcatggtaccccttatatttacttaatagtagacttttcctcactcacatttacaactttggtatttatttcgtttctttgaatgtttgatacatagaaaaaacaaatatttgtatatatttgtgtggaaatctaaaaagtatggtatactaataaataatatggcacttgaatgaatattataacaaaaagattagaaaaagagaagaagtcaatgtattaggtgaagaaaatgatcgagtggatgtatatgttagctgctcgagaaacttttgggtgaaacagaactcatattgtattatgaattaaatactcaattatattctaactgttataaatattaataattatgtggatgtccaa

SEQ ID NO: 381389 - DNA, 1515 bp, Cannabis indica
atatatatatatctatatatctactgatcactttgcaacatgttgttcggtaggtagggagatgcttgtatattacaccatataaaataaaattcatgtatattgtatattattatttgtattatgctttgcagcctatgtgtccactgatcagtactaaaaataatatatttatctgtacgtgtaattgtgaaagcacataataagtttatagcttcaaaagtatcgaagtaatgggatacattagtatcagcatgttggattagactgattcatatataatttcgaatttctataatattcaatttgacactatagttatgtatacaagagcacagtaatattcaagccaacaagattaattattaattttgcggcgctgaaaatggttccctattagctggatgtcatggagcacgactggatcagtttatctaagcccacgtactcttgaaatgattttcacaatgttcacactttgaccataattcttattggtcaaatttgtttttcaagttggagaactaaaacatatatattcaactatgtaaatgataacccacgtgcggttagtttgttgcaacttgaaagtcaattttttaacttctttttgtacatatagttaatttgcgtacagcttcaatcaaacattagttaaattaacctgcttggttttgatacgtgttttgttgaaaaccgaaaacccaaatacgatatttactaaaaaaaaatgagtttcataacagtgtaaacataattgaagggaggaatcaactgaagcattgaatcttgtacatattattattgatctataatatctatatattttatgaattctagctgtacgtgttacctgtgtgtttattggtgtttaggtgacccaaatatatagagggacacaatgacataaattagatagaggaatagctggattagacatatatatgtaggatgtagccattgtgtaggttagaagttccttattattatcccagatttaattgctacttattgtacgtagtgtttgtatatttattataggtgaacttttgagttttaatggagataataaattgaaattaaatattaattaaagattttgaaacgtagtagcagtactgtagcatggacgcactaatcaataactaataataatgtggtcctttgaggtgtcgttcacgaaagataattcgtatatgtatttatttagatgtttaaaataagggttggtattgactttttagtttacatttcttatggataaaactttgtgtaagtttttttcttttttaaatggtaatttgactagttataaaaagtttaaattaattttcgtttgtagtattggttataaagtaatctgaagagctttattggatgagcaaatgagtggttacattagtctgatcagtgattatggccagtttggtgcaacggttgtgttagagattttataacaatggaagaaaatcaagatttattacaactctattgtaaaataatacaaggactaaa

SEQ ID NO: 381390 - DNA, 1198 bp, Cannabis indica
gggtgagtaaatacgtcgaacacatgggggaccttatgaagaaactccccaatcccaacgttgatcccacaagatgcctccatcgagacataatctgtacggacacaaaaggaccacgcttccgctgcgtgatgagatggtggagcttgaggatgacgttgagctttctgatttgggtggcaactttgtccagctgggtgtctcttgttctgtcttgttctaagcgggtttgcgcagaatctactgcctttttccatctcctttgtgttaaagaattcaaaggtccgaaagagaaaatgggttgtaaatggcaaaacctcaacctctgctgcctctgcaataatatcatcgtaaggaaactttacaaaacagcggcccaaccttcctccattattataaccctataccctcctcctaggaaagacaatgtccctgctcatgctttcgctatggctttttggatttctgggaggtgattcctaccagcgttcttttaatttacctaaaatgttcgaaaaagaataatttatgctcactccaaaatacaatattatttatttatttatttatttattgaaagaagtccaaaatacaacctattgatcaataggaatcacaattcatgccaaggggaagaaaaaaaaaccatttttttcacggttttctaaacaaatttacaattaattacaaaataaagattaaagtttgtgacgattttgtaaacgtttgtgcgcgaaaggatatggctacactaatcaataagcttggatggtatgctgtgcataaggtgtcatctgcctgaggatatctcattcaaggcaaaagcttcttagtaggaaactctcggatagccccatctagacggagcccatccgactcgtacggaaggattcttcttttaaagtgtcttaaaaaacatcaatgaattatgctgtaaaatgcttaatcaaaacatttatctataggcttgaaaacaatacaagagtaagctattacaggtggttacaaaccaagaggaaaagaaagctaaactctatgttaggatctagcattagtgtggtgttctaacatatattaaataaaagggtaattaggtcattgtattaagaggagtgtttgagtgagattacaatagtatatatagaatacttaggaggattggtggatatgcaatgtattgagtaaatctctatttgca

SEQ ID NO: 381391 - DNA, 960 bp, Cannabis indica
ccatcgatgaacaactgccacaaacccagatctaacaaagaaaaaaagaaatagttcgaaatttcagcaaagataaatgcatgaaaagagattgagacatttctacaaaacacatacatagcataatagaataaacggaaacatcaaaagaaaatcacaaccacaacatatgaaatcaaatagagagagatggagattttagcacattcataaatataaaacgaataatgataaacgaatagcaaaatcaagtaatagaaattacaatacctgtttcagttttaggaacatatcggagtgggggatttccgcctaagcaaatgtagagaacctcggaaacgacactccaagcttcgaatcaggacaagcaagtagaaggagataatagtgtgaggtaagaacgaaggcgtatttcacgagtggtagagagaatcggaagaataggctttgaataaagtttcagaaactctgaacacgtgaattaagatacccatttgattattactttattctctccatccatgcacgttgaaaatccaaaacaaagagaacccagagagagtaatggacttataatcaacgaagaagctcgtatcaggacaaactatgtatgacaacgacgagaaacaacagggagggagaagttcttttcaaatatttaaataaaatgaaattaaaaaacgaacctttaatgcgaacagggaagatctgaaattgggttatgaacttatggtgtactgcgatttctgcaagttccgggataagcttttctaggataaggtgagcactgctccgtcagcacactaccctaaccctaataacctatcaaaatttgtttggaaacaacaacttttttagtatagtaggagatagatcgcccaattttcttgttcgataaatttgatttatttcttaataaaaaaaaaattagatttatttatgtaatgtttaattggttac

SEQ ID NO: 381392 - DNA, 1270 bp, Cannabis indica
atcttgatccactagaggcgaagtcacctaggattgaatctgtttatttgtatttcttctcttttctgtaaaattgtaataataagtattacaggggggatctaatttaacagaaacaacaacaacagaataattacaactccaatatcaagtgaaagtaggatacccaccactcaatataactaatattaaagcgttaactttacttggagcaaaaaatcgatgatgaagaatcacttattgtcacaatttaagtaatgatgaagaaatcaaaaatggacaaatgctactgttgaaattttagtttctaaaattgataatattacttataatcttgggagctggaacaggaaggtgttcaattggcataatactagtatcaagaataaacaaaaacaaatgaaaaggttggatgtgtctctctcagcctccaattggaaggagtatgtggatcttgaaaaagagttcgatgtgctatattataaagaaaacaagtattgggttcctcatgctaaacaaaattggctcaaacttgataatcactatacgacttatatattttcataagggtgcctctacccgtaagaaaagaaatttcattttgcttctctatttaatagtactgcaactgaaatctttgacaaagatagtcttgttagtgtgttccaaaactattttcatatctgatttgccttcttgtgaggatatggatccttcctcaattctatagttcctaaggttacttctagtatgaatgatcaattgacaaaggcatccactattgaggaaattaaaaaggccctttcctagctagatgagtcattcgaaaagttctggtaatgatggcatgtctgttggtttctatcagaaatatagggatactattggtctggaggttactgttgttttccttgattttttaaatgacgggagcgtataagggtattaaattgacccttattactcttacccctaaatttgacaaccctaagcatgtttctaatttccgtcttattagtctttttaatgtaatttataagattatttctgtgactatgactaatcagttgcgtgagattttgggttcagttatttcagattaggggtgagcataaattcgaaaaaccgaaaagctgttcaaaccgacctaccgaacactgttggaaccgaaaccgacgaacccaaaaattgaaaaaattgctaacgatttaaaccgccattgaacagtcggtttttttttttaggtaataaaccgaccgaaaaaaccgaa

SEQ ID NO: 381393 - DNA, 2876 bp, Cannabis indica
aatatcttctctgcacttacagttcctgttagctttggtatctctccgagtatggcatataagagtgatgactttcctgctccaactggtccacaaatggctactttctgcctcaatccaatctccaagtttacatcttttagtgttgaaagtgttgactctggatcccaactgaaaactcctccttgaatttctaagctcttatctgatctgggaaatgagtgtcttctttcttcctcatctttgagctcatcatctaataaaaatgaatttagtctttccaacgagacctttacttggattattactgaaagggcctctggtatcattctcacaggctctgacatggtccttaaagtagcaagaacagtgaaaatggtgcttgcattgagtggggcactaccaagaagaatacatccaaagaacacaacagaggaaacaatggttggagacatccaatacagtaaagtcccataaaccttcttatattgtgactctgataaccatttgagttcgcgatcacgacgggagttgatcaagttcttaaaattttcttcccatgattgaagcttaatgattttcatactgtttagtatctctgaagtggacctgagtctttcatcttgagcaaccatgaattcatactgacacttttggagtatctttgcaaaaggtatgttaagaagtccacatatgaataaaggaagtaaaccaggaagagcaccataaccagtgaccttgaaaagaacaacaatggacagtaaaagctggaccccagaattccatcccaagtgaagccaccataaacattcacccattctataagcatcaactgcaacataattcactatctcccctgttgagtgtcttttctttcccaaactagacagctttagctgcttttcatagactgcaaccattaaagatgatcttattctcatcccacttcttcttgagttgaaaaaccagtgcctctgagttaaagactcaacaaacttggtaagaactagacaccccaatatagaaagaccttgttggagattttcctctttgctatttgcataatttacaaaagcatagagtatgagaggagaaactactacagaaattgtccttaaaagtgcacaaatgccaatatatatattttctttcatgtacacttttactattgcccaaaggacaaagttctttgttttgtctcggctactttcctctcttagaagcccatcccatgcttgtttgaacttttggtaacctataatggcttcatcttcagaacttaaagaagggatgtcttcaagagacaatggttttgaataccccaagctaaacaacttaccaatccaagaaaatgtcagtttctcaagaaaacaagccctgtctatttctgttcctctgttttcagtcttttggacaagaggctgggatagactatcatcttcattatgctgagaaatcagttgcctgatattcataaaagcacaaaccagaagtaaaagattcacaagccacagcacaatgtcgatgacatcaatactttttgctctgattagtatttcaaggtttagagctgaaatcaaagaaaaggaggaaatccaccagacacagttcagaactctaagcccatttgtcccctgaagatgcaaagacactgaaagagatatccaaatgagtgctctgacaaggcaaaccaaccagttggagtgatcaaatgtgtctccttttgcatttatattaccaaaaccagcaactagatatgcaaggcttgtgagaccacagcaaattgaaacagctaggaatgtccaacaaccccttctgtttgctgtgcttatattacgtttccttaaagaaactactaccaacgacaggcaaaacacacataggaacagcaaatttataacatctatgataattctttggatgtaataagaagaacccatgtcaaatttgccaccaataatcaatgaaagcatccctgcataatgaaaatgaatcacaatgaatcgttaaagaacaaagtaaaacagtctttgaaactcagtaaggaaggaaaaatagaaatggttgttttgtataccaaatgagtctttgagagtcagtaagtatttttgccaagtcttttatgttttcatggctacagcagaaagccctggcgggcagtttccaggaaaaaccatttctaatccactccctctgttttgtctgtatttgtcctaatatgctaaataacttacctttttggcttcatcttgtttttgttttatattagaactcatttgaggctgctgttccttgttgttggtgttatgtgtgtgtatgtaccttgttgtcccatctcgaaatcctactttttccgctatagataattcgagtaatcccaactttctaagttgtataaaatgtagcaacataaacttaaatttttcataaaaacaaatcggtaatcatactcatttttccttttaataattgttattgtaagggacatgaatctgtcctatcatggattacttttcaactttttataacattttctttctcatttactttttattttcaacatttgttaagtaaataaattagtaaagaaattctgtatgaagtttacttagtagaccgaaaataaaattcaaatactaatttattacatttaaaggaaaaaaatctcaggtataataaaatatacaaatctattttcaatcttataaattattcaaataattcttataagatttaaatcttatattcaatatttttttttttgaggaaattagactcctttttatattgtactcttttatttttacttctcttttttaaagttctattacttttacatcttttttttaaatattgttataattttatctttttca

SEQ ID NO: 381394 - DNA, 2494 bp, Cannabis indica
tatatatatatatatatggttcgagtgatcattaagtaattaatgagtaatgatatgtacatcaaaataaaattgattttgtaccaaaatattacagagagtgatgtaatacttttttcttaaaaaaaaagtgtatttcatctaaagtaaacataattagttaccataaactgtcatattactacaaatgtaatattttgttgcataatataatttgtatgcacataccattacacataattataaaaggaacatatacataattccaaaacttctggtatagatgaaaaatgtcattttcctcagtagttctgaagtacaagataggtagctatagcaaagatttgatttccactctcagtactcttttgcatgcctttttcatcataacactactcatcttcttctacaaatagtcaaatataactttgctattgcagttttaatctgtgttggcaatttaaaagaaaaaaaaatagtattatttatagatatatataattaatccaacaatatttcatcatgcatgcatgcatgctttgaattcatttatatagagagcaataataatagtggtaccactttaatttgtttttactatagtagagacatatttatatttttggtatttcaagaaattataatttaattctttttattatattatgatagtttgcactataattatagtagttatcacacctatttttctttaaagagtttaaataattaatagtactgaaaataaaattattcaaaataaaaattaatatatctgcatccaaatgaacatttggaccatattttcgacactaaaaattattttaaattttttgaaaatagataaaatatatactatacctacaatatatactaccatataaaagaattgagtatactttctctaaatgataaaaagcagtaaaattttgcaatttatttataaataaaattcatgaatagatagggaagttttagtggataaataccctagaatcattggttttggtggagtagttttattgttgtgatcatgatgagatggttgaagattattagactgagattctgagtgcaattgttgttgaggttgacttaattggagatggatggttggttgttgtgcatgatcatatttgttgctaacaacactactatatcccattgtagtactacagcttctattgatatcatttatcatgtcacttgctccataagcctgataaaaataatatacatacattaatcatattataaaataatgcatataattaattaagttactatataccttgatttggagttccatattttctttttgaagtaggtctaccttcttatataattctatattctcttgatgaatgagatttccctgtcataaagttaattaatgtgaattattaggtccaaaatgaaattttattatgaagaaaaaaaaaggcaaccatagatatttgttaaacctttttgtttagttctcttatttcatcagttaatatttggtcctgcatgcagagaaataaaaataaaatgtgacaatgagtctatgaaataattcaaagggaaattggatatttataattaagggatatattaaagtttaataattgcatacctttttggtacgaatacctttcaaactcatttcgagttggttttctaaattttgcaaatctttggtgctcaagccagaaagttcttcccccattaattgtctgcatgaattgcattatatatgtttattcataattattgttctttatctttgaacaacattctattattaataaccttttctctctctaaaaatgagcattatgagctttaagtacttaaacaaagtattgtatagaatgagcttcattaattttaagttacctgtgacattcttgcaaatactgtagttgttgcctaagtgttgctgcttctctttgccaaaactatataagagattaataatataattaattttcacaagttattaatgtaaagcatgtttatagtttttacatatctatcacggcttaaaacttgggtcgtgacaattaagtgttagaaatactgtaaatctgtatatagccctaattaattcaagagaatcaaacaataaaattaaggaatagcggaagcgtaccggagtccatagaatcgactttgtaatgatctttattggtatgatcttccaatttgcatcaaaacctttctctgtaaacttttgctcttggtgatggggatacaagagtgaaaagatacgatgcaaatggggaccattacccgttatattaccaacagacaaacctgttggtaatatttattgactatttctatttggcccctcatcaatatagaaattgtctaattggtatccacatattaaaatcatgacaatcatgcccttaagtcataaactttattccaaaatagaccacataaatttgacttatttatttgatgacccaacacacattttatatatacaattgtgacccca

SEQ ID NO: 381395 - DNA, 2784 bp, Cannabis indica
ggcaaggcgaacaccggagccgtaatcaacctttgctttagtgttgaaaactctctcacactgatctgaccacacaaattgctgattctttctagttaattaagataatggcattacaatcttagagaacccctcaacgaaacgttgatagtaaccggctaaactgaggaaacttcgaacttcaataactgttttcggtctgggccaattctttactgcttcaactttccctgggtctaccataaccctgtcctttccaaaaatatgtcccagaaaagacacttgtgacaacaaaaactcacactttttgaattttgcatagattttatgatctctgagccgattcgaaaaactgtctttggtatatcttcatcccgaattctcaattggtgataaccagactgcaagtcaatcttaaagaaactgtttttgtaattgatcaaatagatcgtcaattctgggcaaagggtacttgtttttaacagtcaacttgttcagctcctggtaatcaatacacattcgcaaagttccaactttcttctttacgaacagaagaaaaaatatatattttttttatattttatgattattagcagcggggtacgccgctaataattttgaaatcaaaggcagaatttttcccgcgcactcaatagtggcggggtattaacggcgggcaatagcgggagactgcccaccgctaatactattcaaagcaaaaaaaaaatcccccaattagccgtggaattaaggggttcaccgctaatggtaccattattaggaaattttttcccccactaatgaatccgctgctaatatagatatttcttgtggtgttcttctgtgtttgaatttctaaaccctaaatctctctagctacttttgatttcatgtaaatttcttatgtgaattgtgtgtgaatctctacccctagtaggtgcaaagtctctcaggatttctcgaagtggttccaatgtctagaatttgagagtaactgattttgttagggttgttattggatcaagggttatttggctggtatttgagttattaaagcactacaaaaaatcttacttttagtcacaacaaaatttatgactaaaaataaaaatgttgtgactaattataaatcatcatttctatgatgtgactaaaagaaccgtggctaaaagtattagtcgcaaaaattacaatttgttgcgactaaatgtaattttagtgacaatacttattatgactaaaactaaattagtgacaacttgtatttaaatacaatgctttagtcacaagtaacattttgttgtgactaaaagtcatatttagtcacaaaaaaattatgttgtgactaaatagttgtttccaaaaatagcaattttttatagtagctcatggactcatgagtaataaattgccaaaaaaataccattttctttacattaaattagtctaataaatcatgtcaaaaaaaaaagtctaataacatttgtgtgtttttcatgatccaaggttgaaagaatagctaactttcaaaaataaaaatattgtattatatatctatatatattgttaaaaaatgtattatatatctatatatattgttaaaaaaatgtattatatattattaattagttaggtagactacttgttcagactcataaaactcgttatagtttataaataaaacatttcagcagagctaacctaggtaagtaagttaaaactatataatataatgtttgcgcgtgtacctaagccagattattgtctgataataattaattgaactaagtaagttggaaataattattaattaatttaacactaattatttttggcaagtagtttagcactaattagtttgttcagtgaagtgatcttggaatatcagagaaaagatccttatatataatatagaaagggtatccaaatagtatcaaatataatattgggtaaatattattttggatcctgtattttgtaaaagttgttaattagactatctgttttgttaaatgacaaaatgaacactgtattttttaaaattatacaaataggaccttgaactaattttttgtcaaaataaaacttaataataatctgatctaaagatgttatgacaaaattagttatatttttctgttcgtattagaaattgtcttaaaattggttatattaaaagtaaaattgttaaaaattgaactcagatatttttgttattttagaaaatataaaattcattttatcatttaataaaataaaatgtgtaattaataatttttacaaaataacaaatatgaaatattatacattactttccatgtacaagattactagctacatattagctttaatttctgacgcaatataaaatgcggattagtagactttggtgtacctatatatagggtagatataataatgatgcgtacatgagatattttcaggtcaaaatgttaccacttgattatacaaccatgcatgatgcattggatatataaaaatgtgttataagatatagcttatctcacgtacatgtgaaacatgcataaatcaatagaatttttttttttaaagaactttcaaatatgaaagctttcaataaaacagacatagttttataaattaatggattatgagtgatcttacagaaaaaaaaaaaagattcaaatatatagtatcaaatcgattacattattaatagtagatctagcaattaaacccaacaactagctatcccattattacattttaatcaaaaaaaaaaaaaaaaactaaaaaacgtaa

SEQ ID NO: 381396 - DNA, 1393 bp, Cannabis indica
cacactcgttgctgtgagacacttccctcacgcaaccatcaacggaaaaagattcttcggatcagagctacgtgagagagaaaaagtttgagaattttgatgattcagggttttttggatcgtgaaagtagtgtttggttgctgagaaaaatggccggaaaatttgattttccgatgggaaaatttagagagagagagaaagagagaaaataagaggagggagtgttgtggacggttttaacgttgggcttcttatatactcctttgggtcatgctaaaatgcgcacttgagtgcgcaatgcgccgctatttgggatttcccgggtgatacgtcgtttttgagtgacggtaattgctttttaagcctttggatttcctttcgctttgttttgatctatatttacagccgttagattagaaatttatgtttttttaaaaaaaaataaattaattaaattttccaattttatttattcctaatcctaatacgattctatttgttagctttatttttttattttttcaaaattaagctttgatttattaagtgacgtattttatagttaataatatttttatgttgtaaaaaaaaaaaagctttgattttatttcacattttttaaagcaaaaaatgtgatattttttttatttaacggaaaaaaaggggtgaatatcttaaaggaactaaatgaaaaaatagaaaaaccctaaatttttaaacctagttgtattcattagtaggtttgttattggatattaggaaataaatttttacgtttcttgattataagttaaaagaaacttttataacatgaactttttgtgccaatattattttctttattgtttcgttttagatccatggtaaaaaattatgtttaaaagctatattaataatgaaaataaagcaactcatgacctaagtgcaagaagatcattttctttcaatgaaaaatacaaaatagtaaattgtgatcataagtgaatgaaactacatattaataggggaggcagtcgtcttatctgaaattaaaattgattttaaactatttgaagttaaagtttaaataatttttttgaaccttcatttaaatacttttctaatcaaataatattgagtaagtttaacactagttggtgaaagtattttcaaagttcagggagctcacaagtttaattcaagtgaaaatataaatgtaacataattatgtattattttatattttattttgattatgtatatttttagttgtataattagttttttttcttttgtgtgtggatgctattcatcaataaaccaaattatttaggctaattaggattttttttcccctaactttgagatgtatcaaatcatgcctctgaactttttggtcgttaaaaattctcc

SEQ ID NO: 381397 - DNA, 1187 bp, Cannabis indica
atattacaaccatattttatctactattccaatccaggactttcaagacacacacccacctatggctagctcaagtggttaagttatttctatagtctgtactctatagtatatgccctttcattataaaagtattttcattggtaactagtttgagttacttttttacaattgacttttcttcttgtcatgaaaaaacaattaacctaatgaaaatttaaattgcttgatgaatatatgagtaaattaaaatttattctaaaccgttgaattaacttgaataaatggatttatatattttttacatataatatattacataaattatgtttattggtgaaattattttatatttaaagtttaaattttataatgtataacttaaaatttaaattttatagttaataaattttattttatttagttattgaagttaaaatttaaacttttttaccatactattaattttttctatttttaaatgaatgtttattcaattaatattagtcttatattaaagtttttaaaattaatttagactaaagtatttttaaacttaaaatataaataatatacttttttttaaatataagcatttgaatactaaaaactaacattaataattataaaaaaaaataaaaaaaaaatcagtttggacagatcaattcgaccaaactaataaaattattggatgggttaaatattttttaatttttaattagacaaattaaaacgactaaattaataaaattattgagcgagttaaatattttttaatttttagttggacagactacaattaaaagtttacaacctcatatatgttaggattagtgaaaatatgttataacctgtacaaggcaagtgcaagaccaaatcaatttctttcattattcaataaaaggaaaatcaaataaatgagtttatttatccaattgtaaactaattcaaaatagtttacaaaatgcaaaatgttgttcctacataactaaatcaaagttcctacttcccaccaaaaatttgtttaaagttcctaagtaaataccaattctaattgttgaacactaatagaataaaaattacatgtcccaaattccctatcccattcctgtcccaataataaaagactaatatctgtccattttatttattaggcattgggaattgacatttgttcatttttttaa

SEQ ID NO: 381398 - DNA, 1313 bp, Cannabis indica
ttatttatttttatttttttgtataattaagtacaatgacggaggcacatggagactatggggttgtagtcctccattaaatttttgtttttatatatttatgtataataaattaatgcaacaaaaaaaaattatatattaagtattaaaattagtttcttctaaactaattttttcacaatttacctcccataacacaatttctctctctattactagttaaatacaactatgattgtaagttgtaagtgatcctaactatttatatattttataatccttttattattgaataacatagattaaattttttacttttaatccttttttaacatgatatcaaagtaattgttgctcttttctttttttccaaattttttttctcttgtcgtttgtctctgataatcaatcatgagttttgcttctactacgtccatggctggctctactccaacgaccggtgcagatctctctattaatttttcacaaatgctctgtcaagttcgacaacaacaactttcttctttggcgtagctgctattcgtgattatgatctctctaattacatctcttccagctacactccgccaatgaagtttctctctaaacgtgatgcacaatctagtatgattcatcctgaataccatcttttgcttaaacaagattaaatgttatatgatcgatgactaataatgattatctcatctgcattaagaaacttgttgataagtttggttcagtagccacatctctctgctaaagagcatgttgctaccatctttaatggtctccctcaagattatgacatttttatcatctcaatcaactctcgccatgagaaatatactattgtggaaattgaatagttacttcttgctcaagagcattgactttagaagcatagccacgatcttgattctgatccctttgtcaattttgcacataatcgtggtgcttacatatccagatatggttcatttgatacttaatctttaggattactcctgctccatccaaattgtagctcatttattctaggctcttctcgtcaacagacttggaatccttatcctataggtcccaggcctaccatcacaccaatactgtgaatagtgctccattcccaggccaatttactactcgtccaacttgccaaatttgtggtcgagttagtcatgtttcttcaaaatattattagcggttcgaaatagaattcctagggattggtgtcgataatgtcgataaagtcccacttctatgcaggctatgattgctattagaaacattgttgttaatcctgcttggcatccgaa

SEQ ID NO: 381399 - DNA, 2092 bp, Cannabis indica
atatataagacagattagtggttagtgggcgtatagaacatatgctgatgggtcacttttttttttttttttcttttgaacttttcatttctgattatttagtgcataaagtaggtgtggctacaaatttgatttaaaatttagcaccatcaatcttaattgaatgtagccaaaaggagtggaccagagaaaaagacttgtaaattattgttacatcacaattaagtgattggcacttagttggtggatggcattgaatttgaggtattttaaatgtttttaaaatgaaatgaaatcatcaagtacaaaaggaaattaagttgaggaagttctagttgacaaatggcaccaatggagatggaatgctcatcactactatttatacggttacttaaatatgtgttgtaaatcattttataataattgtacatatatatttttcttcatgtaaatctaataatcttatactggtagtgtctctttttgtgatatattttgctttaaatttttttgggagtttgtataatatattatggattagaaaaaagagcaacttccgtttcaaaaaaaaaaaagaagcaacgttaccggacaccaagtgttatgcaatatcacatattcacatcttagtatataatttttttaaaaagggagatcttcattaaacatatatacgaatcaactaggaataagcatatcattaaaagccaaagcttaaaaaggtgcaaatgttctttcttataggctaatagcactagtttcaactcaaaacattttcttagagtattactgtgagatacttatagtgttagcactatgataaagtatcattttatatttagttagcgatttttataatatttgtcgaagtaaaataaatgagacacgatattaaattatatcaatattaatattatacctcacacaaaacactataggtgttcttttgtatttctcattgtttttaaataataaagcaagaaaactagctagtgcaccttggggtgaatgtaaatacttcacaattaacattcagcagattacagcatctcatcattgataataccaaattatcaaattactcattatcagtggcggagttaacctagcctttatgttagagggcaaaaaaataattcttctttgaaataagatataaattaaaaaaaatattaatttgttagataagaataaatatatgtgagaatataaataaaatatacattttagaaagtatggatcccttttagaggttgtattgtaaattttttcattgatatatattgttaacatcacatctttttattttattttgttgccaaagtagaatatgttcacctgtcaagaaaatgatattgttaatctcatacaaagttaaaatttactattatttttacttgttgaactcacatctatcttataaatctttatctgtttgctaatatgacattgacaagcccaattaacaaacataaataattctatcaaaaaaaaaaaaaacaatacataataaataatattgataaaaaaaatacataagtggcattaaaattaggataatatattcttatcaaagtctttttgataaatgttttatatataatctaataaaaaaatataatcttaaacatatatattttaagtaaaatactaaaatatttttctccacaacttaaatattagctacaagaagatccatcccatgactctacattctaataatcatttaagtatattgatttgtattgattttttttcagcatctagagaaacatattctatttttattattatatatataacattatatatattctagcaataatagacatatcacattctatctattcttctaaggaaaaaagttggcacattcatgcgaaggtatacatttattggtaacttctcaattcaagcagaaacattaatagtagtattggattggtctcacatacttgatcttcctctttgttctaacttctgttgaatcacattagaatttgattgtttaagtactgtttggtaacactttttaaaaaacattttctataaaattgtttttacgtttttaattttttaattgaaaatcaaa

SEQ ID NO: 381400 - DNA, 3101 bp, Cannabis indica
atatgtaattaagcaaataagaatacagatttataaaggtttaatcccgtgataatggcaatagcctactcttctttttaatatattggtttaaagaataataagatcacaagaagctggccaagtgagtctcttaagaattctcagggaaaagcttacaattattttacagcataagagctctctagaaagtatgttttgaatccctgtacaatagaatttcttcactatgtatagggaaaaaaataaaataaataggtttcccaaaaaagataaaactaaaaaggaaaactaggaaagtttcctattatttcttgtcggtgcaagtcaatcccataaaattagggatgtgttatgataaatccaacatgcaagtatacatatcattttaacaggtaatactcaagtaagtgagatcgttcccacgaagactgtagctaagtaccaatcaattgaattcttatttttatttggcaatcaaataaatggattttgaaactaaataatctaagcaaacatcaaaaaacaaaacatgcaaataaaaagagatttaacaatagatgtgaaattagggatatgatttcaattgctttgattacccattattaatattatttaatttcttcttcctcctatgtgatgatagattataaagtaatctaaactcttttcaaatcataaagatcttaaattgcatgtcaactactgcatttctgagatagtacagcaaacaatttgcattaagcaacaatctaagggtcacacaagctatgtgactactctcgtttcacatcaaaacttatgtttattcatttagagcattctcaatactcacttttcagattttgtattgagatcatagatcatgcataaggtagctaatccaatacatgtaataagcaaaaatatgaataaatcataataatagggaagaaataacaatcaaatatcattaatccatggaataatctcaatcaatattcatcacattcttaaagagggagtttacctcataatcaaatctataattaaactaaacacaaataaaaacataaaaaatcaagagaaaagaaagaaactagatggaggattggcacggatcgacacggatcgtccacgctcgctccaatatccttcttcttgtatttctagggttccattctgtgtatctctcctaaaatttgtgatctccttccattaaaatagagtttttagctcaaaattaaaaaagacgaagttgcccatgtcccgtacggagtcgtggtcgcgaccacaggtagtctagtcgtgaccactgtagaaaagtgagaaaaaaccattatgcccacttttggttgcgaccacagcgtttctggtcgcgaccacgacatttctagtcgcgaccacaattcaaattcctacttcaacctctcttagtaagatatacataattttcacatacaaactccaaatgagctgactcaagatgtgttagaaagataaaaaataggtctaaaacttttatgttttgattttttccaaattctgatcaaaacatagtctagttaagacttaaaattccaatcaatcaatttaaccaaaatttcaatcccaaaacgctaacaattaattcagatatttttttttgttgaagaacagtgtataaatgcaaatttaaattctttaattggatatcatcctaaaaattctactctttctaactttccacaacccaatgatcaatatacttacatgacttacctctttcaactaatgttaacaatccttgcttgaaatcaaaaggactttcatagttgtaatgtaatggcttaggcaataggtagataaaaagttattttagcgtatattataccataagcacactataacccgtcaagcacccacaatagtccaatatcccgatattcgcctaaaaaaatttttgattgagaagcttacaattatgttttcaacatcacttctttttcactatagttgttgcttttttttttttaaagaaataagaaatatatttttgtctttttttttctttattttagagatgctaaaaaacactattaattttataatcttttctcaatcacctacttttcaaatagttttactcccaaacattttattcccccaaacttattccaaagcttatggcataattcacggtgcaacgagaataaaacaatgaatagatacatttcaggttttattaagtgtctataaatttaaaacaggttcaagctcaaacttgataaactagagatgattgaataagggtaggcttgataggctcaaacagtccaaagaaaattacctaaatcatattccgaacaagtattgccaagaattttgcctcaagagaataaatatgcaagttctatcctattcaagcaatcattccacataccaaagtagaacaattattatacaatccaaacattgacaatttacatcaatacacaattttcaacaagaatccaaattaatccaaagagtcaaagaatcaagctcacagttcataattttcaatccattccataaataacaacagcgccaaaatcaatccattatatcatcagcttaattaacaacacacttaacaaagaaaactagaaaataaacatacaaagtaataaaacaaaataaacaaacaaaccaaaataataagtcccctctcccaaactaaaatttcacattgtcctcaatgtgaaataaaaatttaaagagaagaaaatctacctcaggtccatgccacatcaacaagaggttgacgcccataataatacagacaacttgaaagttgtttttgaaaataccctcaagcttgacaagtgatgagtttgaaccaaaagcaacaccaacaacacaagattttggatgatgagcttagagagaagcatttggtagctcgtagaggatgtaatattgtgaagctgacattaatggaaaataagaatccattggtaattcataacataatagcattgacaacctcaaatcaacaactacaagtaattcttcagccagcaaagatacatctttcttatttttctcaaataccctctcaattgtttgttcattttccacatgaccatccacaaccttga

SEQ ID NO: 381401 - DNA, 4732 bp, Cannabis indica
ttttatttgttaatgcacttctcaaacacaataaaaatttcatatgttttactgttaacaattattacatccaggacctttctcacacattgtggattaggatagctaaacccttaggaaatctttactatctggaacaacaaatccttcccaaagttggttgcactatacatacttgtaatgttcaattagataaactctaatggcataatcgtcctggaaatccatttgtaacagttactaataaaatcaataaataattataagtttctaaaatatctactccttttaattgtcctacttgtcagattgaaaaaaaaaagaatacttttcattcaaataataatatctcacttgcaatatttgatcttgcacacatggatatttggggatcatattctattccttctgttgaaggctatatgtaattttttaactatactggatgaccattcatgacacacttggttgtaccttctaagagttaaatcagatactccttagcaatatagaattttttacactttcatatataatcaatataatataaacataaaatcagtccaaacatatagtactaaagaattgaatctcactactttttatgcaacaaaaggggatctacattacaattcttgtgttggtagaccacagctgaatgttgtggttgaaaggaaacatcaacatatccataatgtggcttgggctcttgcatttcaatacaatttaccattatcttactggagctacatggtaacaactgcattgaatcttttaaacatgactccttctgtcctatcgcaagctaaaatttcttatgagttcctacatcaaaagtcaccctcttacactcatctttgcaactttggttgtcttgcatatgcttcttttgtcacgaccacaaccaaattctctcctcatgccaaaccatgtgtcttcattcgctatccatacaatatgaaagcttacacccttctcgatatccaaaccaacaacatcttaaattcacaagatgttgtcttttatgaagacacatacctttttgcacacatatctcaccatcaaacattgataagtttttcacccctgttccactcattctccgactgtaattcttgagacacatcactctcagaacaccatccctgagaacaaataatctcatcacaatattcctgagataaatccatctcaaaacagtaatcccaagtctaaaataagaagaaaatatagcactaccagatcaggtcgtgcacaccaaaacccctttatctcaatgattacaattgtgatttgattctcaaaaactctagtacagatgatccacttgcaagtgttctatcctatcatatgttctcaccacaattcaaagctgctattcttgctctaaatattatttctgaactaacatccttcaaacaagcctccaaacacaatgtttggaacaatgctatgtgtaagcacaatgttttctatatggaaaattatgtggttgtttaactatttagggttttgtttttccttgtggctgtcttggtcctttgaattgaccatctaaattagtcttagttgcatctgcttagtctttattatattattgtttgctatgatagcttttttagcttttatatcttttattcaagtgtaagtcggtgctagctggcttgagctgttgaagttagttagctgagttggttgtcctacaacttggtatataatgtgctcatgccgctttttctaactaactctcatcttcggtagaattattttatgattcttgttctgctagggcaaaatatttcttctatgtgtatttgttttttagagatggcgattcagtgaatcttcaagaggctgaagaaggaattcaaatctgcaatgtctgaagagagtttaaactaaattgttgaaggaatttcagcttggtggaagcaaggagagcttgtcttcttggatctaagtgtgcttatgttgtcttgattgtgttcaagaattaggtaacatcgtgtaaattcatttcagattacatagtttgagttgtaaaatcagaactgatgtatgtaattgaattgattttatagtgaatgttactttacccgattcttggggacccaagcactactcagtttgaatgtgtttccaatgaacatgaagcttataaatctggtgttcattgatttagctttctagtctaaattcttcaagatatccatttaagttcaattacatagctttcagaaatattagaacattcactacatatatgtaaataaatgcccttaaaaaaattacagatggattgttgtacccctgcaacaaaatcaacatgtcattggcaacaaatgggtctacaagataaaatacaatcctgatggctttgtagcatattttaaagcacgtttggtagccaaaggatacacttaacaaccctccattgactactttgacacatatgctcctgtagcaaaatttagtactataaaacttttctttgctcttgctgccatcaacaattgaaatttacaccacatggacatcaacaatacattcatacatggggatttacacacagatatttacattaaacttcttcaaggttacacttcgtaagagcatgtaccataaaatgctgtctggaagttgcaaaaaaaacttgtatggtctcaaacaacttcaagacaatagtatgtcaaatgaatctccacactattacaacaacactttatacaatctaaaaatgatcatccattattcatttcacaccaatcaggtgttttcctcgcccttctcatttatgtcgatgacacaatagtagccactactaatgtctctacattacaaagtttaatttcaacacttgatgcacgtttaaaactaaaagaccttggcacccttcaatttttcctttgtctccaaatagttcgatgtcctaaaggcatctcagtatcacaaagactcttaacttttcaacttttccaagactctgattacctttgttccaaaccattatccactcctatggaaccaaatattaaactcaacaattattcaagagaatttctttaaaatcaaactcaatatagtagtatcattggcaaacttctctacctcacaataacacgatctgacataagttttactgtgaataaattaagccagttccttcaatctctgccaaccacatctggctcctgcaaccaaaattctccaaaactggaaaaattcaccaagacaaggtctcttcttccatgcttcttcaccaataactcttcaacttcaagcttttacagatactgattggggagcttatcttgacaccagacgatcaatctcaggttactgtgttttcataggccgctcacttatctcgtagaaattaaagaaacaataaattgtcttaaggacatcagtcgaaacggaatatcgggctatagcacatgctacctaactcacttggctcacttctatccttagagacttcaccatcaacatcaagctacatttgatactattctgcgaaaacaatacaaccattcacatcttagaaaatgtggtttatcgtgaaaggacaaagcacgtcaagatcgattgtcatattgtttgagagaaaataatcaatcgtactctcaagatgaaccacgttccttcaaaagtcaacgtccttgtagacatcctaataaagccattattccctgatcctttcaaagaaatattgttcaagatgggtgtcacagatttctatactccatcttgaggagacctattaagattagctaagtgtcatttaatttttctattttttcaattttagttttagttggctttattatccaatctcttagtgtatacatttagaggacccttcattgtaccattttacaattaattcagtatatttttttactctctgagtttctaataaaaggcagtgcccatgcacttgcaaattaatattttttcaagaatgtaatgggtttgttaattcctaggaggtgaattcaccactatcttttaaattaatgaaagtttttggaggtttttcaaaacaaaaaaaaaaaagaaaaaagaaaaaaacttgagaaggtttgtacatcataaaagagaaatgctgaaaggtatcagtagtgcttaatactctcttatgtatcgctattcgtacaattaagtatcgggtcccatataatttagtgtaatagtttttagagactattgttaaccaattataaggtgacacatctagaaggtactaaacagcatcggtgccgaatagcaatgctcatcttatctatttcgtaaaaagatttctacattataaataaaattgtttctttcccttgaaaaaaatacacgttttctttgtcaacataacgaagacactcataagataagtagtagagctatggaacatatttctttttcttctttttctaaaagagctttggacttcaagtaagtgtaattttctttttctcctttcttttccataatgtttttttttttttgggttaatagtaaactttattgaattgccaaaatgcccttattgtcttgttctactcaaagcaggttggctctatagaaaggccaacctgtcatgacatggttggcgcaaaaaaataagcacattacatattatatatatttaatattttcttaaatatctccttataattaacagtactactgatctaaataatttaaaaataataagaaataatcatttcaaccatgt

SEQ ID NO: 381402 - DNA, 588 bp, Cannabis indica
aaaacaaactcatagcaaatatgataaaattaaagacaacattcctcatgcaaaaatgacttcatatcaaataacatgatgttatactactggccaagagggtaaaattcactattaatgtcgtggatgaattgaccaagcaaattttgatacattgaatattggaaatttagatgaattacaattacctctaacgaaatttcaataatttggaactaaccaaatccgttaactattaaaaagaaaaaagaaaaaaagaaaaaaaatcgtgaatgagagatgcaatggtagaagtgttgtgaagattaagggacgtcggcttgattgacttggactaccgaattgaagaatatagcaagttgggtttctcaatacaaatttgtaccagattgggctaaaattatttgacaaattttttattacaagacaaaattgtataatatatatttatatagaaaaattctaccatgtgtatctctattttagagtttagaaaacttataactaaaattttcatatgattatatattatagtagatattctacatgttaaattttacaaatttagaatgactttttttttttttg

SEQ ID NO: 381403 - DNA, 4047 bp, Cannabis indica
taataattatgagaacataagttcaaacataaaattgttttttttttattcactggatgggatcatgggataaagttatcctaagttcttagattaagttatctcatactaagtaaattaattaatagtcaagtagagtgtgatcttaccaataaccagaaacaagcaactttccaccaataacctttggaggccttccccatattagtgcttttggattctttttaaacacatgcttttgcttgttagctcccctaaataccaaatacctgctcaattttgtagtacaaaaatgggaaaaaattgtatatgaataatggttacaatgctttaaaatgcttagaattagaaataatattattgaaagttaccccattataaagacaaaacaattagctataactgcagccgttgttaattcaaccttattatgcagaagccaccaaccctgtgtgacaaagccaacaagcatgatcaacaataacaaacaaatcaaatacagtttgcccattgcaattgaatttgataaacttgtgtaacaactcgaaaaaaaaatcacaatttatggtgagctctatgcatattaaaaagaaaagaaggattaattataattagtgggaatcattcaatctctgaattcaaatacatcaaaacatgcctgaatactaaaagtgaaagggatccacactagatctccaaataccagcatgaagcctaacctctctgctattatgtcccatctataaaaaaacaatgacaacaaatgaatcaaatgtgtataatataagatacatttctgaatgacaaagcttagcaatgtaaaaagaacaggttacaaaagaagctattgtggataataaagaagaacaatctcaactaactgaatatctaggtgaccattgtggtatatatttcaaagatacaataatacacttacgtggaagtcatgtactcctcgtgaacaaagtagtccaggatgtaaaactggaagaaacgcatcaacagaacatcaacaatcacttaagatatgtaaaaggaaaaaccaataagtaagaagttcggggaagcagattactgtggagaataactgaaacaagatcattgacctatccaaagtcccgtcttcaatacttcttgccagaactgataggttgataagaagccagcccatcattccagctctaacaaagaaaaatctacagaacggagtaccataagttgtggtagcaacaagcacttctagttgaaagaccatataacatttctcagttcataattttcattcattgagattccctctttcttcccaaaagcagaaagaatgcgctacatgtatttatggcctaaattcttgaataatggcaaatgaggcggctaaaatatggcaactcaaaaagacttttaatttttaaacaacaaaacatccattaatggttgaaagctgaatttataaaaaagaagtccaataaagagcataactagaaaagataaagagaactagattacatacttgagatcaatgcccaaaaactgaggattcagctgtattccaaaccacctagtaaggaaatgcagggtggccttgtcaatatatgtacccaaaaagtgtctaaacatggaatgaagtaatgaaaatggaaatcgtgttagtgtgaaaatttacatgtccaaaaataccacccaacatttttccccctttgcatattttaaaatttcaacaagaaaaataaaaatttactagattatgtgaagaggggatactttcacccaattgagcatctatcagaacaagctcaaacaaatatctctaacttaccagtcatgtattaggtttcctgtaatatgacgcttcaaggaagagctctgacttcttgaagtgcggccagaagcatagaggagcaaagtaacctatcattaaaaattatggattgtgaataccaatataagcgcagagactacagcattagagaatccataagtccataagtttattccagagttatcaataagtgaaaatgtcacttgcaacttaccagaacactgaacaaaaatgtagttgaaagaagatcaagacccctgtctgatatcgcctgcaaacattgttaaaaggttaatacaaagataaaatcaatttcccaaccaataactgcatactctatctttattcaacatctaaaaccagagtgaaaaatccctgcaaaagcttcagccaatcatttggaaccaaatccatttccaggttatgatacatttttcaattttcaggccatattaagataccatccaacttccaaaccacattatgaaatggttttttgaaagccacattatgaaatagttggaatattgatgcacctcaaattcttataaattttcaataaaactttttctttttttctcagatcataaaatccatatccttttcttttctttctacaaccaacgaatcagaaaaaacacttagctagatgatggaaatagtgaaacacatacagtaagcgataagacattgatcttagccgcaaccccaataagagcaatcagcaaaagaagtgaaaccaaccctaccaataacacagcaaagaaacatagtaaatatgtcaagaaacttaacccacaatatcaaaggtaaacttgtacaacaaattcagtatttagagatctcaatacaaaatgtcaattgtgttctcagcattttctcagtatatcattccaataaataagaacccaaaaggaaaataaaataaaaagccactgtaacgcattttctcagaatacatgaatgaattcatatttagacatgttatgtattatgtatcgaaatgtggataaactaaccgttgcagcgataagaaagacgagtgttgtcttgtaaggtaaccccaggaacaatttttccaggcaatatagatccagctattgccaagtaaacaaaaaatgctgctagtatagcaacctgagaccctcgagaggtgaaaatgaaagggcaaaacaatgaaatttaagaagaaatagataaagggtaaaggtcagaaatggaaggaagggaatttgcagaaaaaaggtaagacttacagagttccatgaaggagtaagagtgtgaagaagaagacccagatccatgattcagtgtcgcctcgccctctccgtttcgctcgctgattactcagtagtatcagtagtcatcgtcttagtctatagtctatatgatgggaaagaatcctttgtcagctatcataattgggctatttgtgcaaaaatgtgatttttttttaatgtgaatttcttaaaacaaaaaactaggtaaggaaaccgcactacgcagggttgttgataaatgatttatttaggtggcgaagtgaaagtattttttaaaaacatgttttataaaattatttttaaaaatttacaatgaacacttttaaaatagatatattgatgtcctatctgttttagcatctaaaataatttttttgtcaaattttttctcaggttcatgtaagttatagttatttaagacatcctgcaaaattttaaaaaatttaaaaagtttaacacgccgaaaactatgttcaaatattgtattgcacacgtgactatttattttatacgcgtgtaaaattgattgtttgaacattgttttctatattataaattattcctaatttcttaaaattttgtaggatattttaaatagctataacgtacatgaatgtgaaaaaaaaaaattagagtaaaatttttttctaaataccgaaataaggtaagggtgcatcaatacatccattttaagggagtgcattgtagaatcacccaactgtttttaattgtcaatttttttaattgagaatcaaaattttaaaaataaaacaatcactttcaatatttttttaaacagttttttttcttaatcaatattttagattctaaccaaatccggatccaaatccccccatgtccttgacgctgaacccaacctctaacccgaacccaaattcaaccccgtacttagactcgatttaaataaaatcaaaaaataaaaatgaa

SEQ ID NO: 381404 - DNA, 2395 bp, Cannabis indica
aatggcgaaaacaacgatacccacgaatcccaatccttctttgaagactttgatagtgcttgttccactccttacgttagtgcaccatcgagcccaggccgtggaggaggacacgttagtgggttcttttacagttgcccagcgagtccaatgcacttcgttttagcttcttcaaactcagtttcttcttcttgttttaattccgccatggatgatagtgatactagctcagttcctatgggttacgagttcgagttctcagctcggttcggttcaactggttctgttcaaactggatctatgagctcagcagatgagcttttcttgaacggtcagatcagacccatgaagctttcaactcacttagaaaaacctcaagttttggcgccattactggatctggagaacgagaacgaacaaaaagaagaagatgatgagatttcattggagcccattagaggtagagatctgaggtctaagaataaatccttgagaagaagaaccagatccatgtctccaatgagaaactctcagttcgattggtcagaagaagaagagaagaagatctcaactccaaaccctaatgggtcttgtaataagaacaaaaatggcgaagatgacgaagaagaagaagaagaaaccctctcatctgaaactacaacagcttcttcttcaagatcatcttcagctggaagaaactcaaaaagatggctttttttgaaagaatttcttcgaagcaaaagcgaaggaagaagtaataacaagttttggtcaacaatttctttctctcccattaaagaaaaaaaacccatcaataatcccattactccttcttcttcgaaagatcagattaagaactcagaaacccagaaagcaaaaaaaaccagtagtcagcaatctgtgaaaaaatcagtgataggaaaaccgactaatggagttggaaaaagacgagttccgccatctccacacgagcttcattacacaactaaaagagctcaagctgaagaaatgaggaagaagacttacttgccttacaggcaaggtttacttggttgtttgggattcagttcaaagggttatggagccatgaatggactcgctagagctctcaacccagtttcttccaggtagacacaaaaagacaaagacaaagaaacttaagcactgttaatggagtttccaaaataactgtatagaattttttttcttcatgaactttttttttattttaatttgaagatcttcatgatatgatggtgatgatgatgatagtcttttgtgtacttatgattataactattattattattattggggttcttggttactttttttgtttaaaagagaagttggtcccaaaaatggggtattattattattattagttattatataaatatttttccccattttttttgtggctttttgtataagtgtatactatgttgttagtagaagcaatgatttgttatttattttatctcttcttttctttttgttcttctctatctatctatacccaggttgaagatctcttgatatttcatctttactttatttatttattatttgtttttgtgggtggggaatggtgatgttgttatatgtttctttgtatttacatgaaaggagccaatttagttatttgttatatatgtggttttggatggattatatactagttctcatatatggaaaaagcctttgtggctttgttttgctttgaaaagaattaagctttaaacaaaagggaaagttttgtgcctttgtttaagggagagggagagatctaggagtgtgaaagtggtgtgttctattaatttttattgctattttttaagtgtgataaaatgaaatattataattatgtttatcaaatttagaacatataaaatgatgttaaactttgctcaaaaaatatattttttcatttattctttattattgcaattgttaacttttttatttaatgatttgttacattttgactttttaaattaatttgcatgaagtaggtattccagatctaaaaatctttggccaaattctttttaattcctaaatctcattggtacacatgattttctttaggattaatagagatattaagactaaaattttaagtttgtatcctatataaatttaatatttatttttagcggcataagtacttaatttgtaaaattataattttctttgaattttatcaaaaacatttgaaagtaattaatactacatgtttctgtatagatctaatgatctaaaatttggactttatatgtgacttgtttatgaaaataacagaatttatactgataaaataaaaaaaaaataacagttttatcaatataggatacttatcacactaaaaataaacattgagttgatatcactt

SEQ ID NO: 381405 - DNA, 3875 bp, Cannabis indica
aaaaaaacaaataacttctaaaatatcttcaaaaagaattgaaaataagaagccaataaaagataaaatccagatttatcaacccagagctcaactatatgacctcaaagtctcaaagacttaggtgaactgaaatctattaatatcaccactgatttcagcatctgaattataactcaagaaaattcaaatttaagaatgccatgctgttgacaacatcttctccaatataaattatcctccaacaatacctatatgaatgcaagcatccacttaagtccaaccaatcagatatcaaactgatttatttttattgcctaaaccgactaaagttccaactgcagcttttaaagcaaaaattaacaagaactcaaaatttcaagtaacgcgcattatatgcaaataccagaaaactttggaggaaaactggatatcaaaccttatgatctgtcaatgtggcaaatggcataccagtaacgatgacagctcttccagcatgatcggcaaaatctaatccttcacttacctggaaaattagttacgataagccactatgaacaagctttcactcaagcaggacattcatattcaaaatctaacaaaatgtatgcacggaaaacctcatttacactggtgtattatgcttaagccagtaaagtagacatttccaaggctaagattcaccaattacaaatccatgagaactcttggaatttgaggaagggcttgtaattaaacaatagcattgacagtgctaagcatataagcaaatgtaactgctagaatcacaggtaccaggtcgtgtaaagatcctaacgacaataattccaatatatggttaaccagtatgcaaatacatttacctttgtctttcagttcaggcaatattttcattcctgtgacaattggccaaactaaataaataataaaacaaagtgcacactttatagaccctgtcagattaacaatgcacgagtaccaaatagttaccatgatgacagaatgcagataaatgttaagaattaaaatactttggaagtgacatggccaaacacaatcaaactgtttgtaaatccatccatcaacatataaaccaaaagatccttgacaagtagatccagatataccttgccacggcacacagcaaaaaatattgcaccagaacctgaagtgtccttcagcttggccatgtaatcctgacaaaacaggaggaaaggaaagcatcagatggactgattaagtagaggaagtaatgtctctgtacatattaaatgcttggaacaaatatatataagtaacctcaattgactcagaaaacaaagaagattgtctaggttctacaacaggtttcttatgcttgcagattctttcccatattgttgttgaattagcaagactctgcacacattagaacaatgacaaaaattgtttaatctaaaacaaacaaagatgacttttcaggtgagttgtattccttaccgcagtcttccagcacccaatgcattggtccagaaggtagtaagatggaaagaatacaagcagcccatcaggaacaattcgagcaaaattgactgacaacatttaagtcaaaacacaaaaatcaaaaatcaaaatcgatgattagcgatcaggttcaagcgctactgatttggattggacagcttccaagtccttaattcaataaaaaaaatttaaaaaataggtacgttgactaacaccttgcagttagcaaaactaaacagagaactttgagaagaaaaacaaattcaatctgtctctaaaacatggaagcataaaatacacctcggactgcttatctatgcatcaatataaatgaacaatcatgttccaatattaatttggaccattacagcacacttgaataaatctcaatggtcataaaagctgtgaaattgaaataaaagttaacagctttccaaaattaaatattaaaataaccaagtaaattttctgcagaaaaatagctactgagtagtgtgtcctataaaaatttaactaaatcatttgctgttaaaactcacaaaggctatgctacatacctattgcattaccgagctcttgcttgtattcaagagtgtcacgactcctgtatgaggagttgaaagagtaacctgagggaccaactggtacaactccagcccatatctgattagagtttataacatgagggttctccaacctcacaggaaagtctctgaggtgcaaaagagaatattaaaattccataaaaaccacaccaaaatcaaatggtaaaatttaagaccaaatatttacttacagtttcagttcctgagcaaatgaatccatcggagataatgtaccagatgttaatataatagaacccacaaacaatttagagaattcctccatagcaattcccggattaaagcaccaccagctaagtgtcctagatgccttacctggataatggaaaaagagatacctaaacttcacaactgcaaaaagcatgactgaaacgaggcctaaattagtagtataagtctccaaagttacctcttaaaccatccgatgcactagcatcaacttcctgcacgtgaacctaaaaacagaaagtacttatattttcagataactactttatcatacttctcccacacagagaaagagagaggttattgtaacatgctaaatgtatgactgtaagaaaagaaaacacaattcacaatttaaccaccaagtcaacatttggaacttacaagatagtattttgcatgagaattgtcctgtctgaaaattaaattaagcatgctgccaatactttccagccgacaggcactgtttttcccttgtagctggttatcttcttccaaaagttgagttgcttcatcaattatcccaacaagcttggatgaagtattaggagtgatatttaaatcagctagtaattcatagatgtaaggtccaggtttagtgaaccccaaatccttggattcaataggcacttccgcaatccgcttctcaagctttaaaagtagtgctacaagatatacatttataactaattacaagtatgttcgtgaattctgctaaaatgcctgaagaatttctaatgaaaaggagaaagaaatgcagatgtcgggtaaactaaagggtttaatacttttttggaccgtttgttttataccattacttttttggaacccgtttttaaaaaaaaaaattgaaccatgtgttttggaaaaaaaagttaaaattgggatcttggagccgattttggtcaaaatattttgaatatagctagatcaaaaaagaaaccatcagctgacaaaaaaaaaaattgaggagctccaaatttgacaaaatattttggtaaatattgggtaaaaaattaaaatatttttaaacatgggtccaaacaattaattgtggaaaacctaaagtccaaaatggtataaaccgtaaatcaaatagtacagaataatagcgacccatgtgcaaagtgctgcaggcatactagcactgatggattcactatcacaaaacttttccggaaaatatattttcaatattatatctatatttatatcagtaaaaatgtttaggcactgaaaagtgaaaagtactggtgtggaaaatggcaccttctattcacactactactggaataatatttaccaataatatttacctctaagaattgcaaaattatctgggttatttgacttatcatcagaagcttgccttctttttacagaaatatcaatacaatttttcgcttcagaaatgcaagccgtaagaagcttagaagacaagtcaaaagaagctgcatcagcacataggccttccctgcattaaaatttaggttatataatgatctatgtactgcattgaca

SEQ ID NO: 381406 - DNA, 3300 bp, Cannabis indica
atgaaccatgttttgcaacctttctatttgcaacagctatgtaagtagatgccaacctgttcagcagcttaaactcagaataaggtatatacaataaataaataatcctacatcaaatgattatgcctcactaactgattcaagtactttactttgtatgtgagagatacttcaacttagtcaagccctagaaaaaacaagggaagagaacagctgaaagtagtttcagtaacgcaattataaacatcaaccgtacatctcttccataagtaaaagtaaacttaaaagagaaaatatatatatataaataaaaaaacaaacagggacatgtagaatctaactaactaaacttaatcagcagttgctaacaagataccttagccaatataaaacatagtactagtaacaacttctgcctatgtgcctatactgtataaggactaagcaacatatctataaaactgcatacagtaaatttctactaaatcttgttcagcatcttaaattgaaattaaaattcaacagtgacattagtttatatccaattcataagtacttcttagttccctatatatcataagataagattcatcaaattctcaggtcatagtgaaaagcaaatgaagcagaaattgacactggcaacggcaacatcatacaatcaaactaaatgcaatagcttctgttgtataattctaaacaccaatcctacatatcctcaatagataaaagtccccagcaaataaaaagtacaaacaaaaaaataaagattaaaaaaagaaaactatataaaaacatactacttcgaaatcaggatattacgcaaaattccaaacaaggaaaatgaaactaaagacacaacaagtaccaacaggggaaaaaatggaagaaaaactctaacagggaatcaccgccctcttaaaagagcttcatccaactcctcatgcgatgatggaaacaattctatatatcgactaccaagagtcattctatcctttgccattgctcccttagaatcttcagctgttggaaactcaacaaatgcttccccagttggcctcccttctgaattcaaggtaaaatgaatagagtcttctatcaacataaaatccttaaaaaactcaataatatcatctttgccagctgaaaatggcaatcccctcaaccttaatatccctgtatgttcagcggtatccttcccttcatcataagatttagatattgggacacttcggcgaggagatccaccacgagaatctaaaacttcaccagcaattgccttgtaatattcctgcctcttacttctgaacacttcaacatatcgcctgcccatgttctgtctattcctttgaagtgcaaagtcaacttgaagaggatacccaaaaacacagaaagcttcccccgtgaactttccattcttgtggacaaagagaacatcaactatgtccagaccatggaagaattcagccacatgaacttctgtacaatcaaatggcagaccacgaagtttgaccactgggaaaggtggaggttggcctacatacccaaaaggagtagggttgtacataaaacttggaccaggggaagtcccataaaatgaagagccctgttcaactacccgctgacgctttgcacccatttcacgcccatccccaccatcagcatagttactttatgttccatcaatcatcaatcaacagcaaaaacagtggaaagcattaataaatagtgcttactctaaagagatcaataaaatggaactgctggacactgaattgtatcaatacacgttcttcttttttccatatgaaacatctaaaactcataaaacaagtgaaggaaaaaaggtattcccaagtaaacatgaaacttttctagagatctaaacaatctaaaagataactttagaagcagatgacactgatgaaaagtactcgtataaatttcaaaatagattattcgtgctccctcatatcaaattgaaacgattataaatgaatttattgatacctttgtttctcttaaacatgtggatgtgaacaagaaagcaagaagaccacattacagctgaagcaaccattaccaccaccacaaataacagatattcgaaatgcttcacaacttggttacaggatacgttggttttgactctaaagcacgtatggataaaaaacagacagattctacagccactcactaaagtccataggatatatcacaactctattcgtttttcatgacttacaaaaaaaaaaaaaaaaaaagaagctcccatttcccatggctataagggtttcacttagttccaaatcatcattattacacaactaaacccactgaaatgaaaaatactaaaatacccacaataattttaatatatgtatccttatgcaaagaaattatccctgaagaaggccaagacctcccaaaaaaaactcggttaaagttcaatcatttctaaaataccctatattcccaatattcgaataaaaatcgatgatgagctaacccaaaattaacaacaatatatgaacttaatttcaactttaatcgtttacaggtgattaattccaaattaaccctaaaaaagttaatagggaaaaaacatcaccataatgaaagtaagaaatccaaatctgggtacagttaacatcaaagaataagaaaaaacgaaaaaagaaaaagacataccctctatagaacattgtagttgtttcaactttcaagtttgagaaacgggtttgcgaagaaagcacctgagatgagagctcccttctaagtgtgtattcgtgtctgtattcaaagaaaaaaagtaaagagaaaacttagtcgaatactgtagttctatctatgggtttttgcgtcaagtcgtagtctctttatgcgaaccccaatttaggcccattttttagtagcttctacggatgtaaggggtgtacagatttttaccacttaatctgacgttttcgttttttttttttagttttattttcttaattttttaagtaactttttggttactgtggataagaaattaattagttacatttatataaaaaaaaaaactttataattatattatataatgtgagatatattttagttatctttaaaacttatttgtataaatagcaattaatttcttatttttatagtagcttataatttaaaatatatttaagtaattttaaaaattatttttaaaactaatgagttgacatgtaatataacaaacttataaaaaaaatattaattaagatttaaaaaaaattataaaatagtaactaatcactatattag

SEQ ID NO: 381407 - DNA, 1471 bp, Cannabis indica
ttttttttgcacattttttgtaattattttgtttttgttgtacatttatgaaaaaaaaccctatatataatgacatgtttttgaatatttgaacatatatttatattaatatatatatagatgagttgtatgtagaataacataaataaatgttgctcgctgagtctttattagtatataatgataattatataataatgataattatataatcggtaatgtataggattatcatcaggctataatagaatgaacataatatactaacacgtttggagcttatgaacaccctttaaaatatatttggtcgcacaatgggccataacaattaatactctcacagggcatgtgggtccattgacccataatttctcataaaaagaatgagctcttttattggtaattaatgtgaaatgtgtgtggctaagatagaaaaaagttgtatttataaaagcccttgcatctctttctcttttgagtgtagatttcatgattaaaggattaaaaaagataatgtctgaccacaactattatttacaaggcaatatattttattgactaatgttttgatgccttatataagatggcatttttgatgattattgagtataattgtcatttataatttttgattagtgttgttaatccttattaattttaacaattgatatcagaacttggttatttgattttaacgctcaaattatttgtttaacttttatatttttcacccatatattgttcaatattggcggttggttttatgcaaaactatattaaaaaaaattttgaactttctatttttatatgaaatttaaaatttggatgttcttgggctattgaaatggttttagtacaagtgtttggatatgttattcaaagacgtgatttttttcggttttgataaactcatgaatgatcaaaaatgggtaagcctgctttgggtttggggagtttcttggccaaaatgggttttggaaatcaatagagcatgaaaaatggagtgaaaaccctaaaatccacgtaagaaacgaccattggagctgcattttccaggcgggttggatttgtggaatcaagtaaaaaaatgggtcgaaacgaagcttcaagaagtcagggatgaagaaaaatttcacatcattttgcatatctggggcaaaaacaaagattattgcaaacaattttcgctctgatggtcttttcaaattgtcatagagttctttagcttcatctttcaatgttgtgaatgatgcgggtaagagattttatattaaggtaacatccttatcattatggcacaaaagattgggtcatatttctaaagaaattgttgacctcacttttagccaacgacagtgagtcaattaataagcgattaacaatataataaaaatagagcaaaaaccaataagtaataaagaacaccagatttaaagaggttcggccctgtaagtgtggtaatagcctactc

SEQ ID NO: 381408 - DNA, 3280 bp, Cannabis indica
tttcacctccattgacttatcctagtttaaaggaaagataatatttttaaatttttaactaaatatgtaattagagatttgaataatataacaagtctaaaaatagaatactaatacatataattaaacaaaaatctattcatttaattatatacataaaaaaataattggaaacaaaagattctaattaaattattaaatcgggtaattaaactatagaatcttgttatttatctctttacaaaattattgccttaaattactcaataaattaatgatgatacttaaaataatattaattataatttaggaaaattatatataaaaaaagaaaacaaaggtcaacaccctttccctttatattcaatattttttattatatatataataataaaaacaaaaataaattttgttatttatttaattttattgttatttgaacccaaaaaattatcttatgccaatttcagtcctggccaatttcatatccaaaaaccctgattctgaggtctaatctctaccagataaaaaaggtcaccttttttactcaatccccaaaaaataaaaaataaataaataaataaataaaaacaaatttatctaaaaaatctccaacaaacaaggtgttatatatatatatttatatatttacaaaaattcattgaaaaaactctctattatatattcatatataggtcccaatcctacatatacatataagaaaattctcagttgattataacatgtaaaactcttcacaaattttttgtatatatatacacatcttcatattcttcataatcatctcattcataatcaaaataaaaaaaaaatgattatgatgaagaaaaaaaatcccataatctcaaaattcattataataatctttctccttcctctcttagcttcatgttcatatcaaattcaaaaccaggtttctctttttcctattttcaacattaattcttgtaatatttatatatattatatacatgtacagatttatatatatatgttattttatttttcaggtgtatgttgtgaacttgggagaacatagtaataacaacattaatggagtagcaaagacattgagtgagattgaagagaatcaccattcatatttgttatctgtgaaagagactgaagaagatgccaaagcttctcttctttacagctacaaacattcctttaatggcttcgcggctctactcactccacaacaagcctctaagctatcaggtaaaaatacccgagtttttattatatgcagtgacggaatcaggattagaatatagacattgatattgattatgtatgtaaaagtgttataataggtagtaatgattatgttatgatatgttataatagaacattttcaccatatatatatgcagtgactgaattaggataaaattaaatataaaggccttaaaaaagttgggctagtgaatagtgatgaccaaccttgttattgatgatgtatgttatgttatattatgttataataaaacattttttattatttatatatgttcagtgacggaatcaggattaaaatataatataatagaaatattagaacttatacaaaagagaataaaaagttaggctagtgatgaccaactttgtttttctctttctagctcggttattgatagtgttatgttatgttataataggacattttcgttatcatatatgcagtgacggaatcaggattaaaatacaaaagaaaaaaaattaggcgagttattaccaaccttatttttctctttttaacaaggttattgatgatgttatgttatgttatgatgtgtagaaatggaagaagtggtgtggatttcgaagagtgagccagacaagtacacaatgcatacaacaaggtcatgggagttttcaggattagaagaaaatgaaagaattgttaactctaacaatcatttcggtcatatgcctgccgatttgttatcgaaagctcgttatggcgaacaagtcatcgttggtctcttagacagcggtaacatacattcgttaccataacataacataacacaacataacataacataacataacatgatgatgatataacaatgagaatatgtatatatatatataggtgtgtggccagaatcagagagctttagtgacaaaggaatgggaccaattccaaaatcatggaagggaatctgtcaaactggacctgatttcaattcatctcattgcaataggttggtaacatacctaaattaattaattcatttatataaaaacacacatatatatatatatgaacttatattctatataccttttgctttaattataacactattcattgtttggcataaattaatgtaacactattcatgttgtcattaatgaaacattttgtataataattatcttaatatgattattattattattataattttcaaactataatagtgtttaataattgatagtttttgtcttagaaaagatagctcaccataacaataatgattacaacttttgcttaaatattagacaaataagagagttttcctattgataaatgggacctatagtgatatatatctatatatatgtatatgtatgtatatgtttgtatagtttgattccaaatactcataatttatctaagtctgaagaaggtgcagtagtcattgtcaaacaccacttgcttgaccttgtaagaaatacatagtatattcacgtgtgaagtttatgcttttgggatagaaaagaaagaaaatatatatacatatttatatatataaatatgtatatatatatccaaaaaagtaaacaagacatcataaacattaaagttcatcttagacttgaaatgttttttctatatatgcttagcattatataatagcttaccatcaagtatcattatgaattattatttggttgatatcttagtttagttagccatacatataatgtatatatatatatataaataattatatgtatgattaattggacattttccaatgcaaaaactaagactctgcatactgtcctacaacatatcatgtttccaagattatatctctgcctgcaatggtttttgtgttatgttttattacatagtgtaaatattattttagacttgtgttttgtaaaagttacggattgaatttttagttttgttaaatgataatttggactttgtattttacaaaataatcctttaaattgattttttgttaaaataaaacttaacaataacttaatctagaggtattatgacaaaact

SEQ ID NO: 381409 - DNA, 2928 bp, Cannabis indica
gtttgtttgttagttttagtatacataaatgtagtttacctagcttataagcagcgcagccttgttggaatttaggtatgtgctgcgaatatattgatcggttaacaagaatagcatctggtgaaagagtgatcatggattaatgtttagaaaattaaatacaaaaagcaaaagctcggaatgcctttatttcttctaatattccttttccaggcatgtgattctcttattttctctttcttatctttataagttgtcaataatttcgagagtagatgagaatatataacaaattcccatcattaatatatgtttataggtcttcatcctaattactaatttaagcttgtaaattgtgtcattattactaatttacgcaaattttgtcaatattacaaagtttactcaactagcatttctctagtttttattagaaatcgattattgtttattattatattttttttggatgtaaagtaattgattggtgtgtgataccttttaagtagactcatgaataatgattattacaataaaaatttaaaatattgataacccttaattaattaagcgaaaaatgagtaattaacttatattggagattaattatatgtaaaggccgaggcgaatagaataatgccaaccctgcactttatgaaaaagggcaagtaatatttgtcagggaagccataaagaaagtgatctattacaaattttaatatatatatatatatatacatatatatctttataaatatcaatatatatggctaaggaatatcgatagtgtccaaccattactattttatattgcatattattgtaggtaaatttttgtatcatgtcaaatatatgggcgtagggacttttttcaaaaaactccttgcctagctaaaaaatatgtgaagcacttttattttattttaaattacaaataaaatatgtgtgaccctatactaaattacactagttatggtggtgttggaatatgtaataaccttaataatattgttgatctcttttgtgatgccgaggaaatattctcgtaaatttcacgaataatatagtacttaaaagagaaaaagttaacattatatatacatctacgggcaagagcatatatgtatacacctaaaaccaaattaattaagggaatagaaccaaattattaagggtgagtaataagtatatatttcaagtaaagtacagagagaaaaatgaccaaattatatatacgctgtcgatataactctaaattattaaaatggtttaaggaaggaacattaacaattaaggaaagggaaaaaaaagaagaagctgacgaatatataaattaattatgtagagaggaataggtcaataaccacccgaacataaggtcccccacaattacaacaatcacatgccattcgctatcgaaggcatttgaaacaaagagagacaataagaatacgcaatatctctcatttcatctcatatctgtgtgtgcggctcttctattgaattaactaaattcacctaacccaatcatcaaaccttcctctacacacacaccacaaccatatgtaactcttttcatttgatgcaccccaatagttaatacgtaatcccaaactcatctcatcactactagtactacctctctctctctctctcataaactcatgatcagaaaaaacaagacaaattgatcagaaaaataatgatgccgcttcaacgttggagccctcaaacagttgtacttttgttgcctcttatgttttttttagtagtagtagtgtcttcttcgaataacaccaacactagtactagtactagtactactaattcttatcatcgaaagatcacaagaggaacctgatcatgaatttcatacgggaataaagtgcggatcatgcccttgcaccaacccctgtgaacaacaaccaacaccgcccccaccaccgcctccaaaaacgccatattgcagcccagtagcacagctgccacccccgccaccaccgccgaggtttgtctatgtgacgagtttgcctgaacaaccttaccaagcaaatgttattcctaataataactggcagtactattactccggagttgaaggaataaacataccggagctgaggagtagtacttttctgcttttattgttgccttttgtattttttatgtaatattattagcttttttttaagtggcttaattattcatcatgtactgtattattgttatttactagttactactactacatgtgtgttattattatatgtgttcataaaatttattaattaataagaattagctggttctgggggacattataatgtgttattaaatggctatttctcgatctgggtcgctatcgttttcttgtacgtacaaacttgatgtgttagtacatattcagtttctaattacatgatatctaaatatctcaggtacttatattgtgcatatataatgattaacacatagcgaagaagtgatatatagtatatactattactaggtaattatgcacatatgcatacacttgcactgaatggagatggatctgtgtccacgaatgtatctattataaatacggtatataagggtataatatatgcatacaaacatacatgtgtatctagggcaagtggcaaaaacaattaatgcatgtctgacttgaagaacttgtataaggtactttgcattttgcagtatctgcgcagaccgatctaaattgatcagaacacagtggtggtcctatatacagtcagtacaactgactaaaattataaatatatttatgtatatattgagaaaaataaaaaatggttcatgataggatagagaaaataaaggaaatctttattttgtatttctctctaggtcacggctgaaatgccaaagtgacaagtagattaggtttttacaaagtgaata

SEQ ID NO: 381410 - DNA, 2174 bp, Cannabis indica
caaagtaataatattttattttaatttgaaggaacaaactgaagaataaatgtatttttatataagttgttatctcaatttttatccactcgacgtggcatgttctcatagtcaaaacaaaagacgcgtggaatacagactgtcaataatcagacaaatgcactctatgcagtcccaagtcaagaacaagacagaggtgcacaagtattggcagaaccctagcaggatgtccaacaggttggacagtttacaacctgtagaaggtcgggcagcctgcctttcgaaggccagacaacttacagcttgcaaaaggctatatagcatacagcccacaagagacaagtgtaagacaactcaccatgaactggccagggtagtgttgtacggttcatgaactctaaagatgtcaagatcacaagataaagtcaaacaagacaagtctttagatcctggtcggaccatagctagacgcccaaggaggtttgtccaaccaaggatgtttgtctgactaaggaggtttggccgaccaaggaatattggctggccaagctggacagcaaagctatatggagaagctgcacgacaaagttgtacaaagaagctgaacaataaagttgtatagaaggagtccgaataacccccaaaattagagttggccggccaaaatgtgcagacagctcctaatagactaaacaagttgcggggtccacaacaagccttctaaaagattatcaagctgacctactattgcgagacaggtccaacaacccatgaagatagggatattccctcaagatattaaaactatattgtagggatttagttatcttttttttttttgtaattcaaatataagataaaaaagatgttattttctctattttaaatagatatccttacctatttgaattgagatattttgtaagccctacaaatataaaggacatgagatcacatgaaaagggacctcaatttgaagctacacgcctatagcctctctccctcgaacatcacatgccatttatgcttcctagacactaagtcaagtttctccataagttcttctcaagatctcatcaattcttgatttctaacacattgttgtcacaattgtaatactaaagagagtcatagttagaaattacaaggttttaacctgtgatctgcatggtattatctcaagagtgaatacaactaaaagaggagtaggtcattacccgttcattaagggggtcgaacctcgataaattcatgtgttatttttaccattttatattcttatttacacgtggtgataatcagcaattaataaggatccgttgttagttgactaaatttcaagtcaacatttcggtactttcattgagagctgcaatccaagtttcatccatctctttttgattaatcatcatggttctaaccagaagaactactccttcagatacccctcaggatcctatggttgtggatttggtgtgcgtggtcctcctagtacagataacccgtcaaccctaccaactctaccaatcctacaaatcgtactaatcctgttgatcttgctaattcgacaaatcccaatgatcaagtttttccgcttaggaccaaaccactagcagcatcccagacagaagaccctgtccacccggaatagcctccacataatgcaactgagactgttccacgattctacgcaagagaaacaggactaggatttggcgaaccatctattggcaagcctcgcttggacttgtaggatgattttgagctggctagtcttagagaagtggtaggccagatttagggtcatgccaactagcttcatcatgacccataacaaacacgcgctgttatttttaatgctttcgtccagtagagacgagaattcctaaagtcgatggatgaccaagaggccatcctctgagcccactaggcagagttgaattgatgtaatttggaggtcagcaacctattaaggcgattcaatgacagaactgtccggagaggtgagcatctgataagagatcctttgcaaggaaaacttacagacaggtcgggcagggtctaccgataggtagaccacagacaaacagtccaaccaggtccctcaaacatgagaacattgttggaattattttaccaggatctagatgatctacattgcatagggataaaat

SEQ ID NO: 381411 - DNA, 5255 bp, Cannabis indica
ggtgcatagcacccattcattgaacaaaaacaagcagatacaaaagaaaaaccaagagcaaagggaaactctgaacaagagactccccagaagcaaacaactacaaccagtatcccaaaataaaaaaacaacaccaacaataaaccagaacatgaagaatgataaaaaaaaaaacagaacaacaggaacttcccaagcaccagcaacattctaagggaaaatccaacatcctgaagcttgagaagacccaacaaaagaaaaacatctaccctgcatctggattccattccttatagtcatcgaacaccaacgggtccacataattcacatcaatatccccaacagctgcattgagtttagcccactttgccacattgtgagccatgaaattctccttcctactgatatgcttgagtttccaaagccgcagctgtgtagagcagctttgaaactgagcagagattccatcaagatcaatgcactgctggactccttgggtttccgaaatgtttgttacaacgcattcattatccgagaagaaattcacacaagtgagttccaaacgcacagcatgcttgactgcacataccagcatcaaagcctctgccaaagctgaatttgtagcagaaaaacgatctgcaacaacgctccatatccgatttttcgagtccctaaaaaccgctgcaccaacagagtgatcaagaccgatagttacatcagtacagcaggtcatccatccttctgagggtataaggacagtagcatgcttcaaggggcgatctattttgcaaaccaagtgatcattgagccgcctacaagcatctcgaattgccaccgtaatcggtactagatgtccattatgaataacttcgtttcgcgtcttccaaatcacctcaaaaatgcataaggcccctgtcataaactcgatgaaactgagattggggggtctatttctcatgcatccaaactagtccatccattcctcccaattctgagaggactaattgttctaattcccatctaccaaaccaggcagctgaagcataatcgcaattccaaaacaagtggaaggatgattccctctccttgttacaaattgggcagagggatgattgaagattcaaaaccattgcaattctttcacgcgtagggagagcgttattcatgatttgccaccacagaagtttcagtctcgcatgaatagaattattccaaatgagtttccatgtcccactaggagaggctacacatctacgcttagtgattatattgtatgcagatttaatggaaagtaaaccattagcctcacctaaccatctccacgagtcaacttgctgagaattcggtagaccaatgtttaagatatgcctcgcatcatcacggtgaaaccattgcctgacccttctttcattctaagaatgattctcatttaagaaataatccaccaagttggcccactgcgtagcatccaataatggttcaggttgactattcccggttgggacccaagggtcaaaccaaattgatgtagaccttccatcaccaattctacggcatatcccttctctcaataggggacgagttttgaggatgactttccacaacctcgaatccgatcccttactttgcacatcccaaaaactacatcccttaagatatttgtgctccatagtctggaacacaaacttgtagtctcagttaccattttccaaccccatctcataaagaaagccttgttaatatccttagtttgtctgaatcccaggcctccatgaagtttggacttacacaaattgccccattcaatggtatgaatcgttttcttttatctctgaatcaccccaccagaaacttctcaagctacggtcgatggtacccgcgatgtgagaaggaatgacatctgctgaggtagcatatacagcgagcgagtttccaaccgacttaaccaaacacgctctccctacttttgacagcaatcgggccttccacccttctatacgatgccggaccttatcaatcaagaatttcaaatttgcagcccttttgcgagacctaaggagcggcaatccgagataaagggcatcctccttcatcttcttcattcccaatttatcagcaattgcatccgcacggtttcgaggaactcttttcgaaaaatggatggtagacttttagaaattaacggattggccagaccaggaactatagatctgtagacactgaaggaatgcatccgcttcctctaatgaggcctgaccgaacacattacatcatccgcaaacatgagatgagtgattggtgttgctgatcttgatgttttgaaccctcgaatcttcctcaagagattgaattttgtgatcacccgggatagaaggtcagctgctaggatgaacaaggctggcgatagcgggtctccctgccttaaaccacaagagggaggaaaacgaccttgattaacaccattaaccatcagattgagtcttttaatttgtacgcagcttcttatccattcccgaagaggagtcttcacaccatgaaaggaaagagcttcctcaacaaagtcccaatgcattttatcataggccttttccatgtctagttttatcatcatgaatccttttgagccctttttcttttccatggaatgaacaatttcctgagccatcacaattttttccgagatggagcgacccttgataaaatctgtggcaaaattatctgtggcagaataggccttaatcgcaaagccaaaatcttggaaatgcatttatacaccacattacaaagtgcaataggcctgaagtcatttgccgtcactggattcgcattctttggtatgagcactaaattcgtatcattgataaattctggtaactttgccgtagtgaagaagtagtgtatcataaccatcatatcacttttaattgtgtcccaatgagacttgaagaaagctgctgggagaccatccggtcccggggctttgtctgatcccatcgccaaaagtgcattatggacttcctcttcatttgggatgagataaagatcctcccacaggtggaaatctaacccagtgaagtgccaatcaaaattcaccagacttaagcgatttagtgccttggacaatgtcttgctaaatttctctataaagactgcggcaatatccttaggttcctcatggtgctccccctgatcatctttcaagtattggatatagttccttctccgtcgagtaaccgtacttgccataaaaaattttgttgcccgatctccttctttcagccacgcgactctcgacttttgtctccaaaaaatttcctctctagccaaagcctcattaagagccgctctagcctcagtatgagaaatttcatcaactaaaatgttactttcaatctccatgagtctggattgggcatcagaaatttgagaagacagtttcctaaagtgggacttattccacttccgtagatggtctttagtcactttgagttttcgatacatattcaccattggatttacatgtgttgactccatccacgccttcttcaccacccaaaaaactctaggatcccgctcccacatcagttcgtatttgaattgaggtttagtgcaatgttttcctccatttgtatccaacagtatagggttgtgatcagaacttgaagctgtaagatgactaacaatggcatttggccaggcgagtctccattccaccgaagccaatgccctgtcgagtctggctctcatcaaacaagtacccccaattgagctcgatccctttttgaaccatgtaaatttgaccccaagaaagccaaggtcaatgagccccgatctatgcactgatcttctgagatcaaacgagtatctagcaatgttactcctcctagagtagttcaagcaatcagtatcctccagcgtaccgttaagatcgcccatcagaactagggggagtttacaattgcaaacataatctctcagatccttccaaaagccttctttctcagcatatacaggcggaccataaactcccataaaaatccatggcttatccggggggtctgaagaaatacgggcaataattttgaacttatcagtgcttttaatattgcaccccacgccattcttccaacataaagcaaggcctccagtcgtacctattggagggacatagtaaaaagtttgaaagtgaattctcaccaaagtagatgttaatttagccgccgttaatctaacttctgataaaaccagtaactcgggattcgacttccagattagctccttcaattgtcgaactgtcgctgcgttcccaagaccacgacagtttcaagcaatagctttcataatgcttcgggagacttttccggacaagtctccgcagccccaaaacgaaaaacctggtttgagttgatttctccttctcccttggactctttcacttcctcaattatacaagaagaacttggttttgaactacaatcaacaatgacaaagtggttgtttaagtctatcttgagatcaaagatgttcttctcccagcttgatttaatggatgtgtgtctcttcctcaaagcattggcttccttgcttttgagagggttaagtttaggtccatgaaaggcggctgttttgggcggtctacctctgcgttttggctcattcgcactaccctgagcctcaagtttcagagaaagcttgcctgaatctttatttgttggtcgtcctcttttccttctcggagtagaagtgtctgaggatccaggggagaaggatcattccctaatcaaagatgaaggatcctccttgtcatcattaatctttcttgagtgcagggcaggcgagtcggacttcagaagcctagtctcttgtttttcagaactcccttcagtattttttaatggttttggttcaaaggaaattccctcaagggcttttctcttcttgggcccaaagtcattctccatggacctaaagtcttcaatacccaagagagggttaaatagagatgcttccctcatatatttgtccattgtaccaaggcccgttaaagttttaaagcccaaattccataactcatttgagggccatggtaacgaatgggcctggctacccaagagagtggaataaggccccatagcttttgaatgatttttactccacttcgtattccctcctgttgtcgagtgaatttcgcaacaccaaaaagtactatttaattgatataaaagagaatttttagggaaatgacaagtgcgagt

SEQ ID NO: 381412 - DNA, 1150 bp, Cannabis indica
tactgatagagtatcttacttaaaaatatagggtctcggtcttgagttcttcactcattatgttaaaacaataaattctatctaaagagagttgagagagttttgaagctcgattctcaatctgaagctatcagtggggattgaagctcaaagatcaatggttgaaggtatattagttttttcatcgcatatacgatctcaatatgtttataatttatttcgctttttcatatcgatcatatatacttctttttatatctaaataatctaatattcatgtcaataatattatattatgaaaataatattgttatgaactataaacttattatattttttataaacatattattgattagtttattgaaacttatcaacggtatgagtaacaaacaatgtcatcaaattaagggaggataagatgaggtatacgctctaataattggcaagtggtctctaaaattgtctaagctatcgaaagtatgggaaatgaattgcaccatgtaatcacttattttttattagaaaaaaacaaaaaatgttatggaggtgatccattaataactcaaaattgtgatatacatatttgtatatatatatttatttatatatattttttattttgttctataaaacattaaaacttgaagaacttaattattatagtttgtctaaaataatactaataataaaaataatatcatattagaacatttttgtaaattgttgtcactaccacgagtgtgtggtgtagttggttaggatattttgcaaagtctctcatttggttgtacttcggagtttgagtttccatggtagcatttatcttgagtgataaaagtggcactcttttgagagtaactagtatttgtgcgccctattgagaattgatccctggacttcctattttaaaatgacattctctaatctctatcacttagttaaaaactattttgatatattattttttattatttaatattttatttatatactaataatttttttgcacaattttggagccctagtgttcggaggccaagctcacgccttgctcgtttcacctcagaatcggccctaacctcgattgacaaccattttggagactctatatgtaacaccctaactagcataggcgtattacgtgatt

SEQ ID NO: 381413 - DNA, 1487 bp, Cannabis indica
tctgagcagccaaacaggtaaaagaaaaatgcttcaacaccaaattgtacaatcccctgcgaggcttggccttaccaatcctaattcaccctctcttcctaatcccactcccccaaagatacctccgtcccaccatgtgtcctcaaattcctcagccaccacaaccacctcttccacccttctctctcttcttcctccactccctagagctcaatcccttctcatccaaatggcttctcttgcctccaaactatttgaagtttctccaaatcgttctctttggctcactgcgtttcgtggcgccctccccaccttcctttcttcccagccccaccctcaatcctcctcctcttcccactcgccagactcttttccttcttccactaaggaaatccttacactattcactgcttaccagacccaactctttgaggctgttgctcagctccaagagattcttgatctccaagatgctaagaataaagttgcacgagaaatccaatttaaggactctatgttactttcctttgctaataaagtgaaagaggccgagcgtgttcttgacattcttgttgatgattactctgattatcgccgtcccaagagattaaaattggttgacgacactatagatgaggaagaagaagatgatgatgattcttctcatgtaaccaccaataccactgttgcatcacagttgaatttatcagatatcttgtcctatgctcatcgaataagctatacaacatttgcaccgcctgaatttggcgctggtcaaggaaacctttctggcgcattaccaccagcaccccaggaaggacaaatgcgagcctctcaactatacaatttcgcatctttggatgttggcttgcctaagatggtagagagtgaggagaaggctttcgagcctatgattgagcctgcagctccgttgccagcagaacccaacccactttccaatttggctgcaattcaaggtctgcttcatccaaacatcactgttccatcaggatggaaaccaggaatgcctgttgaactgccaagtgagttgcccttgcctccacctggatggaagcctggagacccggtgcctttgccctccttgccatcccttcctgttcctagagctggggagcaacgattccgtcctaagcaacccgaaccaatacaagttcgtcatgttcagcttgatatccttgaccaagatgatgacagcagtgattatagcagtgatgatggaagctcctccgatgatgattagagctctaataggtactaaactttttctgtttatatatctatatcataatgaggttgcttttttccttcaaagataattgagagatgttgagagatgaatttgtaaagttattatgtattttttgcattatatgagaattgttgaaggaaatttaatttattgtcttcacactcattcctaaaaagcaagtgtctagccaacgtagtgattataggtcgattgcatc

SEQ ID NO: 381414 - DNA, 1813 bp, Cannabis indica
tttttttataaattattgacattatttgaattagctactttcaatcattctttgcaaaatgatatctatctttatcttgtcaaaatttttgataggaatcactttgcaaagaattatcgaaattaggtcaaaaatacaaaaaaccgaaatatgtacgtaatatgatattatcatgttttgattttatttataggtttttctgaagtaaggagagggtgttgtggatcagggtatttagaaacatcagtactatgcaatcttagggcaatggggacatgtaccaatgcatctgagtatgtattttgggatgcttatcacccttctgaggcagccaataaaattcttgctaatgctttgctcaatcaaggtctttccctcatctaaaaattatatatatatatatatgtatgtaataatctatatcccaatgttacaaatcaccacgaaggtctttttgttttgttttgaatattaaattttatgacttgttattaatttcttgtattgttggtgtgtttaatcaagagtaatagtgtttttgtggcttgtattattatgtatcaattatcaaggccgtataataaaaataatgcctttgcaacttattataatgtcttatacatattcagtatttttttcataattttttattagttaaaaatattaacattacacaatgtaattaatgtgaaagttactagaatcaaagatgtgacacaatatcacataattaaacaaatatataaagtacttcaagttatattcaattccaaatgtaattaattaactaactttaagtaaaatagaatttgtaattgtttgaatccaaacacttagaatttaattgacaaagggctagaagagaatatttcttagtaaaatataatccttctagaatatcatatatagtaattaattgacaactaaaactccagctaccaagatgagctggcaccttataattataagtaatatacaacatgagaaataatagcatatatatatgcagtgactatatattaacataaattaattatatataataatatatgattagaagactagggaagatccaacagagaccatatcattagcaagtatactattggcagcttcagaaggatgaaaagagtcccaaaagacatattcagatgaatttgaacatgttccaaataattgcaatttattgcatagcactgaagtttctaccaatcctgttccacaacaacccttctttgcctctttaaatcctgtacattattaattacatatcataatcatgtacttaattaatcaataataacaattaatatataaaagaaaaagcatatatatagattttttttaggtgagaccatcacttttacttttattttaagtgcatatcttatttttgatatagagagaaattgtaagctaattttttttacatgactatatacattatagttatatagtacgtatctggtttattttggagaaatttaaaataatttaaatattgaaaatatgattcaaatagttagttacacacatgcctatattattttaaatgtgtgcaattaacaataatgaacattattatttattttgtaaattatatataaaatttctcaaaaacgtacaaatatctactgtaattatattgtatactgtcatgataagaaaaagaaaatagaatataatttttctagatgttaaaaagagatcttctagaaaatgctcctatagtaaaagcaaaagtactaatgtctattgtggacattatcccacatgaaataaatggtagagaattgagccatatataagaaca

SEQ ID NO: 381415 - DNA, 3704 bp, Cannabis indica
ttataaaattactggcaataacaatactcttgtaaattttatgtgcataagccaacaaacttagacaaagagatgcttttcccacttgttttttagtaattaaaaaattggatacttttttaagatttgtcaatcttcattaatacaaaactttttgcacacttttcaatcatcatcattattattatatgatctttttattttattcttgtttttgttactatatacagcttcttaactaactccccaagatcaatgactacaaatttgacttttcaaataaaatatttgttattttaataataataattaaaaaaaaaaagatgaaataacaataatggagaaataatttgaagtgtgagctctttcatttaaaccgttgacgtttaatttgttgtgtatatatatgtatccgaattgtgctctgaatattctcctttatttttaattttaaggtaggaaacttagtataaatatacaaagaagaagattgggtttttctaactcgatccaagtttcatgatttgtgaagtttaaggttgttttaggggataacatcataatgggtcaaatgggtttatcttctttttcattttcaatggtgtcttacattatcctagtgttgggtttgattattggtccattgctctgtaatggaggcaaaacaagcactttcgttagaaaagttagagaaacaagttgatatgcctcttgatagtgatgtttctaagactcctcctggctacaatgccctcaacaggtatacttatatatatatatatatatatatattgagtgtgttctattaggttttctttttggtgaaaagggtttgggttgaaatttatgaatttggtctttatgattctatttttatgttttttattgtttgaaattaaaggttcatattacacaaggagaccaagttggtaaggcagtgattgtgtcatgggtcacagtgaatgaaccaggttcaagtgaagtgttgtattggagtgaaattagcaaacacaagaaggtagctaagggaaaagtagtaacctatacttacttcaattacacttctggttacattcaccattgcaccattagaaatttgaaggtgagaaccccctttttctttattgtgtccttttgttcattttcgctcttcattggataaatgctatgttaggtgtgattctatcgaaaaaatttgtttttgccatctcaaaaccaattggctgtaagagatattgtaacacattagcaatgtcggactctctaacatgagttataatgttgttttgtattaattgtgacagttcaatactaaatattactatgtggttgggattggtcacactgaaaggatgttttggtttttcactccaccagaagttggtcctgatgtgccttacacatttggtctcataggtattgcatttgatgatgaccatacatgttttctgtgttgaatcaagcttatgattttgttctaacataataattggattgaaatctgtttgtaggggatcttggtcaaacattcgattcgaacaagacgcttactcattatgaaatgaatccacagaagggacaagcagtactttttgttggggatctttcttatgcagataactatcctaatcatgacaacaacagatgggattcatgggcaagatttgttgagagaagtgttgcttatcaaccttggatatggactgcagggaatcatgaacttgattttgcaccagaaattgtaagcctctcttaggagacatagcttaactttcacaatttcggtttggctcaactgttttgatgatatgtttggaagcaatagaagagaatttcaagagagaacacaatctcagttattaggattagaatgcttgatatctaagcctttttaaaccaaatatagaaggaataactttttgttttgcagggagaaactaagccctttaagcccttttcgaaacggtatcatgttccttataaagcatcaggaagtactgctccattttggtactcaatcaagagagcttcagcatacatcatagtgttatcttcttattcagcttatggtaagaatatatctctatatatatgtgtttgtgtgtgtatacatgatgtgctttgtattgacaagagtttgcttttacttcatttagtttcttgtttgatatggtttgtaaatgtttctatgaacttttcttgtgtccatacaagtatcaataaggttttggtttggttgaatataatgaaatgaaatagaatggaaatgaatcgatttttattccattcttttgtttggttacatttcaagatatttcaatccagtggaaattttttgcaccattttacattttaacatagaagggaagatcattccaatgcaagattttattcttatttccattctcattcttattcttttattttcattcctccctaccaaacgatcaaaatttctaacttgttaaaatttacaatgattcttaaacttgtagggaaatacactcctcagaatgcatggatagaagaagagttccctaaagttaacagaagcgagacgccatggttgattgttctaatgcattcgccgtggtataacagctacaactaccactacatggaaggagaaaccatgagagtgatgtatgagcctttgtttgtaaagtacaaagtggacatagtatttgccggccatgtccatgcttatgagcgctcggtatgccctccatatctcggttttttcttcctcactcgaatctcgccctctaaactctacaagggataaatgtttgatgtttgaattgcttagtttccaagtttgatttgtttataaacacaggaacgcgtgtctaacgtcgcctataatatcatcaatggcgagtgcatgcctgtgaaagatcaatctgcacctgtgtacataaccattggagatggaggaaatattgaaggcttagctaacaagtaagattcatttacatgttatgtactataacaccttgtttgttcaattttcatttcattcctctgtttggttacatatcagaacgaatcctaagcataataaaacctattactattatcatttcgatttttggtagatagacacttgacattgtcaaatctttaaaatccgtttccctttttgttttcgcagcatgtcagaaccgcagccagcgtactcggcctatcgtgaggctagtttcggtcatgccattctcgacatcaagaaccgaacacatgcttactacagctggcaccggaatgatgatggttatgcagtagaagctgattcattgtggtttttcaacagacaatggtatccaaaagatgagtctcactagtaattaagaatggagtggttttgaaattgaaccaattattgttttgttatcccaaataaacacacaaaaaagaaagagagcacattattcttatgcctctattttaaaaggctctactctagtgtttagttactagttactactagtgtaggtttttgtgagctctacactacattgatgtacaagtgcatttgttttgtaactcttgaagaccattttataatttatctctggtttttgtctttttaataaatttgtgctaaaatagtagtgtaatgcaatattttaatttttttttttaaaattttagtgcatatttggcatcataactaaaaaactgttttttttgtttttaaaatcaga

SEQ ID NO: 381416 - DNA, 845 bp, Cannabis indica
ttattattaattttattatgtaatgaattttaattaatttgtctattaatattttcgttttttttttaaaaaaaaaaaacaagttatcttctcaaactcaattatttgaacaaattaatgttactctctttcaagaaatagtaatatttattaataatttttcttagtctaaatatcaatcctaaagaaggtaattaacatgttattatctgaccccccctgtcttttaaaagtagagaaatagtgagaaattaatagacatgaagatttgatcttgattaagattttttttttgggggggaaaatatatatactagctagtatttgttttttttttaaaaaaaaaccatttggccactaattggaagaatattgaggtgtctacattgcagaaagaaccgacctacaattcagtgttggaccaacacaaaaatcttttttaaccttaattgtgaaaatactatattatattaattaatcagaatttaatttgattaaaatcatactcgataataaatcttctccactctagctttgtatctagaggagggcacatgtccaagaataattttatactgataaattattgttggtctgtggtttttcgtattgatagtgtttaggggtggacaatatctaatttgatccaattgaatcgaatcgatctagttcaattatactataaaaaattggatatctaattacaattgaattggatgttaaaagtttgattataattagattagattggttattggatgtgaatctcaaaatccaattaaaaattgatccaattcaattatatttatatacattaaaaaattatactgtaacatccccgcttc

SEQ ID NO: 381417 - DNA, 5121 bp, Cannabis indica
acgacacagaattagatatatctgcaggtgctctataatctgttagttgggtgaatggcaacttaaatcatgtcacatgcactcgtgcagaaggataaatctagaaacaaatgggtaaaaaaaaaaaaaaagcaaaactgtgaatagcaaataaagttcatcaagatgtcattacgaaaaattgacaattatttcataggggagaacatgccatatatgctgaggtcctgctctgatgcgtttagatgaagttattgctcttaagtgaggacgagcagaggcagaatctgtgattgttgttactggtgaaggctgcagcagttgatcaagatacggcatatcagcagttccgaaatatttccaaggttggcctttcattttggcatcgatgtcacccacaagtaaagctgctgcacctacttctataaaattccgggccctcatgtcttgagaatttatagcacggtcactggttgtatcagggaacacattattactcactttaaaggaaaaactttaaggaaacaaaataaaataaaacttaaacatgagataaaaactgcactaaaatggagagaaattgtcgcctgaagagtgaaaaaaggctgaccaatttgatcattacctatcagttagcaaaaatgatgactgacattccccgtgccaccgccatttgagaacatcatttgcaatgtattcagaatcatctgttccatcaatcttttcaatgtttgatgagttcgaaagagataaactcgtgatatctttattctctgaaggttcagcactatgggcagggcttaattgggagttaaaagatttacttaataaagatgacagagttggaagtgcctgcctcgaagctgaaggggctccagcaaaagcagctggttggaatagccgctttggaatatgttgggacactaaggaacgaacataatttaatgactttacaagagctccagaagtaaaactggaaacaggcaaaggagatgtatttgtagatgctgtcgatgaacctgattgttgaattgaagctcgtggaggcaatcttcggattggactagtgtcacactcagaaattatgttcacacaaaaccgatctacctggagtaatgtctcctcactgggtttgtatctgcttaaggataatgtgaataaaataaatattcaaaataagcttaaaattgaaactaaaagcttcttatactaatcttgtgacgaaacatggacaaacagaccttccttatttaatgatacaaatcagaatttacatgtggcattagaatccacaataaattatcagttaattttaattgcttcagctaaagttctttttccacaccagtaggagctctaactttttgatagaagaatgattttttatccatacaagcacataaacagaatcgcaccaagagcaagtgaagacatgcacgcaaaccacaaacgtaatctcactaatacttgattaatacacacaaccacaattgtatacacatgcatgcaaacaaactccatgtggttgaaaattgagcaaatataaacaacttaccgtagtaggtagcgtttcaaaagtgccacacatcttgaaacaactgcagggctgatgcaaataaaaagcagcattagggaaaagtttgcattgttatgatcatttcccaatgtataatcacttatcctagagctaaaccaaaacagaaagtaattagcaacggtacacttgtgccgctctacatgtaaaaatgtatgatagatctgctaaagaaagaccatatcataatgcctaaaactacatatgcaatagtttagccataaaatttaaagcaattagttgcaaaagagtaaaattgaggacaaagtgaggaactaaaataagctactgaaagctaaaagctaaaaaaatttgtgattgtacttccaaaatgtacatgatatatttaaaaacaattagtaatagttacacctttactggttctcaaaaagaaatgtttgtgatagtaaggactcctgttctcaaaaacaattagcaggttatcccttgttctcatgttaccacggttttcctcagccataagtgaggactctcaataaacttgggaggggtcagtcctagcaatttgactactgtcattttttagaggaaaaaacaaacagttacctatgaattttccactttcatttgttactagtttttttagtctagcatagtggtattacaatttacaaattaacttagaggtgttgggtccaaacccatgccctctcccgttatcccacccctttcatttgttactagttagatctactttctcttcccttctgcatgttcacaatgatttatcaccccttgattaataattattttactaatggatgatacttaaacagttaaaccaccattgttgaaaagcaattaactggtctgctgtgggcactgtcttgctaatttgttcagcttactttctcattatatttgcttcgaagagtacctcatataggattctatttttggctaattggtaaacatcataggtactcactcctcactctttaaggttacccaacttctggaggtttagatttagttatgattatgatatcacaaataaattatattgcttgcctgagaaatgtacttatgcattaaattcagctatagttatattattaaagtcaatttcaaatatgaaacctcgttacataaactatactaactctctacactcttaagttttatctttgttaattttcctgttcaattttctaaattgcaatactttacacgatctttcaggcaagaccaaatatctaggcctgcttcagatgggacaacaaggctcatctcctcagtggcattttaaaggatgtcaaaatgccactcaagacatccagcaatcttttgtgtttaattgcaaacagttaccaattctcaagtttccataaactacaaaaaaattataaaggacctaatccttttgaactggttatctaataattgatattttatcagccaacagttctctcaaaccattctatcagcaaactaatgctctcagcatgtgaattacttcacagattcttaaattgactgcataccaagaccatttgaccaaaaaataaaaactgtttaataacagaaaatgaaaggtgaagccacttggaagtttataatgtaaaatagcatgcaaacagatcatctcaattcatgtcactaacatagaactgcccaaatgttaaagttacctgcgctccctctctgcgatggtatgttctaaaatcacattgtaagctaagtctattgtagaaggtgaagctaaatagtcctgtcatgtataagaggggtagcgacattagatattaaaactcatgtaaattgattagcaagaatacaacatgaatcttattacaaacaaaaaaaaaaaccaaccaacctgcgcaaaaataaaactcaaccatatgggctttgatccatggaataaagagattcatcaagatataatcataaaacaataaaatatggacaataagaagtgagcatcgttttacagcaacactaagccatcataatgaagacatttttagtacaatacaaaaattttaagttcaaaagtttatagtgttgctagtcctctgttagttcatgaaaaatcaaattcaaggatgctgcagctttagccaacatctcaactacactacttatgagaaatctaaacagccactacaggaagaactaagtcaaaagagaaataaatttgcgaaaaatataacaagtcctggttttcaatcaagaagaaattgtttccaaattataaattcacctcaaagttcaaaggactaaaacaaacaaaaaggtataaattctcaaaaacaatgctaattaatatagggaatgagctcatcaattatgaacaaattgcagagtgctgaccctaagtaatctcttcaataaaaaaaattaaaaaaatactcacaaaatatgtaacagaatccccatccccaccgcacacacatacatttgtatcttttgcttgagttgcaataacagcaacaagaaaagtaaatctgcccaattaatcaaattttcgacaattggaaatacatataccgaattaaaacgcaattacctaaaaggccataacaaaagatctaaaatgttatacccaaaaaaaaaaaaaaaaaaatcacgaacccgtagtgttctggaagcctctgtgagaagaacagtgaaggaagtggtgccatggtgagatgaggaagccgaggaagaagacgaggaaagacaatcggctacggctcgacgcagtggctccggaggctttttatgggaggaagatcttagcctggagacaccgccgagtccacccaactggaacctcgaactgccaccaacagcaccaccattgccggggctccatgaaggactgaagctcgaagacatagatggtttccgcccccaatccgaaattctggaaaagaaaaagaattgtgtaattttgaaaaaacggtaaactcagtctctccagtgtcgccgcactctacatttgattaatcaaatcagaaaaaaattgaaatccaaaaacaaaatcacaaaactttgtttccgtttcctcgattgaaaaaaagaagattaagaataataataataataataataattaaaattgagaattgagatgcagaaggaagaaagatttgattttgatttgatataattaatggggttaaaatttgagtgtgcgttttgttttgtgttgtgttgtgtgtatgtaagtatattatgtgtattagctgtacgtattggcgtagttttatgaggtttattagctgtcatgcgctagaattttgtcactttaagtgggactctatggagatgattatatattatacgattgggttgggctaatacattctctgtctcttctctctctcgccgcctagcccaattagggggacctgacttttaattgggcttcttcgtaaaaagtgaaaattaaaggattatttacacacatattcaaatgagaaaattacactctataccctttttatattgtcctcttttatttttacttttttttttaaagtctatcatttttacctctttttttgaacattgta

SEQ ID NO: 381418 - DNA, 4020 bp, Cannabis indica
tttttgaaaaagagatagaaggtcacctcctctcatacttattgagattgagaaacctcacttatggcagaggaaaaccgtagtaacaaaggtctattcaaattttccaactctcggacacaaatctaagaagcataggtcttcaaaatacctcctagatttcttcagtttgccaccctaaagctataacagtaggagaaacatacaaatactttaaaatttgactaaaagcattttccttcaaatacatcttgaaggggctcccaaggaccatgtaaaagaatcccaaaaaaattgaaaagtcaaagatgtcgaatttatccaccatatacatataaataaatcttgattactctttatcacaaacgaataagacaactcatctcatcccactatatagcaaattttcatgagcaagcacattcatagagtgaacgaaaaatattcacaacatcaaagaacaggcaaaatacacaaaatgggtaaaaagcaggtagtaatagaacatatgaactacctggtcacaactcacaaattaacatgagtaatttcataagtcaaaagaaatacctccattgcaatatgacctcaatatctagttcacgatctagatcctcaaggtctttattgtcatcaacagttactcgactgggctcagatttaagaagggaggcataaagagagatgtatcttttccgcaatcttgtatacttcaaaacttgttcccatggcaattttccactgcaatgaagataaattgccaaggaaaatatgaaattaaaaattactcgataaacctctccacaaataagagctacaatatgttatcatttattattaaatctatttcaaatcaatatttacaaagtctgagtagttttttaaaaaaaaaaaaattgtcaaattttactcaagttcatataatgattaccctcagaaaaattatattaaaaaactttattttgtaaggaaattattatcatgcaatgaagcaactcttgaatgggagaattaaatccgatcaaaatatacaaaatgagataccttcccttcttcacttggtcagatacagctctataagcatacttccaccaagaacgaggatcagatttgacggaaacatgtggacgaaaatgtgcatattttaagcgttgattaaaagcagaaaagttatcagctagttttaacatatccttgtatccatcctgcaaccacaagataccaaattttttcaaggccaatcaaaacatgcctcctagtatccaatcacaatgtattataaaattaatttattcttttttaggaaattaaggaaataaacctttgataaacagagaatgacatcatccaaattcactgttgcattctgcaaaggttgatcgctcttagcttgttcattttcccttagctttgtatactttgcatttcctgaaattggttccagaatataagtgtgcttcttgacaattctatcagcaggtttgccttctttagtgccatatctaaaaacctgaagcaaataaagaatatgatcagagtttcgtagattgaatatgtcctcaacatatgtgactgcgagtataaactaaatattggttctacctggacccactcagaaggaagcaaatcctcccatggcttgtcaatatgccacgggacaatatcagaatccagataaagtgcaagtcggtcaagctcaacagactgtaaaaataataaaacaaattaatttaaaaaaaaaaaaagaaaagaaaagaaaaattttatcataagcaagactgtaaactggataaaaaaattagtgataatttactcatgtaacaaattgctaattgttatcagaactttggtgtattatgggagggatttcaaaaacatgcatgaatgcaacatacttcaaatttaaaatatgagaaacaaatcagcatctcagtcaagcatgctatcaaattttcttcccctttaaacgagaaacataaatcttttataacaagagaatgaaaaatacaattgaagacttttatttggtagttttgtcaagaacttgcaagggtgtgttgcctcacctcactaactcgcaagtgtgcatttcaaattacatggatgagactttcttagagagactaaaacttaaacttgattgcttttatattaattgacattatatgagaaacaaaattaggaaccttttgtatacggtctagtgcaccaccagtaacaaaagtctcattcccattgtcatcaactgtcacagctaagagtttctccaatgtcacacctgctgcaaatgggtgtccaggattgctagagaatagaaaagttagattcaggcagaaaataagaaggcagagattccaatgtaaaaattaacttgcttttacacacctttcactgtcttcgtatctgatatgaatatttgaaattgagagtttcaaattcccaactatagtgctgattagggaacccaaccatgattgattcttcaaataaaaatatatacaaatacagttataatcataattgacaatcaaatatatatataagcgtatgtatggttcaaaaagatcaaaaaggtaaatccttgaaaagagtaacatcacagtatttgaacaaaaattgataacactagatttactagcacataagtacataagaaccaaatattacacttcatatgaacgcacagacacatatgaatatagcatcacataatatttccttacccataaaaaaactactattgcctagcaattatttttttcactcgtttctttgtaaagagtcaagtaaagatatcagatgtatggatgctgagctatgccattgtctgtatcagcactcagtaagaacatttgctatgaaccatctagtcaaagatacactctattatagtagaagttacactgataaaagaattgtgtaatcttaccacttcagactttaactgctgagccttctctaccagcttgatctccatttcctatttccaagcataacaaatatttaaagaatcattcaaagttatatcagtaggcacatcaattattgtcttacccgcactcggcttttcttggcttcttgaatggcatcctcagtggacccttcaacttgcgttgctggttcaactaacaaaaaaatacgatccagatgaactacaactgggtcttgaccaagcctactccaaggtaccttaatttgggaatatcataaacagtatcattagttaaatgtaaatagtacccagtatcacaaaaaatgtcattcaaacagctaacagcaagaaaattatatcaacttttttaaaacttaatagtacttttataaatcactgcaaagaaactaattttgtctttattttttatttattttcttttttatttagaaatgaaacaaatatatgcaatacgaaggaaaaaaaaaacaaaaagggggaggaaaacaaaactctcgcctcttgaatcctagaaaaactaggagatccccgcctaacaataaaatctcttataaaaatcagagaaagaagaaaggctggatatttttattatttatatgaaacaaaaacctttattgaaagggagggaaagaaaagctacatacaagaggataaggtatcatcatacataaacgcataattgtagctacaaattgaagttctcatagcatgaagtaagcttccatgaactaagataagtagcccgaacggccacaccagtgtcctaacccaaattattgtctgaaactcccaaatttacacttaatgatgttgtgacagtgctacaaagaatatggttcattcaagaatatccacaagcattttcaaaacatgagacttatttgaaaaaaaatatatatatatatatatagtattttgcgtaattatttgaacttaaaaagaaaaagaaagaaaggaactgggtgtggcttctcgtaggggaaaagttcaaattatagtatttctttggccttcagtggcaaagtaattcatggatttccttctttgcttgatcattcttgaaaggt

SEQ ID NO: 381419 - DNA, 1957 bp, Cannabis indica
ttttttttttttttgaattaatgccgacccatttgaatagaatattgacaatggctttgctaaattgacactaaaagaagagatgacattgtaaaagatgtagacatatattatatatgtattaacagattaattaggtacgccagagcttgatgatgatgtttttctgaatcttgttatgtataaataaatgaatataataattttgagatgattgcagtgtcctataaaatggaagagaaggaaaaacaaatctgctttatattttagaaaagcagaaaccgtattttattaaaattaataaaaaaaaaataaagaagattcttctaataagatatacataagaattcgtcttgatccacttttaaaaagacatgtagataactcgtacgtgtagtttcatcatgtacacgtgattataactaaacattatgttcgatcggaaaatgatttattgtataataaccataatagattcaacagtacctgaccaaacaataataattattagtcgattaattaatttagatatatttataatctttataagagcttaaatcattgtgaattatatgcattgtacaaaactggatataaatatagttttggctaccatattaaaactcaacagagagtaatatatattaagaaaatagtcatgaattgacttcaatatatatatatattatcacaagacgtacatatccttacagacagaaattatacataattgcatggaaaaataaaattacatgaaagtaaaagtaattatatactaaaagtttattaagtgcaaaaatgagagcgactatagtccactttccagatagcttataccaaacttttttgtttctatatttcaatataatgtatgaaagttctccacataattaaaaagttgaccaaaactaagaaaaatagataacttttctgtaccctagttctacaaatgaactcatatataatatatatattaatatatatttggtgcatgagattagctagctaggcttcgttgaagattatatatatatatttggaataataataataatacttagtgatgctgaggatctgggccacctggagatcttctgtcaggcaccaaaatggctgactttctataatgctcaagtttggtatgatcaaaacccaactcatgcagaagatgttggctgtttattaggttcctcatctgaagaagacgagcctcggtataagacaccattgcgaaaggagaaattaggcacacaatcaacaccatcataattaatgttttattcattgttatcagtactctataacagaatctaataacaatttttatgatgatgatgatgatgtgaataaaaatataaggaataataataagaagctttgtattatgagaatgtagtatcttgtatgtgtcgatggatatgactatttatagtagttggtatctatgttatagttagtggagggaatatggatatgtattatagatctatttgaccagcaaagttttccatctatgttttgtctttttcatattattaatcgatttatagtgtcttggtttaataaaattcattcccatttcgtgatattagatcgaaattgctctatataccaagcctagtcatttctgcaattttttattccacgcttatgaaaattaatggagctttaaattaaaaatatttatgagagagctaggaaaagaacaaaatattgtatgcgcagtccaaaattaatttgtcttcattttcatttctgtctttttattagtactgatataaaatgttggtgctctttataggcagaaatgcttattgccacatgggtttgtaaattgtaatatgggtataatatgaatacttaaatataaagtattacatctttatatatatatatatatgtttatatatatactagtaaaaaagctacgtgcgaggcacgtatactaaatttttat

SEQ ID NO: 381420 - DNA, 2082 bp, Cannabis indica
aaacccttagtttgaatcttattttttgcattgtatattattttagattttttttttttaatatttatagtagtcctaaataaatacaatatacaaaattatgaaataattataataaaaagattaaaaaaactctcctaaataccaaaataaattagagttgttccagatcagttctttttaagaagtatactatgcaatttttcttacactacttatattttgttgatgaaaaaaatatatatttatattttgaatagtagattataattttttttatggtttaattcactccacttatattgttattaggtttttttaatgatttttccaaattaaatatttaaattatattattattatttaaattaaattatataatataatgtatgataacaaaagtagtacatttaaaatataaagaactaaaattttaatacagataattttcaaaaaaaaaaattaatacagataaatatgatttaattagttacaattaattaaatgatatttaggattttcatgaaaatgggtcaacaaatatttacctagaattaagtcaaaagtgggtgttcataaaatagactttcgtggtattaattgggcgtttttgaggttatttaattaagctattagaattaccaaaaaaaaaaagaattaaagctattagaattgctctcaatgctttaccaactttttcagatttggtaaaaaaaatttcaaagtgtttcaaattatttccaattgattttgaacaatttataaatgttgaaatcaaatctctaacagttatattatcaatagctatcattcattttcatattcaaacacaattagtatataatattttttactaataaagtgataaatgagatgaaagagttatatattcatgtgatcaattaaaggatttgcaacttctaattttaatgattatctacacattttgtaattttataatttaacaaaattaataatttatcacacttaataaattaatctaaatattttattagataaaataatataatatgagtacattttaaaataactaagattgatattaacaaatattttagtatttagttaaaaaaaaaaaaaaacatttggtataagtttaccaaaaatatccaaatatagtgatgataaaatttaattaggaaacaaattaaagtaataatatctacacaccaccttaattaagtttgactaagtatattctagttaggccaccattgatatctacacattcatggtatatggtcgattcacaggactttcaagactttatgtgtattttgtcactttattaactaataatatataagtggttcttaactcacaaaaataaaatcttacttttaatcaaaataaaaattttaattaaaattaaaaaagttataactaattataaattattattcttatgttatcattaaaaagtttgtggctaaatgtattagtcacaaaaattacaataaattgtgactaaatttatttttaatcacaatacttgttgtgattaaaactaaattagtaacaacttatatatataaatatattatgtgttagtcacaagtaattttttgttgtgactaaaaatcacattaatttagtcataaaatttttatggtgtgactaaaaagttatcactaatagcatgtttactgtgcagtattcggaattggaataaactaatagaaaaatataatagattatgaagaataattataatcaatatttgtaatatgttgttaactaattcttttcagaaatggaatgatagtaattaatcttgttcactttatttggaaacgtaatcggaatatttaaattagctaaattgttcttttaaattaaactataatatatgatagttattttgtaagacattttaaatgactaaattgtcgttatattttttattttatgtaataaaattaaaataaataaaaagtagcgtaaatactatttttggaccttatggtttacaaaagttactaaatggactctttattttgttaaatgataaaatggaccttgtatttttcaaaatggtaataggaccctgagcttaatctt

SEQ ID NO: 381421 - DNA, 2912 bp, Cannabis indica
caatctaattcaattataattgggtctaatttttcattataaaatcactttaattcaattgtatttgattgaatgttaaaactgagaatggaaaaaataggagagaataactataagagcaaaaatttgcgacattcgatgatgagtattgatgtgtagtggtacgtggcggagaagtatgataataataatgaattaatgttaatagtaagaataagaattgtcaatttggaacaacaacgcaaggctgttattgttaacaggaacagcaactcaccttagttaatggcagttacgattcagttacaataaaaagagttcaaaattaattaattggataggtacgtaggaacctttgactggtctcatcctcacttacatttcacccgcgtatatgtcaccttcaagtactcttcaactcctcaattgccggctcttccggctctctttcttcatcattttactttattgtttccttttgttttctccataattattaatttatcatcttccaattattaaattattcttattatttctagttgctatcttcaatacttatattaatacttattttatgtttactgaatattacgacgttgactgatcagttttttactgtgtgactaagatgttaacatcagtacataattaatatgcaatataatatgaattaattaggattttaataaagcccaataaattcatggtttaatttttgtttatccttcgtaattatatatttatatggaagaaaacacaaaacattatgagatggtatcttataattattttcatcgattttatttattttattagaattttactaaagttgattattttatagatttatatgagaagtattgacattttacatagttcttttttgtcattgtaaaaatgccacatagattaaaagctatatgcatagtacacttctatattataaataaattatttttagttgctccataatttcttaaaaattgtatgggtaattgataaatcaatgttacctaattagttatatttttttttttgaatttatcctcaaatcaattatataaatgtttaatattatatttatatttataatttctgtaagggtgtgttttgtattttcagaaaatatgttccgtaaaattgtatatcattcaactattattatatatatattatattatataaaatataacggttgagggcagacccacatagaggcgaggtgggcagtcggacctaaaaaaatcggtaaaaaaataatatgcattttagttagttacaacatatatttataaataaaaagtgatatatatagtgatatatatatatatatatgaacataaaaaataagctttggtgtaatggtaaaatcattttattctaatctcaataaaagcatatttatattttactttttgaacctctaccaataatacttatatttaatgtcttaattattgaacacagtatttttatagttactttttttaaaaaaaaaaattatactatatttaatactaaaatataaatttaaatcaatttttaacatgttaaatattgtaggaaaaaaaaaagacgtcccctcacttataaaaaaaaagtgtcgccccccctcaacttaaatcctgagtgcgccactattggttgttaacttaatttcgcccaattaaaaatttatcatcaaatcaaagtacatcaatgtctaatatatttacatttataatttttaaaagtggattaatattattgtttaataatatatctatatgatttagtgatttattaattacatactataaagaaaagtataaaagaatatgaggtggcattctacaattattttcatcccttttatttattttattagaattttggtgaatttggttcattttataaatttttatgagaaatataatattttagttagttttttttttgttctatgtaaaaatctcacattgattaaaagctatatgcatgcatggtatacttttatactataaataaagtatttttacttgctccttagtttgtcaaaaattacatgagtgattgataaattcatattaaatgttaatcctactcccagatgtctgctacttggcactcacagaaaggtgtcacctcggatagtttacaattagcatgtatcttctacttattagcatcacgaaagaagttatgttcccggagttagtcgaaggttctccatgtcagcaaggacaggaaggattccaggactcccactattcatccgctactaagaaggaccacagtcctttgaagctaggagcattctaggagggtagcagattagtgtaatccaggaaggatgtgacctcatggtctagaacctatttggttgtattccatcgggagctcaaggcgacggttacctatcttctgataccaaatcagaagttgtcccctacgtcagaccatggtagtgcacgtacatggctctgaagctccttttttgtccaacgacttttctagcaacgactttttaaggtgaaacctttgagccacacgtgtcctcgttcccacaaaatgccatacaacagccatacaccacatgatagagcgtcatgttgtagcatcagcccttgtggcgtgttgagtacaaaatcctagtaggataaagggtatgcccttatcaacatgtgtgcctatatataccctcatttttgatgtacaaagcgtaaacaatttgatacttactgaacctctactaaaatacctaatttctttctacttcttcaagtgaaggaatatagtgttgggttttgtgccctaaataaaacccatttcaatataatcagatttactaataaagatcataaatcacattttatgttgcatggttcacatgatttatttcatgagtatatttaatgtataaattctat

SEQ ID NO: 381422 - DNA, 1877 bp, Cannabis indica
tgatctaatgaacacccctaatagcaatactaggtatatttgtaagagtaaataaaatcatgcttagtcccacattgtttataatgttttttttttactttttcacaagttatatataactattactctaaaactaaataatttaatacaatttcatgaagattgtaatgtagagaaaaagaaaaacaaaaaaatattatatattataaaataaatactagctcaattaattaatcttaagaaaagaaaagaaaaaaatcttcagatttgagaagcaaaaaaccattcttagtaatgtatcctgtgaaacccaattctctccgcttaattaaaattgtaccccaaataaaagaaactactacaattttttctaggttcgccgccaaatggctcggtcgtgattaatagcatttttcatgctcaaatgataagcttctcaacatcaaagtcaaatagatttctagaactcgcattttatttatttatattttaaaagcaagtgtaattagttcaagttaaacaatttttttcattataacacgttataaaagctaaaaaagatatgaaaaataagttagcatcaaataaggggacataactgttatgcaccaccatcaccattcatcatgtagttcaacataatttccccttgtataaaatgccactgatacctcttcaatctatatattcacatattggtgctaaaaaaaaagtaaaagaaataagtgtgacaatctggtaatgaaaattcttctcatctctttctttctttagcattatttgataagcctctttctttgttcttctacctttcatggctttttttaagtcataactataaatatacatacacaaacacatatcttcacttccctcaaaaaaaaaaaaacaacacatatcttcacggatttataataggaaaagagagagctaattaggtgtgctgattataagtccaaatgccttgttcacacttcacattttgtttatacaaactctacaagttgaacatcttttgttacatatattgtcctgcttcacaaataaccctatcattactgatcgaattagtctgctttgttttggtctacaacgttagtttaggaaaaccattagttacctaaattataccatcactaagaacattactaaaggacccatgtgttgttaaacaccgcacactaataagagtgggttccacaacattaaattgacatatgaacctcatacttgtattagtatgatacccactaagacacttattgggttagacaccacactattacaaatgtaaagttcaccagtatgttagtgaaagtacacaaaatgaccaaacttttagacaatatgacataatttccaatatgacatgattccctcaaaaaaaaaaaaactcattaaaaggacaggtttgtactttgtatgtgtaaaaatttaatgcaatttttttatgcacatatcaatattgtcccccctatcccctaaaaaaataataacacaaagggtacataaaaacacatcattatttttcgagttcaatatgctctatctagcttggtttacaatgttttcatgtggctctcacttggtttgagaaaacccaaactttcaataggagcattaacaattgttaagagatgcatctgttcgacaccacatactactaatgcaagcaatgccaaaatatctaaacatatatgtattagacaccacgaactaattagtaaatactaatgttaaaaagcgtattagataccacatgaatacaattgtcaaacttaatgacgtaaaaccccacctacaataaagcacagtactcaacactaaggtggtgtttggttagaggtaataaaatagaatgaaaaggaaacaatttt

SEQ ID NO: 381423 - DNA, 1189 bp, Cannabis indica
tttttttttttttgattattctcatgaccttttccattaacgatcattaatcaatctttttgacctaacttctttgacaatgctattttgctaactgtgatttgattttatgagactttataaatagaaacaagaaatgtaaatataagagtttactaaaggatacatgctattaaagttttttgccaaacattttgcttttgaacggagcaaattacttgtttagtggctacatgaatgaaataataaagtggtttaattttttaaatttgagatcacaaaaacataattaaatttaacatctccgaagaggaatttttaaaaataaaatatcttcaagacctaaagtaacaaaaccaaacaaggaaagtggaacatgaaaaaaaaattagtttgtcttggtatgtgttaatccaaaaattttccttagtaacataaacattaatgtttgacacgtaataagaaagatgatgtcacagagttgagcagacccaagtcatatagcagttaaccttagagtagggagccctagccctgtcccaggttgattttgggagctccgggatagaagatcgcacttcaataacttgaatataaaacttactatcttttagtattctgtaccagaggtgtaaatggattccgactctcagcagcttggtcctgggaggtagggttatcaacctggacaagttgggcctcaaggacagattcaactgacactacaagaaaaaacacttttgtcggtaagttttgccgtcaacaaaagtaaacgtatctcgccggcataattttgtcggcaacattttgcgttggtaaatgataccggtaatcattcgtcggcataataattttttccccgcgagttaagatgatgcgatggcaaaaatatttatattggaaaatttagttgccgtcataagtttatcgtcaacaatttgttattgacttaggggtccttggtgatgttttgccagcaagatatggcgcgggcaaaactttggcactaaattggcgtctaatctgcaagaagaatatgacaaatgatacacgttatttttaagatgaacctgtatcgtaatgtctttacactacaagaattatggtcaataccaacgccactattaccaacgcctaaaagtcctcattaaaaattaaggtatcaataacgacatttgaatgtcgttgg

SEQ ID NO: 381424 - DNA, 2885 bp, Cannabis indica
tatatagatttaaatagatagatagagacataaattcacattctttgtctatgcttttcatgctggtttgcttcatcaataaaacatgaatattcatgtactagtgattttacataaaaaccatgatattaattaaattgaaatcgttctttttttctctttattttttggtagtacatatagtgtgtgacattataacgaacattatcactttctcttacgaagttttctttttttcgttgactaaattactcttgattggtaaaaataaacttaatgatctggaattattttctttttcttcccccaaatttacgacaaaaccatatatattagagattaattaaagacttgaccctagtcgtcttccattaacctcatctagagtcaatatcagtcatgataacttggacttaattatattgacattgtttgaaacaactaacaagttggcttagttatacatattttggcttgtaaaaaaaagggtataaaagagaaaaactccccaacaaatcaaaccacaataataacagtgaaacttttaaaacactcaaagtccaaagtatatatatcaaccataaaagaagcaagaatataataacatcaccctccttttttaaagccccatatatgtatatatagatttgtaactaattcctatctctgattatactgttaaatagtcttgataagcttcagaaaaaaaaaaacatatactaaaaatacaatcatataaatatatataaatagatataaaagacagagtgtatacaactaatagatatatatcatattatcaaatgatttctccaacaacacattccgccggtgatggtggttccccgcattggaagaacactccaattccgtacttgtttggtgggcttgctctgatgttaggtctcatcacggtggccttgataatcctagcttgttcctaccgtaaatcatcatcatcatcttcatctccaaccgcggttggcgcggccggtggcggtgatgatgatgatgatctgaaaaggagggaaattgatgaggtggttgtggattgtgatgagcctaagtttgttgttatcatggccggagatcataaccctacctacttggcaaaccccctcaatgtctcctccactcccccaatcttttgcaattgagcaaaaatgattttgttttttcctttttaatttaggaattaataacttattaatgatgtttttttttatattatttctaaaaaatagagtttatattaggagagaaatgtaattaatattagatgatatatgttattaatgatatgtgatcctttaccttttgtttggtaaaagggattagaagaatgataaatttaatagtatgaatttgggatgattaatactaattaggttcatttgtttgatagagaaataggattacaaaaaaagagaaaaataagtccaaggaagagattttaattttgtatgtaaattttttattttactttttaaattaaacaataaaaattaaagtcatattaacattagaaatatggtaaatatgtgtaataataattatttatcatcattttctttttaaattagaccatatttgcaatctttagaagaagaaaaaaaatcatcttattcgcaatctatatatcgtcaactcgatcattcaatcaagctcagccttattacattctgcatattgatcttgaaggggacaaaattcaaattatgtgcctgagtttttttgcttaatataattcaacatagtttattaattaatgcaaaaacatacaatgtcgaatactgttgagaatcatggggttccatctcaaaactaattggccatgagtggagtagcccatgttcttatatatggctcaattctctaccatttattctatgtgggacaatgtccacaacatacgtacttttccttaaaattaacgaagaagaagaaaaaaacttatgtattaagaattcgtgttttttctcttcttcttgatattataatataactttcaaagcaagttaagtaatagaagcttgtcagaaacgctctccgtacaaatagggttttaaaaaccctcgacctccgatgcctttacttgggtatttgagcctttttccagccgtctgtgattgccattgtcggcgtcgcctactccctagggtctaatctctcctcttcagtaaatagcgatcgtggttttgattaacccctgctctagttgtgtttgttcaaccttggagactatgtttttcgttgtctcctctgacctcaccggaggctccgtgcctctcgacggccgactctcgtgtccctttatctttagtgcgacatcgtttctcgccgaaggttcccttcaagtgtgcttccatttttgctgggttttgtccttgtgtcattttctgggcattttgggactttcccaatttgttgtgagacgagagttggctcctagtagtttcctaaagttctggtcaaatcgcttcatacaagcaattctgatcatcagccggtctgtttatattttggaggcctggtagatgggagtatgaggacttttcggtttagtgcggcttggactagagatttatctagccgtttgattgttgatgaagcttggacctctacttcccatgcctggccccctgctaaactctttcgaagaactggtgccactcgagtggcccttttgagatggaataggtctatttttggcttggttgatagatagataaaatagcctttctttgtttctaaactcttccgagtagggtctcgggtactggcatgaggtagcattgtactaagaaaagaagctcaacaaagcactgaggcgtaaaagccttcctggaaacaagatctcgtgtttcttggcttaaagacgtgac

SEQ ID NO: 381425 - DNA, 2350 bp, Cannabis indica
ggttcctcaatctgttccatctcctcccaaaggacgtccccatctaagctctcaagtgccccgccattacccttggggctgtcttttctcttcctaagatatactttcaacttctttttactaacaacttcttcctcaattatcgtttgttccgattctcttattactgagtttgacttaaggctgccacgagatttgcattcctcccagtaattgataattgcactattaaattcctctcttctcttaggctgtactggcttaagaatgccttcaaacactttgtttgtagcattatttttaaaacaaagcccctgttccagtatcaaagtgtaagggcccaagtgtttataaattaaatggcccaatgtccttctcacctcctccacatccacggcctgagtgctccttttgaccggcccatttaaacagtggcccacgaggcaatttggccctataaaagtcagctcattatttttcccattctccccactgtatgtttggcccaatattgaagagggtccatctctgcttttagcccacttatcttggcccattacccatcctttatcatacagctgccacatattttttaaagtaataaaagtacttggcattaaatgaccttgcacacgtggctccttcaggtctctccacaatctattgaatatcttgtgaatagtaaccgaccccattgaatatcgtatttttacgttggaattcccaatcgccgccgaaccaagaattgtgggaagaggatcgttctcaattgtcgcacgctgactcttgccgcaggatatcttgcttggatatacctcgattgtcgagtcatcagaaaaggctgcagtcgccggcactgtttccaccgaccgagagagagcagtcgatgtgatttcgtcgcgtctcctctgttcgtgcctgatcccattttcttccttatgtcgcaccagaccatcccgttcgcctctgctcccattcaccctttcccttccgaccgcctcggctacccccctgccttctacaccataaccctcatcagccccagtgtctacctcatcgccagccaccttgttgtggtcgaagtcttggtaccaacaggtcctaaagtacccatggaacctataactcaagtcattcagcttgaacaacctcagttcaaccttgctgtcttcgtattccatgatcaatgactccggtatgaatccgttttcgtctcccaccaactgaagtctcacgtgagaaagtaaggaagcttcagcagactccttgtccacatccagaagtccaccacaacactcacctattttcctgaaggtcttcatgttccataggttcaaaggcagtccgtatataccaatccaagagtctctacattcgactttaatgctgtccttttgagcttcccagctccattgagagagagagacaaccgtctgtgcacctggaactctcaatcgttgaataaggattaaagcatctctttccttctcatctctgcaccatacaatgcatctgtcatcgaatagctggctgaccaccaatttccttcctaactccctggataaattataaaagatgacactccatgatacgtggctgttatctcgggtgagaatgatggccaacttccaatttctcttttgtgcttttgatctcatgtattcatagagctttggttgctggaatctcttttctgggtatggattctttggtttaaagctaggattgatggctggatataggtccagccattcaatatcactctttcttcggcctggcagtttcgaagtagcattcctcaataagtcggattgtttgaccatcgacttccttgtttccttgacaacattaacccgcgatcgttggttcagaggtcctttgctttgcatctctcctatcttctggacagatttcccatggacacttgcttgttctcttttcatagttctatttaggcaatgtatgagttcagaccatccttcctcgttctcttcttctggtatgataactgatttcagtttgttgttccttagtgctgaaagtttcaaaaagcttccttttctgtttgagaaacactccagtaaccaactggcagaactatttcgaaatgatctcttgaagctaactctttgtctttcctctttctgatggacttccttcacggtctcgattaaccaatccacagcatcaattgttatagtgatttcatacccaaagtgtctggttctctcacatattcgaactgatccaccatcataagtcaaagtaatcatgaacaccttgtatttagtgtgaaaactccaatattttcggagtttttgatcaattagaggatcacactgattttgcc

SEQ ID NO: 381426 - DNA, 3562 bp, Cannabis indica
aagaagaagaagaagaaagaaattgaatctaggcaccagcataattggagaaaaggttaattagtttatcaagagtttcagggtaaaactttctggcaaacaaataacagggtctctgcaacccattccacaagcaaggtcttgtcattattgtcctctgcaccatatatatataaatagatgatattaatattaataaaaaattctcatataattgaacataaacaaatgaaggtttcttctaaaactctttcttctattaattttgctgaaaataatggtatgaggtcgattttgtacctggctgtcgcttgtgacatgagtgctctcatcaatagacttataaattttggagagaaaaaaaaaatataataagaataatgattaaaacacactcaaaattagacgtaattatgtgttctccattagaaaattatatgactattatttaataagtatcataacgaatatgttgaatgtgaatgttagggggggtaaaaatatttcttctctacaagcatgatctattaataaaaattatatatttttttatagataagaaaaatataaattttattgggacataaataaatatataaaaataaaaatatttttttttataaaataaatataaaaatatgtgaaataaaacataaaaattataattttacaaagataaaaataaaaatatattattttattaaacattaagtgaggtccactctcctcagccaattgaaaatgtatgatagccaatcaataaatgtagacatatatatagaggttaaatattattttgcatctatattttgtaaaaagttaccaattaaattttttattttgttaaacagaatccaaaataatatttacccatatatattcattgattaaaaaaagaaaatttaaactctctgttctttccattttataaactactttctatttaagcaccaataatgtccttaaaataaattaataacatgatcaaagtcacacattaattaataacatgctcattattgctcattagcatttgacaaaaaaaaatgctcattagtccataattcttttttaacctttaattatagtgtataattttttgaaatttaaattctgttcgacagtactttcattttaatgaatatgtattattttatcataaaatattttttttgggagatttaattttataaaattatgataacaattgtttttaaaacacaagattagagctaaatatagacataaattctctaaaaaagatacacatataaataatttaatattaaaagattacataatagaagtaaaattattagtaataaaatcaatttcaatttcatgctcttgaaattaatgtgagaatatatatatattaattttttttagtgaaaaaaatggcatatattatagatttttttaagtgtattagagatatagtagtgtttagtatttgaaattaatatttaggttaacttattaaaattatatatttggtaattaataacaattttgttaagaagaaaaaaagaagatttagaatttggtgagatatataccgtaatgttcttgaggagctcaaaagaaatatcttgagccctataagctctaggatgccacttgccttcagaccaatcaacatgggttactgaccaatttgcaatcgcaccagggtctttcatctgagtacgtacaaattgaaaatacatatatattatttattataataaagtatgtatctttaatgataaagaaataaccaattatgacaattgatgttatatataaactcacatgaagaaaggtttgcaaataatgctcgtccgagtagcagttgcggccattcatgtttggctgacacaataatgttatgcaataattttcaaatttaaccaaataataataatgatgattatgataaattttcgattttaagtttataagtagtctctgctaatttattttacttgtaaaaatatcatataattggtattaaaaaagagaaagacattaattaattgcatatataccctgcagaaaagtttgaactttctgtggtacaagctgtctgccataacgataattgcatgttgccgtttcaaagaaaaccactgtacaacacaatacaaaaatagtaaagacaaaaatcccacttttgtaatcttatggaaaacatggacatatatatattttctcttattgaattccactttttattataggcaaaaataaattattgtaactaaatgtaatttttaataaaaaaataaaaattatttgtgatatttaaattatagtatttaaagataagttgtgattaatacattaatcacaaattttttagttataaatgacgatttatagaggcctgacctatcttaagaacttaaaaattaagataaagtgacactttaactcaaacatcataaaagataatatatcactataactataataagtgacagcttaacttatcaaacatataacatacaattactgctatattctaataataacgagttcttcatatttttatattttaaataatgttaaaaaccgttaatcaattaaggagtgcaccttatcaaataacaaatgttgtataatttatgaatgaattaaaaatacctgtgagcccttcctaaagtcttgctttacaacttcaggtaacatatgttctgaatacctaccattaccatgaggaccaggatccacaaaactacaaaacatacacacattggtatataacaagaactttaatttatccaactgaataagaaaacaaatgatcatgatgatgtaaagttatgcttaatatataattaccaatcaacgaagctgacattggtgaagattagataattatacacgtagtcgaagttatgcactggtacacaactgatatataccaccaccaacaacaagtaataattacagattaataacaagttaaaataatgaatataattaattaaccagaatctatctcataattcccacagtctgatcaaacttgacaattaattttgtgtacctgtcagatagcaagataaaatgttcgttgtcaggatctaagagtgcgttccccaaaagtctcttctctgcctctatcattgaaaattttccccaccccacctgaaaatataaatttatatatatatatatatatgctattatatgacactcaatctcattacattacatgggatatctaaaatctatacattgttgtaactataaagattaaaaagcggcataagtacctaaagttttaagtttgtaagcggcataaacccaatatttatttagtggtataagtacctaaagttttaagtttgtaagcagcataaacccaatgtttatttttagcgacataagtacccaatgtttgtaataaaattgtaatttttttacaattttgtcagtacagactttattttaaatttattcaatgaacatttggaagtaactgatacttattgtttctgtctagacccaataatcaagaatctaaaccttatatgtggtctgtgtttaagaaaataacaaggtttgtactgac

SEQ ID NO: 381427 - DNA, 1040 bp, Cannabis indica
aaaaaaaaaaatatatatattcattaaaacgacacttagcccaagctactacacaggaggtagcttcttgagaagaaaagtgctagtggaattcgaaatacgagctcacttgcgatagagttcgcaaaaccatttgaagtttttataataaaagaaagagaacatagttcaaaacttccaagcatagctctaatttgctcaatcattgagatgcatctccaatcaggacaatttgacactccttaaagagcatcgattagaattttacaatctgaaaacagagacaatttactccattgctgcttcgcagcaaagtccaaagcaaggatagccatagcttcaacgaacaaagaggaagaagcataaaaaaccttagaaatcacttgaaaaccatgtaagacagcatctctaatcataatttatattaatttaaattgtaaattctaccatcataaggacattttagtaatatttttgtttttataatttcttaaatcacaataatcaaactagaatttttgtttttaaaaataaaaatatgctctatagctattttttatataatttaaaaacaaaaaaaatgtgtgttttaaattttattttaattcttttaacttgagtaaggagtgaaaactgaagtgagagaaagtgggtggcgggtcgaggtctagggtttgggttcaagtcttaataaggtttggattcatgtccaagcaaagtctgaggttcgggcgcttagggcaaggtctgggtccgagttcaaatttgacacaactatgtgtgaaatttacataagttttaagcacgccatttacgtaagtcactgggaatggttatctcaaaatcagagtgtaattgtgaaaggcttacttattcatgataataccattattggctatgaagggctctattgtatgagaaagaaccaattctgtaatggtaagaagttggtgttaaaattgaatgtggctaaagcatatgatagggtggagtggtgcttcatccaagggatgatgttgaagatgttggaaattatttta

SEQ ID NO: 381428 - DNA, 2484 bp, Cannabis indica
ccttgtaaacactttaaaaaaatcacattgttatgaatgaaattttaagaggtttttttcttcttgagttcttaaaagaactattttgttgcgttcaacctgacttataaaacggatttccatcaccgtttgtggcatcttcttcataccaaggtttaaggttaactaaatattgggtcgcgattctacatccaaaattcgagaattcttagaggctgccatattttgtgtcgggtttcatcacaactgttgaaataagaactaggacccggagctggacccgacccaggacctgaacagtgactgggacctaaacttggactgggacccagtccttagacaaagacccagaccgggaccaagacccgagacccaaacatggacacggactcagacccagaccgggaccaggacccgagacccaaacatggacacggactcagacccagaccgggaccaggacccgagacccaaacatggacacggactcagacccagacccggacctagacccagacttgggcccagacctaaacccagaccagggccttgacccagacttggacccagacccggacccgaacccaaactcaaacataaaccaagtccaggactcgaactcacacccaaacctaaactcggaccgaaacccaagaaccgaacccgaacccagacccaaaccaggactcaaactcagacctagacccaagcctagacataggacccaaaaccaaagccgaaaccagatctggaactagaaccagacccaaacccaaacctagactcagaccaagacttaaacctacacccttacccgaacctagatccagactcggagttggatccgaacaaggactcagacctagagcgagacccagacctggaccgggaccgagatccagactgatacctagatccgaacaaggacccagacttggatcgggaaccggacctgaacccagacctagacccaaacctaaacccaaaccaagacctagacacgaacccagaccctaacccggacccagacttaaattcgaatttggacccagacccaaacttagactgaacctaaacccagacgcgaacccaaacctacactcgaacccagacccaaacaagaatcggggacccgaactctgaccttggaattgagactcgacctcggacctaggcccaggacctggaccggactaggacccaagccgaaactgaaccaagacccaagatccagattcggatgagaatttggagctcgaaccggggacttggggcttggacccaacccatagtaggtgcctagatcttgaaccgagacccgaactaaactcaaaccatgaccttgatcagacccggacctagagacgtccgggtcttaagaaccggtccaaattctaggtctcgtgtcttggtctgggtttaggtgtgggtcctcaatccaggtctgagtcctgggtttgggtctagctccaagtctaagttcgggtcctagttagggtttgggtcttaagtcgaggtttgaatttgtattcggatctcggtcccgttctgggtttgggtttagatcctagtctaggtctgggtccgagtttgagtcccaaatttagacaccgactatggatcggatccaagccctgggtcttgggtccagatccagatgttggttcgattctagtttaagtcgtgggacctagtccgggtccctactctaggtttgggtctagggtctggtcctaggtctttgttttagggccctggtcttgggtttgggtcctcgattcaagtgagggtcctaggtcccagttcgggttttggtctcagtctaagtgtgagtccaagtcccggttcgtgttcaggttcgggtcctagtctgggtctggctccccgtctagttcttaggtcccaggtccgaatctcagatcctacgtcgcggtcttggtctgggtcccagtcacaatccaggtttgggtcctgaccccagtccaggttagggtcctgatctcgatcccagtctgggtccaagtattatgtctgagtctgggtctaagtctaagttctggtatgggtcagggtccaggttctagtataggttcaggttgtagtctgggtcatgggtcacaagtctcgagttctgggttctgagtccaggctctaggtccatatttaggttcgagtccgagtttgggtctaggtctgggtctcgatcctagtttggcctgggtctggcttcggttctaggtctgagtctgagtccttatcctagtcccattctagggtctcggtctctgttcagattacaatttcaggtctcgagtctaggttttggtcaagatcttggtttgtaattgggtccgggttcggatcctaggtacgattcctagaatctcttttcttacaataactttacttttcggtttgttcgtctttaatatagttgtgttacaagaaagtagcatttgtagaaacaaaaactttgttatcctt

SEQ ID NO: 381429 - DNA, 4311 bp, Cannabis indica
taccaaacgacacctaaataattttgatagtacgccagaatgcaaattgacctataaaattaggtcatgttgcctaggcattctattttttatattattattatttatatgtgctatcttattattttaaatatgtattttatatgactttgtaatataaattaaggtggtattgggtaacactattgtttttaaatttttaatcacaaaataaaagtaaaatttttatttttaaaattaaggtgggactatgaactcaagagtgacactaattggtattggaggaaattgtgttttctaagggacaagttcactagtgaagacattgctaaagtggggactggtacgcgattcaaagctgccctgttgtataacagcagcatttctcaaactccctttgagttcagcaggtttatttggtgctcttttaacttaccgaagcacaggttcatactatggcaagcaatcaattctcaactcctaactcgtgacaaatttgagcaatttcacattactcttgacagcatccaatgtccggtctgtgaggatgcaacataagcaactcctatttattttttgactgctggttttctcagcaggttgtgaagagcttgagcaggtggctggggactaagagttggccgattggattccaaagttggaaacaatggctgattctgaacagaggggataaaatgcatcgaattcatgtgtctctattggcagctatgatataccacatttggagcaataggaacaattgtctcttcaacaaattttcgagtacaacttcaaaaatcacacaagatatcaaagatacagtgttttatagattacatgtagctaaaaaaagaaatatgaaagaccatgagaagagatacatagagagaatttttatgtaattcttgtttgttgcctttttaggcttgtacagatttgtaattgcttgtgattaatgaagtttgttccttcttgatcaataaaaaataaaagtgtgttctctaaattttattttcatttttatatgttgattttatttaaattgggttcggggttgtggtccgagtccaggtctgaggtcgagacctggctgggtcctggtttatagctgggtctaggtttgggtccggggctgtggcctgggccaaggccgggttcgggttcaagttcgaagccgagtttgggtctagggtcgaacccgagtccgcgtctagggctggggttggggttgggctcgcattcgtgtctgcgtccagggccgggtctgggtttgaggcaagggtcgtagccgaggctgggtccggggccggggctggttctggggttgggtttagggctagcgttgggtctagggtcgggtttaaatacaggagcaggtcaggtctggggccagggccagattcaagactgaggttgggtctacgactggggctggattcgggactagggccgggtccaaagctggtgtctgtgtctgggtctagggtcttgggccaagtccgggtttggggtctaggttaggattagggttggggttggggtgcaggttagggtctagggtccggataaaggacagggtcggggtccagggtttaggtgcaaggtccaggtcttggtctgggtaggggtttaagtctggggccggggtctaaagctaggaccgagtttggaatttagggtttgggttcgggtccttggacgacctcttggtcgaggtctaggtttgggtctgagtttggatccaggtctgggtctagggtaggggtagggtttgggtccgatctgggttgaggttcgggtcgggtacaaggtccagggtccgagttgggtctgggtccgggtccggatccgagtttgtgtcgggtctgagtccaaaagtccaggttgggtccgtggtccagatccaagttcgggtcaggtggcatttagtgacacttttttttattagttttttatttttaaaattaaaaaagtaaaaatgtaaaagtaaaaatgtttttcaaaaacatgttctataaaactattttaactttttaattttttaattgagaattaaaatttagaaaataaaaaagttactttcaatattttttttttaaagtagtttctttttaattaatattttggactccaaccagaccaggacccaaatctcaccccacggccctagcattgaacccagcctctaacctgaacccgaatttaatctcgaacctagactcgacttaaataaaattaaaaaataaaaataaaaataaaaataatcttgatagaacacaacttttattttcttaatttttaaaaattaaaaaacgaaagtgattacagtatttttatttttcaaaaataaattttttaaaaataaaaattttacttttatttttgtgattaaaagtacaaaaataaaattgttacaaagggtcttaaaatattatgaaagttaaaataagaaccggtaagtttacattaattaagtgcaaaagtacattagtttctcccattaagaagcctaattattagagtaagggagtttatacgtacgtacgtacacacaacggaaaataaaaatagaaattaactttaattagccattattattgacataaccgtttccgttaccgttatcatcgtcgttgttttcttctttataatccacacattcattcatgtaatactcaaatttcccgacgacgctctcaggcacggaaacaagaactctaacggcattaacgtcacctataacgggcaaaaacaagcagtaaatatcactcgctactgttcccatatgcagtggctttcctctaccgaaatccaaatcctcaagccctagtttagcccattgagatatcaccagactcatcgacagatccgttctgaccgttttgtcctccaaaagatcgatcatggaccttacgcagccatcgtcaagagccgacttagccacctggaccgactttaccccgtggtagaggttgtcggagacaagatctttcacggttgaaagcgcgcaacccaacacgaatccattgccataatacccctgagggatctccggtatcaacttcttcctgacatttacggagaaaagaagcttgacggtgagggaaggtgatgagagcagctggtcaagggagcgaatccaggagcgccacgtgtgagaagcgagggcttcgaaggttgtgcacttgagggacggaacgcactgtcgtttaaggcggaggagatgagctggagagaaagtgaatgaagacggaacgaggggctgagattggaggaaggtgaagatgtcgacgtggccggtatttgtgacaggtttcgtaaattgtgggtgagtgaaggtcatttgttggtgttttcggggtttcaacacgtggcgagagtggaacggtgtgattggtagatctagattctctttagctgtgtggtgggcccacgcgtgtaggaactgtgacgtacctattgcgtcgcagatgcagtggttgatggcggtgcacactatcattcctccacaacgaagattcgtcaccttgaaaaaaaaataataattaattaattaattaaattaaaagtcggaaatggaaatgtcatacttactaattaattaaccaaccatgtattttatgaaaggacccgcactccactcactcactcctatgtagttcatatttatttatttatctatttgactaaggaaaaataaaagtagctactttctttcttttccgttttttttcttgataccatttagctttctttacaaccattttttttcttaaaacattgccgatcgcaacaacgtggtccacttgattggaactttgtcagtgagaaagaacgcacataactaaaattataaactgttataaaaaatatgttaaatactattttagctttgtgttttgctaaccttattaattaattagattttttattttgttaaataataaaataaatattatattttttaaaatagtataaataggactttgaattgactttttgtcaaaataaaatttaataataattttatatagaaatattataacaaaaatagatatattttctataactattcgtgttaaaaatgatcttaatcagggtcttattttgaaaaatatatggtccattttattatttaacaaaataaagagtgtaattaatattttttataaaacacaagatctaaaatggtatttactctaaaaaataataagagaattaagctaaaataaaagggctatttacaaaaatatgggaaaataaagataagttttgatatatatggcataaaaacttaattacactaaatat

SEQ ID NO: 381430 - DNA, 745 bp, Cannabis indica
aataataataataataactacactaataatagccttgtatgcttcagagaacacgattttttgatggagattttgagatcggtgatcgaaaatcaaatgtgcccatgacctctggccaggatgtttgacacctaatagaacgaacatctccaacatggagaacataataaagtactgaacattaactaaaaacattaactaaatatgtggtgaatatatatatatagactgaattagcaacaaaaaaaatccatccaaacaaattcaaagatagagtctacaatggtgaaagattcttctgtatttgccccacttatgaagcgactttgatagctaggccaagttaaagtctccttgcattaccgaaatcaactcactctcaccggaaacacatgtacgtgctcgccataattttgttagatcaagactcatcaaatggattggaaatttggaacactgatgaaaataaatcatcactttgtctttctaatggataacttgactatagatatgtgatggacaagaatgggtaatcagccgtcctagtgtgacaattttgtaataattaataggatattacattaagaaaaaaacatatgcttatatccttagatccataaagacaggtgatgaaaattccaaagcattttcataagtctgatcaatgtacagtttgccttgcgcacttatagaacaatgaaagaaaaattaaagtaaattgtaatgagagtggtcgacaagaaca

SEQ ID NO: 381431 - DNA, 3659 bp, Cannabis indica
atttatcaatatcactgctattcatagcctctttagaggttgctgattcagtacctacaatctcttcaaagtgttcaaggcaaatgatgtgtaatcagcatatctatgtctatttagaggatttgatttatcttatgtctcttcctagacaattgatggatatcaagcttagtctgccctatgtcatcactagaataacccgattgtcatcttcattgtcttatgtgtgacctgatgcaatggtttcttcaaattctactggtaggtttctctataacctagtatcaccggtcttatttgcattatttgtatccatctatgtcatagccatctggtcttctttgaacaccacatctccactgatgatatatttcttgtgtccctcttttaaacaccataatatgtagccttttactttattgggataacccaagaacatgcatttcaggacccttgggtggagtttttattgccttatgtgaacaaaatcaagacaaccaaacactcttaaatggtctagcttaggtggatttcctgtccacaattcttgtggagttttcaaataaatgatagtggatggacacctatttatgagataacatgttatctttactgcctctctccaatacttttgtctaagtttgctccttttagcatacacctgacactctcaataagtgtcctattcatcctctcagcaagaccattttgctgagggattttgggaactattttgtgtctagaaatgtccttcttgtcacagtaagcattgaataagcctgagcgaatttcaattccattgtctgttctcaattttccgaccttcttccttgtttgagtctcaaccagtttcttccgtttgataaaagtttcaaaggcctcatcttttattattaaaagaaatacctaaactttcctggagaagtcatccacaatacttaggaaataattggcaccacctagtgactgaacccttgaagcttcacataaatctgaatgcacacatgccaatggttccttggtcgtgtgcatttcaacagagaacttgaccttgtagctctttcccatgacacattctttgaaaaacttcagtttgccatcttatttcttttttaggagaccttgtttattcaattcaaccaagcctctctcactgacatgacctaatctcatgtgccatagcttggtgttgtcaacaccagctctgccaactgtagcatcaacattgccttctgtagtgattgcatacttcttgctgtatgtcttcccaactagaacataaatgccattcttgagttcatccttcatgacagccataaatccctttaaaaccttgagtgaactttctatcttaataaaatagccttttgagatcaaaaccccaaaagataatagatttcttttgagtgcagggacaaatctgacatttatgattattcttgatactctatcatgcattttgatcaccactgatccaatgccctcaaccctgctagctttgttgtccccaagcattaataatccactagtccatgccttgaattcacaaaagaaataacttttgaggagtcatgtggaaagaacaacctgagtcaagaatccattcctagccaattccttgacttgagaccaacaaaacatcagctaaatcataaccatgtgatgcaacactagcatctactttttctctccctttattcctttttcagtttttccacaaagtcttgcattcatccctgtaatgaccctctttcttatagtaataacattatcttcttgccttagattttgatttggatttctaactatggtgagtgttctttctattgttgttgcctttgtagttgccattgttactcttgttcccaccaaaccttgaatctatgttctctgatctacctcaagcaaacaaaccattcttgtcctcagatcttttctgtatttcttttgaattccaagcatcttttacctcgagcaaacaaactattcttgccaaggtatcttttccatacaatatagtatccacaaaatgttcataacttttaggcaatgaattgagtaaaagaatacattgaccctcatcttcaatcttgacctcgatattattgagatccaagatgatttttttgaattcatctaaatattttcttagttccatgctttcatccatcttgagagtgtagagcttcttcttgagataaagtttattggcaagtgatttcttcacgtagatttcgtctaatttctcccaaagatcaatagcagtgtcctcacttcacacttccctcaacaccacatctccaagactcaagagtattgcattgtgtgcctttaactctatctccctcaccttcttcttgtcatccttgagacccttacgctcttctctgtcaattgctttagaaatctcttgatgaacaaaaaaaaaaaccttcaatttgattctccagaagccaaagtcattggctcctatgaacttatccacttcaaaccttgcggaagccatttgagatcaaatcttgatctttcttcaaacctcgacaatgttcttgatggcccccaaaacccaagctctgatgccacttattttaaacataatctcaaacaagaccaaaacacacaatacaaacaagatagaatgattaacaatcaattaccaaaatcagacctggttcggtcaatgaattaataaccaaaacagagatgaaaaataaaaaacacaaacacatatgtggttcaagtgagagttaattagacaccactctaatccacggccaaaatcagcctcaagggcttttcaatctctttattcaacttgtttcaaattttgtacaataatgaagtcttgctcaacaatggacattttttctatctaggctctctctctatttctaactctagtatttacaattatgggaatagaataaattagcaaacgatgaggagagccttaaatactaagtgagtcgagatagaaatgttcaactttaaaacattgagtcctaactgtcataacaaaaaaattattatttttatgaggtatttttagttgcttgagcccaatagaattttaccaactataataattttgatccaatagttatggagaccataaaatgcacaccctcacaagacaaaatctattcctacaattgaatcaacaactaaataagaaaaagacatgtccatccacaaagcatgaataactatttaagaaacttctcaactagacattttacaaacattagcacaatatatatttcaagttacaattaaaattaagtaatacattagaacctctatttaagagtaccctattcaagaataatctctaatttattatataaaaaaaatcaagtcccgatttgggccaattataaataagaataacctttacattgtaattagttataaattttttaagtcccgtattaacaaagtatacctctgtataagaataattacatcttaataaaatatatacatatattttataaaattatttatgtagaattacttattttattctaaattgtaatatatgtataaatattatatttactcaaaaataattctattatgatataatattaaggattgtttaatgtcattgttgttatattgatattttttggtatttgattttttttctctagtgt

SEQ ID NO: 381432 - DNA, 1309 bp, Cannabis indica
tttttaaataaaaaattcaataaattttatttttaggaagtctacccaatttgaggaccaacaacaaatcaccaatattacatattacaataactttggaaactttaatgggctttataaatttaattataagtctcttaaaaggggactatatatcaatacaattccttatattttcaacatattaactctcaatcttttttatacaataatatgcactatatatatagcatccaagtgtcaaaaacacaatgatatgcatcaattgttgaaattttgaacacctatctttataatattatctattttaacctaagccctcgtaaattttcttttgaactctacccaaaatgtttcatatcaataaaaataaaatacatccttatatatacccatgatttttcatatatctaaccaatgtgagatttttaattgtacacccaataattcgacattaaaaaagattatcaagttgtcctttacatgttatatataataatatacatttaatttactatctcttgctagtatttgtaaaaaatttaataatttatagtgccaaaattaaattatttacgagcatataaacaaaatttcaatataactatatttgtgtttttttcgctataaattatttgaaaatttttaaaaaatttataagagattctaaataattatattgtacattatcatgtaaaaaagaataaaattataatgttctacacatacaaaaccatattatttttaaattttattttatacgctagtgaaataaattattttgaaacatatattgttggtattgcaaaaatatttaaaatttcacaaaaaacttgtgagaagtttttatataattattatgtagactatcatcaaaatttgtttgggtcttagaaaaaaaataaattattgagcccttattttagagatatgtggtatttttgtaaattatcaaaagatgatgtatattttcaaaaggaattatttttttagaaatcttatattgggtggaatttaagcacaagcttagccggcctaagtatggtataacaaaagggaaacttgtaaaaatactgaaattttgggtaatttttacaaaaatactgtcacacgaaaaagtttacaaaaatactgtgtttttataaaaaaatcaatagaacacaaaacagaacaactcaaaacactagtagaacaacaaaaaaataccagtagaacaccagtgaaaacttaacacagtatactgtagtgtgaaatttataaaaaaatacagtaaaaaagtaaaaaataccgcctgacagtatttttgtaa

SEQ ID NO: 381433 - DNA, 1675 bp, Cannabis indica
taacaaaattaacttattatgcacctcattattttctcctttttcccaaaatatccctctcatttcaaatttccataattttttcaatctcttcattctctcttcttctctagcctctttttattccaaacacatgctgaaccaccattaacggcaatcgaccaccacccactctagtcgtcattttatcatttttggatacatgaatgaaaggaagctttcattagagtgcggtttgatgatactcaaaagtactcgatagtactcaaggagatttgattgcagttaataacactcgataagcttgatggtactcgagtactatcgagtacaacaaatgctttaaattaaataacataacttaacaataccattgagtactatcaagtaccatagagtatatatcgaaaattcatctctaaccacaagaacatgcttatatcgagtatctactgagtaaccatttgttaggatttatgccttaaaagtaagtgaacaaagtattatgtatttatgtatatataaaatacaaatatattcactacaaaaatattaggctatctcggcactccaatctcgacgattccgtgtgttactgtcgagatagataacaatttcggcaattttcatcgaaactatcaagattaattatttttttaagaaaaaagaaaattaattagaaggtccgatctcgaagggtctaaattaacattagcagcccgtccatctctctttttacctctctttctcttcttacttctaaaaccctagccaaccgcacgcaccatccaaactagagacgattctagcccttttctagtcgtcgttcgtcctctagctagccagcgccactcatcctccaaccagtcgccgcttgtcctatttggtaagttcttttttctttcccttttacttaataatttgtaatcttttacgtttgaaattgttataggtaaattttttttttttttgaaaatgtgagtttgaaattgttataagtttgaaattgtttggttaatcttagagaaaagtttagaagatgatttcaattttttttttaattcttggccaaaattatttgttattaatcaatgaatatttatgtaaattagttcttaggttaataattatttagaatgtgaaatgtattgttttgaattgaaaattttagttttgtgatatgagaaattaggaaaaattatgtgtaattttttttttgaactatgtatattgttttattattgtaaactatgtatatgttgttggaaattattttaccaagatttagatttactaacatgtatgttgaattataattctataatatagcatcctaaatatgaattacctaaaacaataaaataaacacataaaaaagttatgaaaaactgtacattgatggcaacagaataatatgacttattctgttcagatctttaacctttgatcctttctgttgcagagtatgatcaaaatctgaagctggattctcctttagttgaaattttgaactacacaatcttcctcactatgctgagtattgctttgaattgtatgggcaattactcaacaccaaagaccacagattatgagagagaaatacgaatagaatttgaaaataacaaatagaaaatagtaagttttctttttgattcaatttgttagacaagagaga

SEQ ID NO: 381434 - DNA, 1838 bp, Cannabis indica
attttgtttaatgtagtttggttaaggtatctactctctaatctcggtttgatatatattttaactttcaaccgttagatcatgtagttattgataataataataataataataataataataataataataataataataataataataataataataataataataataataataataataataataataataataataataataatatacccatataacaatatccagacatatgtatctattaggcattatacacatgccaataaaatcaaatattatatcatcataaaaataatcccatacatatttaaatccataaatatgtaacataaaaaaaatactctcagctaaataaaattacaaaaataccctttcggagttagcggatattacagagcaacgcaattttaattcaatagctatgcaaatcacaaaatgcatacgagataaaatctattcccatataattatattgaaaaatattcacattgtgtcatcaatcatgcatgcttgagatctttttatataataactaaaaaaaaatgtttttaaaaaaaagtgatgacctcattagtgtgtttggtccctcctcttccttaaaggttttatcttttttagtgatttattactattaagaagaagaaaaagaaattaaaccaacagagaaataataaagagagctatatatttgataatgaatattgaatgcaagcacatgattcatggcagaagaagagtagtaatatagaggagatgcactgcattaaaaccatacaatgggctatccatgagaattccaatccctgtcttgttagatcaatttaacaagtaatgatatgtgcatttaaatattacatacaatgatgttactattttaaaaaagaaaaagaaaaaattagttcgaccctaaagtgagacgagtcagacgtgcgcctcgaacccgtgcacactcagaccctaaaattatgaaaaaaattattacatataaataaaatattaaataataaaaaaatgtaataaaataatttttagtatagttgtagagagtgtaattttcacaattgatctcttccaacatttacttttacatttttgtttagaaatatttaattatgtaattatggagtattgaattttgaagctctcaagagttttaaattttttaccactacactaaaatattaaaattattgtacttataacaatttaaatatttatataggaccctaaaatttaattttgtagtacctaaggactgaccttgttaataaatagttatattattgtgtataatatcttagtacacatattattattattactcttcatttaatatatattttttcttctaacaaaaattaactttaaattttttatattttacttgaggtatactaagttaataaccatttattcaccaaaactacaaagtgacaaaatatatgttttaatgctacaatatatcttaaaaaataatcatgaaaaaaaataactcaatagatattatatgtcataactatatatagcataacaatttttttttggtatggtaattaatagaatttctttgtcaagtttaatcacaatgacatatcactaaatataattgtaatgtggattaatcatcaaactctataactaaatttaaaaaatatataatgaataaaatactatttaatattcacctatattatattactattagtgtaattaaatgtgtctcaaataatttaatgtaataatttttataaaatatcgctaactatgttgggatatcaacccaaattctcactacaagaaaaccagcttttaccggcgcattgttgcgccggcaa

SEQ ID NO: 381435 - DNA, 3393 bp, Cannabis indica
aaaaccctgtcctaatatccttttacaaacacaaaataataacagcacaatatcgtaccgcccaattatgtgtttttgacaaccttctggctagagcatggatacagtaagcaacatcagctcgaggtctggtagctgaaatagcagcaaaaatagctgcaaagcaaaagaggaataaactggatcagtaattgaattacaatctaccaacttcttactctaaagccattatagaaacaataactatacactagcctatccaactatacgagatagagagaaggagatctacctctgatgtgtttttcctttgcagggcgctcaacatgatttgtggctttgactatagctatgtccaattcctgcaagaaattattaccaagggatgaaaacccattatagttttagtttgtaacaaaagaaaaaatgctaataccttgtaatcactattgacttttgccaatgaaactgtagtggtgtccttaattgctccaagtgcttttcggaaactcttctgtgtaccacctcctgacatcctcccttctctctctcaataacaaaatccttatataaaaaaaaaaaacaccaaattgtgagcatttttcaactcaaaatcaaatttcaataacgaaaaactcaaaatcagatcaaaatttaatacaaatttacagaattctatgttctgagttgataattcagatctgatcaataacatttaatcactaaccacacacagttttaaaataaaaataaaaaaccaaagctctaacgaagacttaagagttgactcaaatcatcactcgaaaaaaaaaatcaaaattccctaaataccataaaagctccaaaagaaacgccaccataattcagcacccaaaaaaagaattaaaaaaaacatatttcaagtttcaccaaaaaacaaatggctttaatataaagcggaagaagaaaaaaaattgagaatcgacaacaaaaggaagcaacagtaacattagctagaaaatccaacgaagattaggatctaaacaaaacttaatcacctgaaccacaaaaaaagaataggataacaggagaaaatagcagaagcatatacagatcaaagagctcgattcacctgaacccaaatcgaagagagagagaaagagagagaaagttagtaaaagctggcaatggttagctggggggtcgagaccagagaaaagtcgaccagaaaatgagctcggtttggtttttcgttgggtcgtcggcgtctatacccaattatttttatttttaaattaaataattttttcttttggaattttttattttattattattattattatttttgtaatattctctttcctattttctccctgtcagaacataatacggcttgtaagaatttgtactattgcaactttacacactactcataaaaaatgttatttatctgatctgtagtcgcattttttttttattttataattacgctttcttcaattgccacgtggcagttgaaaagtatatttcttttttattatttcacataaaagggtgtcattcaatacttatggaatttgttgttcaaaaaatgaaattataattcaattataatttgcttgttcatgaaaaaaatatttttgaatttgttcacattaaccattaacatatttttaaaagggcatcgtaattaatgtgtggtattaattatatttataattgtttatttgcttactaaattatgtaatgggagaattagtgaaaaagattttttttcatttttataaggaatgttatttctttcctaagttatttaactttaattttaattttcttaatcaaaattaaaaagataaatatgtccttcaaaaatctataaaaataaaaaaataattagatacttccaaccaaactcctttaatatttatgtttgttacaatatggttccaattaaaaaagtggcagcaaaacttcttttctgttacaatttcgttaaaataatgtccttttgactgttaaatgtaagttagataggttaagtgtcagcccaaaaacacgtgtctttatattattaaaccacttattgataaaataatttctcttttaaaaataattttgcttaattaaaaaatgtaagtttttaaaaaaataaatattttcttaataaaaaaaatacttttattttccttggcaacacttaacaaaaaacatatcttttattaaataattttaaacctaaacaaaattaaaggaaaaaaatatcgtcttttctcctcctcaagcttcttcaaactaattgaaaagttggttatgttcctgtttcctggttcaaaaaccacgaatggatttttgttgttaagtctagcggacttgctatattatggaggaataaagaagagggtaagcttttgaattttttctcaaatcacatgtatattgagatagtatcttttgagtcaaaattggatacgagtctctatggagaacccaacaggatgagacactagcagacctagaatttgctccgaatgttgactaaccagttgacgtttcaatggtgtgttatgggtgacatcaacaacataactcgacaagaagataagagaggtagtaggccatacccacaatggcttctagaggaatttaataaattaagttgtcgatgactgtggtctagaagacaggagttgtctagtcatcctttcacttgggagaagagcagatgtacaagatcctggataaaaatttgcttggattgagcaatggtcaattcctctgagaaataagttttgcctttagccactctcactaatttgggaatctctcagtctagtcattccccaatttatatagagcctatcgttgtggataattttatgcccaatcatcatttttaatttgaaaacactttgctcaaggaaccaatttgcttttatatagtgaaggattgttgggaattcgatgatggaaggaatttttttaaaaaaagttgaattttggtgctgaaaagctatctttgtggggaaaggaaatcgctgacactttcaagatgcgtataaaaaattgtagggttgaactaaagcagctttaaaattaaaagggatgatgagtctgtcaatcctctcaatgaagttaaaaagagattatttgaagtgctcaattagcgagaaatattatggaaacaacgtccaaaataattttagttaaaagaaggagatcaaaatagcagttattttcataaagttgcaagtagtcgtaagaggaataaccagatcgtgaagttgaaaaaaaaaacaaggtaactgggtgttgggctttgtgccctaaataaaactctatttcaatgtaatattttctattcatatcaataaagaaacacatttaaattcattacttgtttaatgtgttatt

SEQ ID NO: 381436 - DNA, 1385 bp, Cannabis indica
tagttcaatcatttgaaggtttaattattgattgcattgtttaaatttagtttgagttttaattttactcgggggcgagtaaagattcagtttgggagaatttgttaggctatttctagcctatattttggataaattttatgttcgctttttgttgttttaggacggaattatgcttgttttctatgatttcaggtttctcggagttatggaggcctcgggatgcaaaagtgcaataaaagacaagcggagccaagaaaaatgccaaatttcgacttgacgcacttctggccgcggctagatcattgtcgccgcggccataactcgagaacagagaaggggatttttgaagtcccagtcaccgcggcgagatacaccttcgccgcggccataaagtcagagcagaggcgtagttttcagaagcccacgtacacattcgatggaaagataacgattcacaatacatccttatgggcgtgcataatttaatacaaaacctctcagtactttcatatatctttcaaaatgatacatccattgctattgcataggaccacataatctaacttctcgtggtaaatggacaactaagtgaattattggatcaaagaaagaaggtggaaaataatcttctagtttgcaaagaatttcagcagcttcagaatctcctctttgtctaccacacgctgacacaattcatagaaaaatttaaaacgtcgaagaattgtcactctacaacattcttccatcaaaccctttacagcaacaactaataattgccgcataatcacatgataatcatgagatttaagtcccgtcagcttttgtttctccacatctacacaattactaatgttagagctatatccataatataatttcaagtaaaatatgttggattaaaatccttaatatgggctcatatgtatattagtgtattgctatttgaagcttggcccaaaataaagtgatcattttagtaattgtgggtcattgggtattaaagtgtcatgggctaaatgtgtagataccctaagcgatatttctaatttattgaggggctaaattagaaatacttaaaattaataacctagctatgaggttataaattggtagtggtccccaagaaacaagtgaaaaaaatttctattctcatcttcccccatcaagagagaaaattagaaaacctaagtcttgttttcttggaagatcattacccaaaatcaccacaaagattatctctacaagatggattaagatcatcactatctatgaattaaggtacgcttccgccatttgaattcttctctttgaatcaacaaaggtattctttagatctatagttatacacttataattatatgtaatatgtttatctatagaat

SEQ ID NO: 381437 - DNA, 2559 bp, Cannabis indica
aacagcaagaagcggcaggatttggttagtttgaggagtttgatgctcccttctacaataatgatcctattatagatttaaatatggatgacgaacatgatttggtagtcgatgaagtcgtagaggtaccttccttgaggttagagtatgcaccgagcaaccatggtgcacagcaagaatggcaatcctgtaatgaaaatgaaatacacctagaactagcagtagtcgacaaggcagatatgaagaacatgctcttcctcatcatgcacttttctcaatgttctcgttatttgaaggttgtaccaagttcaaagctcctatgtgggcaaaggaagatataatagaaaagcatgagcttactatttatttacaaagtaagggattaggggagataaaacttggcaatttttacaaaaataaggaagaattaagacaagtagtggttaggttttcaattaataacaattttgagtggatggtgaagaagtcagctcccaatgtgttgtacgttacatgcaaggatccagattgtaaatagagattgaggggaagaaaaaaatgcgttctgacaactatattttacaacaaacacacatgtaacctaaatgcgagacattcagatcactgtgaagcagcaccatgggtggttgcccaccttattaatgagttatataggttgcctaatttttggatttgtgttgatgaggacctgaacacattgattcatgaggataagctcacttggcaagaaattgttgatacaattacttatgagggggttgaatggatcatggttgacgcttatgtgaaatgtatatggagatgttagttggctccttatactagagttgggtacattttatgagtgcaaggatgtatcctaattctcatatgtttaatattggtcaggatcgacttcgatttatgtatggcatcatgaagtaaatcaacatttgatgtgagggcttggtgtatgagaaaattgttgatttatcttgcttaactacatcttgtggtttgggacatggctcgctgattagtgacttatgtcaaaagtatggtgcccaggaaaatacaaggtccaattacgtcgaattatgtaagcaagtttcctgattccattccacatcctttgtttgctagcacccatcctaaaaattctaaacgcactcaagttgatgtgaatgagggagatggagaagttgatatggaattgggtgctcacaaagaagctagaggtaatggactgacaacccctatgcctagtgggagtaggggtccagatccttacataccttacatcattgcccaaaattagtacatgattgaagctcaacaagaaatgcatgccaatttcaataattacatggagctgaggcatgcggatgaatgaattcaagtggatcagttgaatgatttagttcaaaggcttgtggtgagtccaaatatggagaatcttttctcgtatcttgcgtagtacactccgtaccagtggccaccaccgccacctcctctgccatactgatgtggcatcaggtaagttctctttctttgtactttaatatcacattagtgataatgtgaacctttagtttgggggagagctttaaaatttttaggtttttttgtgctgtttaaagtgtttgtttagtgtaaactgttaagccattatccttgtatgttgctgctttgtagttatttatgaaaaggagtttgtgaaaaattgtgtgcttggtccaaccgtttggagtttaattgcaatgtttgtagaaaatagatactatatatttgcaaatacaatatttttagattctattttatatgcttgactaggattggaggcgtgtttaattagaattggatagagcttgcattatttgacatttgatgtgaaatccttaatgacatgtgttttgaaaaatggtttaggcatttttttttggaaagtgtgtgcctgtcaaacctacatttgcaagtttatcccttgtttgccctttttgagctttgatcagttatttttgtttttacacatatttttgagccaagaaataatctagatattatatttccttgtcaccaactataccataagtgttaaatgttaaatattacatatttaatagtataaaaatacaaagttaattaaattttaaataatatttttaaaaaattaatgcaatatattattatgttgaaaatattttatttagatttaattttatctttgtttataaataataattagtatttatggcataatggagaaaaagaaataaaaaattaagaaaatacattgtttttattaaaggaattacaaattaattagattttaaataagagcattgcattactggtgcctagcaccttctcgacatgtcgcgttgcgattggctagcgatactccctaaaagttattatattaaactacatgggacccgatacttaattagactaatagcgatattgacatataggagggtgctaggcactactggtgtcctttagcatttctcttcaaataaatatttttattaatattattgtgatatattttatgtt

SEQ ID NO: 381438 - DNA, 1298 bp, Cannabis indica
aattctcttgtaatacttgctcaggcaaaattagagaacttatactcattctactcccaaagacatttttagcttaaatacataataatactgactcgtgaattaaagcttattaatgccctaatcacgtaaaaatcttatgtttgttccatctctttctttgaattatttatttatttagttataatttctcataattggttttctgaaaatctcgataaacacctaaaaataccatatttttgtaccaaaattttaaaaaactattttttggggtgggggcattatcaataaatgatatgaaatagaaaatctaaatttttctatcaatgatatttattttgggtgacacgtggatcattctttagacctaggcaaaagcaaacctcgtcaatatgtcgtctggaattgaattatccatcagctgttacttatttgaagaatatgacaaagataccatgcatggtaaacgatattattcgaccagggtcaattttaggacaactcttcatatgtcccagggtaaatgtggcaacaaaagacttaaaagcacttctctcttttatttatcaattaaatccctattttcatgggatttctacacgcaattgttgtattatgagaaaataattagttttcttttttatttgttatattttcgaaacaaactagatgtaattcttccctataaatagtagagttattttattatttagggatgtaaagttattcattcacaatagcacttaaatagatgaagatcaagaatttcttgtttcttttataataagttaatacaaataaaaatagatttacaatcacttagccacacaagtgcatttgttaattttgtgtacaatttaatagagatcatttttttttttccattattgaattcactccaagtaatagttatcacgtgaatatgtatttatttgttgtgatatagatagccaccatgtgctatatacgtgcaccactttaatttatcatagactaacctacctactaaagtacagactacaaactacagtatacaacaatttttttatccatataatacaattacatcccttccctttcaaattttccttaaccaaaatccatcaaatatttgaggtttctctaatgggaaattatagtgaatgatccataaatatattagtaggaatatgattttgtctcgtgatgtacttttacggaatgtatttcgtggtatattagatgggtctcagagtacattaaatgagtgtcagggtacgtttctactttttgaccctaattacccctagatcaat

SEQ ID NO: 381439 - DNA, 2804 bp, Cannabis indica
taccgcccccacccccccccaaatcagcttgtatggtattttattttagtgttaaattgtctttcaatataggcatgaaaatgcttaaacattgattgagttttagatttattggtgagaggaaaaatccatgaaaaccttgtgaaatcatcaataaaacatatatagtatttgaaaccttcaggggaaggattaggtgagggcccccaaagatcagtatgtactatttcaaagggagcagtggtactatgtttggaagatggaaaagaaaattgatgaagtttaccatattggcatgcatgacagataggtaaagtagtggaaggaatgtgcaaaaattgtaaaactttattcaaaacttgttgattgggatggccaagcctattgtgccatagatgtacaagttgagaatttttggatgttgaaatagaaacatcagtattgctggtattattacaagtagtagtattcaaaacatgaacttgagacaaagaattactctttggtgcaacaactggtgaagtgggatttggagaggaatgagacttgtcaagtaactgtggagtaagttgatacagtcctcctttaagagcaccctgaaggagaggggtcttcgagtgattgtccttgacaaaacacaaatcaggggtgaattcaacagtgacattattgtcacaagtaaacttaaaaatgcttatgagattctttgttatggctggaacatgaagaatatttttgagataaagtgattttcttgcagctaaagaactatgaccaatgttatgaatagagagggaagaaccattacctacaacaatcttttcttttcctttgtaggttgtttgctgctgaatattgccactatcttgagtgacatggtgggaagccccactgtcaagataccaagcatcatcatcttgatgtccattggaagcaacaagagcttggggagggttttgacttgagttgacattagtttcatctggaccattataggagatatcaaagcgtcgatagcatttttggactgtatgtccagttctcccacagagctggcatataggtttattgttggagtagcctaggccattagtctgtcgtccaccatatgagtttctaccacgacctcgattgttgctaggaccatttcgactatatgagttgggagggccagattgggttttcttgaattgagtgtaatttgctgaggctccatttaaatcgacggtgagttgagtctgatttgcttcaataaacatttcatgattctgtaacatgaattggacttctgcaagagtgatcttttcccttgtcgtgagattaacaacaacagattcatactctgttccaagaccagcaagaacgtaaagtatgagctgctcctctgtgatttgattaccagccgcgcgaagaccatctgcaagattcttcattttgagaagatattcatcaatggctaaagaacctttcttggtagattggagctgattcataggatgaatctgtctagctctagatgccgtcccaaagatttgctcaagtgtgctccaaatttcagaggcagtggcacaattaaccacatgaccaatcatagatttagaaatagtggacattagccatgaaagaagaaattgatctaagcgcatccatctattgaattcaggattgcttaccatcgttgtggactctggaggttgacggatgcggggctggggatgattttgattgagcagtattccttcgaggtcgtgagcacgaattgcaggaagaacttgggatctcgagaagaaataattgtttcgattcaggcgaaggggtgggacaaacatggtggtgggaacaatggattggtgagctgtattatcggcagagaaagacgccattgaagtaccttcagctctagtaccaagttgatttagtaagaacagagtaaagaagagaaagaaggaagctgttgttgtattgaatgaataattgagtgttacaaaactagtatttatacacagcttaatagagcaccaactgaataactaactaacagaatataacagatataatgacaacctaactaaccactttcagtgacattatcaacaataatgcaggcaaaaactaaaattggcaattgtgaggtttaataataataataagacaaaaacaaatacggtaatagtggtctttttaccactattataagtttataaatacctcaataataaatagaaatgaggatcgactgaaaaactctttgtaatgaatatattaatatagtgatttgtggactaaggctcattattgtcccaaccatgtaaaaaaattgtctcttctaatattcattaattacttcatactgctctaattattggttaccgaaaatctcagtcaacaataattatttaaaaaagtaaatgggccatatacaaaaatttatttataaataaaatagtatattaattaatatgatgtatgagtaaaatagtatatggcaaatgatattataaatatgaagacaaaaaatattgtgtatatgtcattaaccacatttgtttaaataatagtaaaataaataattaaaaaaataattataatgtgggcaaaaactaaaattagtaattgtggggtttaataatcataataaaacaaaattactatagaaattgatttattaataaatctaaacatttatctgtaacgccatgatgcttaggcgcgctacaatgatttttcaaataacagactatcttgctaatcaagggttttctttgagaatcgtgtcaaatcaaaacttgaataaaattaataaa

SEQ ID NO: 381440 - DNA, 3433 bp, Cannabis indica
ctataagcagacttatttgcagcgaacaacaatcttctagtgagatattccatgaaaagcacaaataaaagaggagataaaggatcaccttgtcgaagccctttttcacctttgaagttgccttgaactcttccattcatcatgatagaataagttgtagcccgaatacaagtcatcacccattttatgaacctagctggcagattgtactctgtaaggagagctttgaggaaatcccagtcaaccgtatcataagccgtgcttatgtctacttttatggtgcatctggcagagacattcttcctattataattcttcaataggtcttgaagaatcataacattatgggcgattgatctacctttgatgaaggcccttggttttgattgactagaataggaagaacctgagccagtcttgaacaaaggagtttagatacacatttgtacaccgttgagcagcaagcaataggtctgtagtccactgctttagaaggactctctacttttggcacaagagatatcatagtcgcatgaaactcctttggcatgttacctgtagtaaaaaaatcttgaatagcattagagaattcctgacccaattcagcccacatttgcttaaagaaacctgctccatagccgccgggacccggagatttggcatctgggatgctaaagaaagcctccttgatctccttgcttgagaaaggttttagaagactaagttgctgatcaagattcaattgagcccccatagccatactttccttgttcaagctccttgtggtcttactcctagtccccatgtaccctttgaagtgagctaagaagtgactttccccttcagcaaaatcctgaatcctttcgccttgatcattggtgaaggacgctattctattctccactttcctcttcttcaagctcgcatgaaaataagcattgttatcatcccccttattcagccaggttatcttacttcattgactcaagaagctatgatacatgttttcagccaggctatatctttcagctgcctctttttcttgttgttgcaagatatgactgctaggttcagcttgcgagtttaattttgcttctgtgtacacatttttggcagcttcatattcttttcctatataacctataacatggttattgaactgtttgaaacaatgtttaagacgaacaagtttgaagaagacaaccttcatccttgtgcatcttaaaggtttgttccaattttccttaaccacattaataaaatcaggatgaaaggaccagaaattgaagtacctaaacggtttagcaccaatagctttattcaccttgatcgagaccacacacgcacaatgatctgaaattgtttcccagttgaaatgcgctgctgagtttggaaatctgtcaaaccaatactcattgatgaaaatgtggtcaatctttgagtaaatcctttttatcccctcttgattgttagtccaagtgaaattagatccactctttagcataggttctaggttactctgagcaagccaattactagcatcttgaataccgcttaactccacaacattacctccctctctatcctccaactcaaaaagagcattaaaatcaccaactataagccacggtttcacagggaaacgtaactgtaatagactactccacaactattttctctcctcagcagtattaaaaccataaacaattgtgatgcagcaagcatgttcttgaccaaccattttgatgaaacaatgagtgtattgaggattctcctctattactataaccctaacaaagcttctcctccaaacaatgaggatgcatccttcaattgtaggactagagtattgatcccattgaacaaacttcctatcaataaactcctgaattttattccctcgcaactttgtctcaagcaaagctccaacccctattttatttttaacacaaaactcacaaatagcctcctatttatccttattattaatgcctctcacattccaacaagctaaattacaactatccataaggaggatgagaattacccgaaacctctgctttgctcttactttgattctctgctaaccccacttctagatcctggagcacattgaacgaattgcattcttcaccctgtgtctttgtttctgctgtagccttctcaagggtcttcaacactttcataggagttgttttctttgggataacccactctttaccctgctgttgttgtttattctcaatcagtctcttctcctggtaagttgtggctgctggtttcttctccttgttttcaactttccccttaacctcttctcctactttcttaatttcacctcttctacattcagctatcgtatgagcataattagagcatttcttgcacttcgcaggcagccattcatagtctatattctgctccattaattgcccatgttcattaaggaacgaaatgaatgggggcggggtcatctgtaatttccatctcaacaagaactcttgcaaattgaacccttgttctctccttggtgtgttgatcaaccataataggtttccctattatgctgattattgcacttagactcttattcccccaatattggagacctagatcatatagcctgatccatagagggactgaatgaatcatcttaacagtattaaggtcagttgtccatggcctaattataactggttttctatcaaaatgtataacccctgcttccaaaacttgatcacgagaagcttcatcattgaatttcaccataactagccccatagtcaatttagcaacctgaacaatccccaagtgtccccaaattcgcttcaggaatccctcaaagactgttataggaggattggctccaaggactttgcaaatgactactgtggtctagaacgctgcttgttctttcacttcatctttatcaacttgtgctattttaatcccattacgaattattggctcagtatataggagttgtggatcacgattaaataccttcgtcttcccaaaagatgcccagtgttttttggctgaattgttaatctgacctgcatcaatggttgcttcgacttccattgcccagctgctacattttggtgtcaagagatctctcttctcctcgtctctggtgaaatcgcagccctcgtctatcgattgaacctactctgtttccatcactttcgctatcagattcagtccctctgtggtgactactttatcttcttcctctcctggttcctgagtgtcgtccttcgactctggatctggatctatgacaataagtttacggctcactcttttcttcctccccatggaagcagagaagagcagagcaaaatctcatcttataaataatttgtagcaggtaaattttgtacttctttcatctgtgtaaacctagtaatatgatagggcccatccaaat

SEQ ID NO: 381441 - DNA, 5461 bp, Cannabis indica
taagtagaacccagtgcaccagtacagttgtcaacctaggcactgtgtagcctattcccaagctcctaggatctcgttttcatacttttgaggttcttgaccttgaggacgaggtttccagccgcatttttaacaattttggatttattggtcgaattagatttagcatttgagcaattgaatgtagcgtcccaggttgattttcaacctcggcgttgggcctagcaccaggtcaacttgggctctcagccctatttctagggtcttggctttgtagttttctccctgaatcttcattaattcgatgaaaaaaaatacccagaacactttttcggtgaacttgattggaaacaacccatgctgacaatgttatctcgatttttgctcacttgacatggcacctccacgtggtaaaaagcaaaagacacattggagacatgtcctcactaaccgaccaggttagtgtcgtgcaaccttctatttattaggatcccatgattgcacagtagacataaacatgaacaacatgaagacttacaagatccacatcttcatggctcggaagcaagttcatccttatatcagaaccactagcaaagacagagacatacaacaactttaagatctaggctagacttttacctggccgaacaagggagacaacctcatgcaccgggcagccccccaaacatagttggccaccaagcatgcatgccacgctccaacacttgtgtttttatccataagccttccaaatcatcctcggctctcctacaactttggagcaatttagagtgcccacaaaaatagggattcatcatcaacaaataaaaatcctattctttagcgattattagttatctatattgtatttcaaatatacaatgtaactttcctattttgtagggatatttacttattttttatataaagtaacttgtaaaccctaaaactatctaaagggtcttaaccctacatgaaagggacgcttaacattaatcttaacctcaacctttatcattttttgtacttaagatctcataagtaataaggcatagaactctctctcttttctcaatcttctctcctgcaacacacgttctcatcattgtaatactaaagggtgccatagctagaaattacatggttcaagcccgtaatctgcttggtattatctcaagagtgaatacaactaaaaggggaataggtcattaccttatcaaaggggtcaaaccactataaatccttgtgtctttatatttagtatcataccgcacatgacagtcacaggtgaagttcgatgctagtcatactctgcattggttggctaaattcacagtctttatttcggtgctttgattgcgagcctaaaattcttattctaaaagctctcaatttccattgtgcatggctgttgcgagatgtgggaattctactgaaccacaagaccctatggtcacggatcctaatgtccaagtgccacctgttgtacctaactcgagcatggctgcccagccaccacatttcaaccagctgcctggtacctctactagagaggtttgaccaagtgaacaacctcctattgggcccactgttcgattaacgactaaagctcctagcactggggttggacctcatgtttatactggttagacttgaccttggtttgcaaccttagtattgattaatcccacatagacctgggcaatgacactgaactttccatgctaagagaggccataagataagttcaaggtcaaatgaatatctttcatcatgaccaacaagaaacatgcgctgctattggtgatgctttctcccaatagatacgcaaattccacgagtggatggatcagcaaatcgcaatcctccaagcccaataggcagagatgaagccccggaatagggaagctaacaacttgattagattgtccaataagagagtttgatctcaggttgaagagccacccctcataagggatcccctttggggaaaacgtccctatgtcttagaggggacccaatgtcctgtggatcatgggtaaacctcacggccaggtggactgactacatcccaaacaaggctgtcatcctatcagtccaatgatggtcagatcttgcctaaaagaccatatgataggactgaccagtttcaaggcttgcctagggacgaagggagaagggaagatctcccaataattcaaagccagagtaggtctcatagtcgtgagtgttaccccgattccaatgaggatagtgccactagtcacccaagtggtgagtgcactaatcgaggaactcaaaatacttggcacaataatgacgttccaccttagaacagtcgaacacattcttacttttgacccacagattatgtgtttgttagaataggcccccatgtaagagtagatctttgagctagcttgaactgaagaagaaatgcttgggatacgtacgtcccaaccctaaaaacttaataaacaagggaagaacgggccaaagttggcaaacctagagagtgtacctttggttaacccaccgcccaagctggtcgggaaagggttggggggacaaaacctagccgaacataggccatttgaagttgatcctatagtgtaggcacaactagattagctcaaaaacatgatacaggcttgtctggccaaaaattgttcgacttagagctggacaggacctgagggtagcttttctctgcacgcatcactgcgctacccttgccaaccaagtttaagatacccacttggaagatttacacaatgaaagattatcccttggctcacatcaaatattttgagatccagattgatttgtaaaatgtggaggttgatacccgttgtagaattttcctggcaaccttgtttgaaattacgcagtagtggtttttcaaactagttgttgggaggtttgattcgtggaactctttcacaagagagttctacacataattctcatcttctaagaaaacaccttataggctagaagacttagttgaagtcaaacagaggctaggggaacctctaaaagactacctccaaagatttatgactgaggctaccaaagttaatagtctgggggaagaaggaacgtcaccgccatcatgagtggcgtactacctttgagtgatttgtggaaggatattcgtcgacactcaactcaaaacatggttgatttccttgatcggggagaaggctttgttaagcttgaagtaactatccgacaagctaaaattgggagacaggcacgtgctagacaggccctgaatgctggcagcccttagtttcgcccaacacacctgccagcatgggtaatgtcggccagccctccaaaagtcaaaataatggaggctagcataacaacaataactacggccgcggaaaacaaaaaagaggaaattcaataaccccctatgccataagactcaaaggagaaggaggagagatttacgtgcttcaccctcctaacataaactcctaaaacagtctacatgaccacacagtctatagttccgtatgggaagccttctcccatgtggaaagacataagtaagagggacacctccaaattttgtcaatttcacaacaattttcgccatggtaccaacgagtgcaagcacttaaagttagaaattgtgctcttaattaggaggaacaatccccatctgcatcactatgtacaagatgaccagacacaggcacaaggtcccaaaataaagacccaatgtcaccacctatggctagtcaattaaggatcatcattggcggaccccatattgcaggtgaaacaaacaaagctatggagcactatgctcggaccctccatcgtgcgcaaaatagtaaaatcctagctgtagaggaaaaagatcccaaatagctaaagcttgaagagcctaccatctcattcatagagggagatgatgcgaaggttagactccctcataatgaccccttcctcataacagcacagatcgggaacatgacagtttccaggttcatgatcgacaatgaagcatcttcaaacatacttttcaagtcaacctatgagaagatgtagcttcagttgacaaatcaagcaccctgtgcacatctaatgtaagggttcttttgccaaggccttttgcccttgggatacatctgattatctttgatagttggagaaagtcccatgacaagaacaatgaatggtcaattcatagtgattgatgtgacataattgttcaatgtaatgattggtcggccagccctatacgaactgaaagttgtgacatcaatttatcacctatgcttaaacatttcctgacaaggcatagggtagggttcctaaggggagattaagagactgctcgacacttgtacaatttacctttgtccaaagccaaaaaataaaaaagttcctaccaagagctctagcaatgagtctcaccaagggcaatgaagttcagcccaaaggaaggaggcaaacttagatcctcgctttagggatttagtagaaagatttggacatgtagaggaattagaagaagtagagattgatccaaatcttttgaccaaaaaattgacaattggaaaaggtttagtgcgagaaataaaataaccattgataaaaattttaagagaaaacctcgacatctttgcttggtcgcatggagatggtgggactcaatccatccataatttctcatgccttgaacatatatccaaacttctgacctatacagtagaaaaggaggttaatggataaaaagcgagcacaagctctaaaagatgaagttaaaaagttaactgccaatgacttcatgattgaagctttctacccgctctgggtttccaatcctatctttgtagccaaactaaatagtaagtggcgagtatccatagattttcttgacctgaacaagtcttgtccaaatgacagtttcccaattccaaggatcaactagctattagatgctacaactagtcatgaaatcctaagcttcatggatgcctattcaggttataatcaaatcaaaatccatccacctgacaagaacatacaagttccttgacagatgtaggcctatctgctacaaagtcatgacttttgtacttaaaaacataggggctacttatcaaaggcttgtaaataaaatgctcaaggacctgatctgtcataacatagaagtctatctgaaaggcatgttgtcaagtccaaaaaggttaggggcatataaacgacataaatagatgtttcaagatagtttgagagtacatcatgaaactcaatcccctgaagtgttctttcggagtaggcttaggcaagttacttggcttcatagtgaatgcatgggaagtagaagctaacccatatatagaagatccaagcccttttaaacatgaagtctcccacaaaaataaaataggtgcatctaacaccctaactaacataggcatattacgtgatt

SEQ ID NO: 381442 - DNA, 2292 bp, Cannabis indica
aagtagtagttttttgtagtggtaccacgtaccaacacaataacgcaatcttaaaaatttagaaaaaccttaaaaaaaattataaaatcaaagataaaagcaatgtaaattactaaaactattacagattacatttatactttaatggacgttgagattcaacgatttctcaaccaaaagtggtggccgaagctacaatcaccacaactaccacctctaagttctgtttaccctataaaacaaaacaaaagaaggtcaaactctagggatatatttttaggtatgaaaaatgtaagatttaaaaaaatgggtgaaaacggatgaaaaatagagaaatagaggattggaggcggtggttgggcgagagtttcataaaggggctgcgagttattttgtttggggagaagacaaagtgaggaagacgaatggctaaatagggttacataaacactatgtcattggttattttataataaccgccgctataagggacatgcgtcagccaatgcgtgcctttatagcgttggttattacaaaataaccgacgccatatgtagtgttattaaaaatttaacaccctatagtgttggttattttgtaacatttgatactgttggatatttttattcaaattttatttagtcatactctatggcatcaattgtttattactaagctgaaaaaaaatgcttctaagtgcaaaatttttatactttttttttttcccacaactacagcaaaagaaatataaatatataactaaagaaaaatgtcaagggtcccccaaccccatgtagatccaccagtagctacacaaaagtgttcaagaacaaaactctacaaaactcacaattcaatagaaaagcaactatatatagtagcctaaatctaaaatatgaaaagtttagacacagtacaacaaactatacaacgtttatttactccacaaatttggagttatatcatggctaaaactttttgtttaattcattgattcatgtaggtcagttactatacaagaaaagttcaaaactcgacaaagcttataattcaataaaaaaaaaaactagttatgtaagtttaaaatatttaagtttagacaacactacaactaagctacataaaatgttttaattcatttatttatagagaagacatgactcaaacttttatttaatttattgtttatagagaagacgtgaataattagttttaagtattttgctatgagatccaaccgtccaggatggtagaatacaagttaaaatacgtaaaatactgttgccctagaaattataaatgtagatggaatcacgtggctgctaggtcagagtgtctgtactatatttgtttgttttgaacaatgatcctctggtcaatatggctatatatgaagctgacattactgtgcatatctctctctctgtctttcccttaagaaaaaaagaaaagaaaagaaaaggaaagctgaaattgtaagtgacttatttcctaatgtaataaaaacaaaatctgatttgtgggtaaaatggtggggaaccctagaagatcccgtcatgatctgccacacaacattttatttttgataatgaatacacaattaattaaaggggaaaagtggttttaattgttttaaaaatatgcattattggagattctagaagtctatgcgtttttaaaatagatagaccactcactagacatcactgctactaaactaattttacataattttgtagttaaacaaaaaccattggatatgcgatcctaatatattagtgaagaaatcaatagaaataaaatatagggattttttcaaaactatacataaatataaaataattacaaaaataacttaataaatctcaattacaataatatattgccacatcattaaaaagataccttaattcctaaataatatgccggaataaaactaatcccgaaattctattttttttattattttcctgcgttttaaaagtaacatttttgttacttatgatgttgataataaacgcataagtaactttttcataaacaaataatacttttatattatataatttgagatatattttggttacctctaaaatttacctgtatacactttcataatcaattaattttaagattatattaatacatttgagtaacttttaagtttattttcgaaagtaatgagttatcatccagtaagttaccattttaataaattgtattttaaaaaaatatatatcatgaatgtttaagtcactcatattttttaaatgtaaattaatatatgcattt

SEQ ID NO: 381443 - DNA, 2651 bp, Cannabis indica
gagtttgtattgtttattgatttaatgaagttcttcttgttgataaaaaaaatgctgaagttacacaacacaccacatgagttacatttgactaactcagtataggttttattactttgtagcaaattgatgcaaatgaatgacttatatttatatttattcattttaggtaaaagagatcatgaatatataaagttttaaatttcatgtaaaaatgtgatgatcaattattcatgctataataacccagcaatcacgttaattagtatattaaaggattgtacaatatttgatgatacagaaaaactaagaattcaaaaatatattcactacctatctatacatatataatacaatatagaaaatctttaaaacttgtacgtatgttttgaaaccataaaaaagaaaagtaaagaaaagaaattacaagcaccgacccatcaaatattataccatgcacgtgtacacttaattatctaatcaagtaactctcataactaatatccctatatattgttattatttttgttttctttaaataaagaatcaacaaaggtgtaaaataataatgataataataataaatgaaagggagagaggtttctgaattggccaacctcacgtgccatgaaaagcagaaaggtattatatagtaagaaataaagaaactcacgtgcaagggatccaaggggaaggccaagaccagactttctttcttttcttttctgttcttttttttttttcttttgttttgtaaatactaaccctaaaaactactgtttctactgccatattgcagtgtccaaaagctaggtaaagtggcccgggttgtgtcttgggactgaccaaatattccattttttgttcattagagcagaactaattgtaaggcttggtcaacggtcaaagatccacaaagctgacgtggcagctggttagaagaacaaacagagggttggtcagcgagtgagccgcacgaggggatcccccctctctctgctcagactcagtcccacattgctgtgttttttttttttgagttatctaacttcatttcacaagtggcctatttttaattttttatatataggttagatacaccttattttaaagggctagactctagaccacgtgcaaagcttttcttcccagaaaaataaactagaaagattggttttggttgtggtgattgcctttgttcaagctcattgtgaagtctcacatagctggagagtttatctattaccatagtttctttttttctttaatgcagaatcttcaatcaatggttatgattattttttataataaggttaattaggatttttgctccctgaaatttgacatgtaccaaatcatactttctgaacttgtaaggttgttaaaagtgttccatgaactattgagattgttggatttaaggactttttttcaactttagtaaaaaaagtataacatgaatgaaagttcaggggcataatttagtaaatgtcaaagtgcgaggtacatgatttagtatatatcaaagtcttaggagtatagtttagtacataaacaactactgaaatagtaaaattgaatgaaattagacaaaagtccttaaatccaacaatttcaatagtttatgagtatttttaactaccttaaaatataaagagtatgatttgttacatgtcaaacttcaggagtcaaaaatctaattagtcttagaataataaatgaatggtgtcgatttattttcattcaatcaatgatcatgtagtagaccccacaaaattccagagctagttagttggttctccatacatacagattacagagtacagtttaaatttcatgactatatctgtttcgttttttgttttaaatggcgccaaaacaaactatgggtgtgggacaaatatttgtttaaatatatgtgaattaggacaggaccactttgcacatacattagtcaaatcaagctaccgttagagcattccccatgaaatagctaggaggaggtaaaaaagaatagctaaagattaaaacttcttttccaataaatgaaataagcttaaaagatttttgagctatttacttaaaacattgttaactatttactctattttttaaaataacttatcaaaattttatttttttaattttacctcacacttttacattacactatcaagttctctatatttttacctacatcattaaaataatatatttttaatacattaatcatatataaattaataaaaatattatattatatgaaattataaagagttaataaacttaaataaagtagtaataaaacaaataaaaaaaattaagcccaatctctctccataactacacatagaaatgtattttattgaagtttgtgcaaatatattataactaagttataaaaaaaatgatggaatggttaaaataagtttttagccaaaaattttagctattacctattatgaagacaccgaagtgctcttagcttcctttcaaaaaaaaaaaagggggttacaatagctaaatgtagctacaaactattcatgagctaaaatatttatttttatttataattattttctagaatattaatttattaaaagtttagtaagatataatattaaaaatgatgtagagaaaaaatatagagt

SEQ ID NO: 381444 - DNA, 9400 bp, Cannabis indica
taattgtatttgagttgtttaggtaattaatcacttgaagctaattaaattaagtggccataaaaaaatataaaggtacttgtgtagaggaagtacttagatcaaatctcaagtactgtgtaattgaaagtaggtttaaaatatttctttaatttaaaaaataaaagagtagtctaaaaaaatatagtcacattgtagtttgaattcatatggaagaatcagtagttttaagattttgattagctataattaagtataacatgatagttaattaacaaattaataattgttatttaaatacagagttgagtaatattttttgttgtttaaatgaattgttaggttggtgattgatattccaggaagtacaggaccaagtttcggtaagtacgtacgtaatatgtagtataggtagtaggttttaattagtagtagttaattaatgttaaatagtattgaatattgaatataggagaagaggtggtgtgctatgagaatccaaggccaagtatgggaattcataggtttgtgtttgtgttgtttaaacaattgggaaggcagacagtgtatgcaccaggatggcgtcaaaatttcaacaccagagattttgctgagctttacaaccttggtgcccctgttgctgctctctatttcaactgccagagggaaactggctctggtggaaggagaccttccaactaattaactaatcaattcattattaataacctcactactattatatatacatatatatattcagaataagctacctttgccatgtaatgtaacagtgtgtgtgtgtgcatgctttattaatctttgtctacatatttaacaataatattcagctttcaagttcaacttcacgtatcaaaataatattattttacaaaaattacacaattcaactaatttagtattacaaacatttataaaataatgaaaataaattaattaataatatatatatatatatatataaatctcataactttatgatgataattttgagtgctaaaatttatctctttagcctttaatgtcaaggcttgtagattttcctaacacaattaacttttgttatcatgatcattaacctcactatatatgataaattcacaaatgtgtatatatatatacattgagacataggcctgcatccattttctaaggctttttattttaaagaaaatgcctacttttttttccttttctattcttaaatttaatattcattatttttttaagacctaattttaaatttttactcaagacctcgaaatgtttgggccaccctgcattgagaataagctagctacttgtataagaatgtgtttctatctttataatattcttctttattatttttcatttgagaagctactaagtgtcagtgacacctaacacagtttaataattattataaaatattgttaattattaaggatgcacacggggtagaaaattgacagggagtgctccccctgtcctcattctcgttaagaattttaatctctatcccggcttatttcccatcggggatggagcgaggaatcccttaatgggagcaaagacagggcaaaaaatcccctaatagaaaaataaaatttttaatatacaaaaatattaaactacgtaaaaattaaaatattacacattaattattatccaaaacacaacttaaaattcataaaaaggatactaatatattaaaaaaatataaacataaattataaaatattactaaaattataagataaaatactaaatgggtccctgtcgggggctgggagtgtcatccccgttcccacctcatttaacattcagggacaaaatgtaatctacatatccttgccttgttccccatttagacggggaaatccccgtcccattaagggcaggtccccgtggaaccccatctccatgaaagaaatgtacatctctactaactattaaagtaccaccaataaatggtattagacatcattagtacttaataacaatgttatttaaatttagttggcttctcacaaaactaaaaagctaaaaataactatactccaatttagtgttgtaaatatgaactgaactttttgatatgacataaaattggtacgatctcgtaaggcacgagtacgaaaaaatatgagtttgcgcacaacacgagaagatgctataaattggcacgacacaacacaaaatatatacgattaaacatgacacgacacgagaaacacacgtaaaaatatactatagaaaggcacaataagtgacaagcccgaaaagtatgatacgaaaacgttaaaaaactctataaattaatattataatactaatatatatatgtattgactaattataaataaattaaaataataataaaacttaaacataagattgaatattataattttataacttaaattattaaaaaatataaaactaaaattatatattaatttatttgtagagtgtgatataaaaaattaagtatataactaaatatacatgttataataatttgttatttttatataagtgtcgtaaaataaaatattattaaaaaattacataaatataattaaaactaaaaaatatacatataatttagtaattaatttattctttataaaatgaacataaaaaagtaaactacgaattggagtccaaatacgaaaaacgagttgtaaatggcacaatatgatacaacccatattttttttaagacacactacactacacaacctgtattttaaaaagtacaaaataatatatgccaatccaccacaacacgcacgaatttacaccactactccgatccaacttatgtaaaatttcactcaaaatagaaaaattatagagtggttctataatgcacacccttaaaagagatgcactaatacactctctacttatttcagtatctagaaaaaaattaatctatttttttcttttcatattcgtgtacgttataattatttaagatattttataaaattttgagaaattaaaaataatttacaatataaaaagcagtattcaaataatatatttcacatacatataaaaaaaaataatcacgcgtgtaacatactatttaaactctgtttttggtatttttttttttaaatttcttaaaatcttgtaaaatattttacataactataacatacatgaccatacaaaaaaaattgactaaaaaattattttggataccaaaataaataagaataatcttttcttttttgaaggaggtgcaaattttccaaaattataatttttatagagtttgtgactgaaacgacctgtgtccaaacaaatgacaggtgtcactcttacgaaacgacacatcgtttccattcattttcttccctgtcgtttattcatttcgaatcgaaacgacacgtcgttttattcttcggtattagcccgcgcgaaatcccaaaaagaattctcctttttgagactctaacagccaaacccaccatttccactggcgggaaatataaccccaaaatatcatatttttacagaacaagaaacccatttccctccaaacccttcaaaacccatcctccaatcttcttcctttccgagctctgagattctcagattcagacccttttgagctctgcttgatattcttttttttttctttttcgaaatggaggttgtaatcgatggaaatgacggtgatatccagaagaaatttgacggtcaagatcgaccgaagaagacccagaagcggaaaagggttagtttggccacagagaagctgggtaaggaggaaaaagaggcaaaggtcgaagctttgcggatggagcttgatgggttgtttgggtattacaaggaagtattgggtcagagacagattggggttttggatctaaatttgtgtcgtaatggtgtgaatgctgttgttgcgtcgttaatggaggagagagatctccctctgtctaaactcgtggatgagatctactctcgggttaagagccttaatgaagctgtttttgagggtttaacggtggcgactgtgaagagtactgtgctgtttgttggtcagaggatgatgtacggcgttcctaatgccgatgctgatgtgttggaagaccagtctgagtcctgtctttggtgttgggaggtaaattttttgttaatggtgttatcttcttaattgggtagatttagattgttcataatgttaatttttaagaagtaaattaatgattttttgttattgcttagacaagggatcttaagctgatgccacaatctgtgcgtggagtgttgacaattaggcggacttgtcgaaaaagaatccatgagagaataactgctgtttctggtatgtttgcttaatttttggttaagctattgttttgattcttattactttttagagtttgaattatggtttagcttgaaaataatgattagaacattctgattttgagattgtttgtgcatttcaattatagaattttttttttttttaatattgtgtgctcctaaactgatttggttgttgtgttttgggtctttcagaaatgattgtggctttacagaaatccgaggaagatcagaattgcaaaactgagctaagaaaggctttggagaagcttggtaaagcttgcaatgaggctgaaattcggttgttggttaatggcatgatggaaaaaagtggtgcagacctgtaagtgtctttggtcacacttttgcttgtgagttgtgctgtttgtttttcttttttctgatttggtttttatctacaatttttatagggctggcaaggaagcaaaacgagaagaaaaaatgctaatcaagcaactggagagagagaagaaggaggctgaaaaagagaagaaaagattggagaaagagcttttgaaggagaaattgcataatgtgagtgcagctttatggttgtgtcgttgttttaaataggtttcatgggcggttgaagtgatgccattctcgattaaaatgaattcgtgctgtgtacaaacttttctgattactttcaattgttatgatctttttgaatgattcaggaaaaggagcaaaagcggctgcaagaggaggcagagaaggatgagaagcgtcgtgaaagggaagaattagagatgaagaaacagttgaagaagcagcaagaagaagctgagaaagaccaaaaacgtcgggagagggaagaagctgagctgaaaaagcaacttgctatacagaagcaagcttctattatggagcgttttctcaagaaaagcaaaataagtccattgcaagctgaaaaatcttctcctaaaatagcaactgctgtagtaacattggatgaaaagattgaaaaagtccccgaggcagtaacccagttaatggattgtaccctttccttaaaggaagatgttaacattgatgaattatgcaagtaagttaatttattcttactcaaaattgatttattttcagtttcagattataacggtcgttcattctttgcaggctacacttttcttcttggcgccgcttaggcgatttgattcgttcaaatagaaaccaacattggggtttacgtcaaaagcctaaggctgaactagttaaagaacttaagctcaccacctcaactagaccgcatattgtggtgttagatgagtcaaatgaagagaaactggaaattgggtgcggagaatgtgtttctgatgacagattatgtcagctcaatgcaagttgttctctttctgatgtcaagaagttcattaggagaaagcagttgttacaatttgacaagagccacaggccagcattttatggtatatggcccagtaaaaggtgagttttgttttgtccataactttaagctgtttaaaactttccattttttaaactttttttttgtctgtactctccaattagaggattatctgtaagactgtaacattaccatcttcttattttttttaatgtgtatttatagttgtgttgttggaccacgacaccctcttacaaaggacccagaattggattatgacatagacagtgatgaagagtgggaggaggtaatgttttgttgtatctttttttctattatttttctggtaattttctttaccaacatgtttgtgttgcgacagggagtaataggaaactagtgggaattgatgactaacaagtgagtgagcgtgagttggtgttggggctgttagtaataaaagggagaggaagtaagttagagaggtaggcggaaattgggtgagaacaaaggagagaccaggctctcaagttcctggaggggttctctttattctctttgtatcgcttctgtttgctggttttgggggctgttggcttatggttcaattggtaacatatcagtttgttgatatatagcataggtttctgatgttttataaatgtgttattcaggaggatcctggggaaagcctttcagattgtgaaaaagatgatgatgccgaaagtttagagggatgctccaaaactgaggatggagatgatagcgaggatgagtttttcgtacctgatggttatctttcagataatgaggtgagaaattttgatgtccattatgctttaatgtgtatgctaaaccctaaaacagtcttgagctgttgtataacgtactccctgataattcttctccaattccatttatacacgcttttgtatcttgcttgaactatatgtccaactaaactaactgtgtacctttagttgtggttataacttatatatcacatggataaatgacaccattaagctagtctcattctctgatcaaatgggactaatatcttcccattgttcaaatgtattctaaagttctgtcttcagagttattcagtaatttccgtacaaatctcagcttctataacaaccttttgttgtgtactcagggagttcaagtggacaggatggaaattgatgccacaggtgatgaggataaaggctcacctggtttagaaaatgaggaatttcgtgctttgcttcggcagcaaaagtatttgagcaatttgactgatcatgctctccggaaaaatcagcctttgattattaccaacttgatgcatgagaaaaactcgttgttaactgctgaagatctcactggtacacctaggatggaacaaatgtgcttgcaagtccttagtttgcgattatttcctggtggttcacctgtagagatctctcttgagaatgcggaagacaacgatctagaagcttctccctcaagtggcaagggaagaacaacaccaacgccaactgtggttgccttatcagattccgatatgcgtacatttgtaagtttcatattatcctagattttcgaactagaaacccctattcctaggatgagcttgtgaaatattcgtatagtggaattgtaacttataggatgaaccattgtaagcctctttatgaccactgaagtgctgactacttatgaaaaatttcaggtgtctactattcagtcgtgctcgcagggtatctttaaattagtggaacttttgcagcagaagttcccttcttcctcaaagactcagttaaggaataaagtgcgtgagatatctgaattcatggataatcactggcaggttagagacttgcttctgaaagttgtgttattttctgtttcatgtaatttcatattgtgatgaaagactcacgcaatcaatgattgattagtaaagatttgtacatgaacataatcttgtttcttgtatatatacaaatatgtttcaacctcagtgctttgagtgtttgattaatattttgtttgctttctaaatggtcccaggtgaagaaagaagtgttgaacaaacttgggttatcaccaggttagtgtcatttatgagattaagctattgtcactatctgaaacatttagtctccatgcattttttgactaatgaatttaactttgtctaatcaacagaagaaaagagtaccagaaggaccaaaagcattgccacttttttctcgaaaaggtgtttgccacctgctggtaaagtcgtcaacccaagcgaaacctcgcctcaggcgactctgaaaacaaatttcgccgtggaggaggggcatcagagttgcacatagaagaagaagatggagtccagtccaccaacaccaagttctggtaataaaagatgatataaatatacctctgccccttttgtattattaccaaatgtcacattttggatgtgcagaggacataacatgacactccaaatcaaagtgtgaaagtgtgattgctattttttgaatgaaaagatgataaaagttgtaatagagaataggtatggggggtgatatttgcagtcgagtctagtagtgtgctgttattttcttttttatatcaatgacatgaaagtggttcaacttttagagtgatggggttttcttaccatggaagaaaagtctatttctttagttttctattactttacttctgtatggtccacacctaatgttcagctataaatgttgaatgagaggaataagagtctataaagagtaataattactacccagaaatggttgccctgtgtttttagtgcaattaagtaatgtttgaaattcacaaatgacttgtaactttaattgttataatgtatttagagtaccaacccaaagtcggtcattattattggattctattctataactaaacataatatagttcttagtcaccatgtgatataattagtctattgtttcattaatattgtctctgtcatctattatttactactaatttttgtaaaacctaccaatctatcaaaataatgaatatgaatgtctttttctcctattgacttggttttggagtataatatctatcattcctttcactcttcattccatcaccatactatttatacatagataatatactgtgttttgtaaaaattactggttataaattaaattttttattttctaaaagagtactaaaaagtaatttaaagtgatttttttcaaaaaaaaaatataataataatttgatttagttagacttattgtaacaaaattggttaaattaaaaattatttttaagtatattatattaaaaaaattgtctaaaattaagttcagattttattgatactattttaaaaattacagggcttaatttctcatttaacaaattagaggattcaatcgataacttttataaaatattgatctaaaatataagtattaactcctatttatatttagagaattgttaaaaggtactaatgatggtacttaatactcttatcatactgttattggtataattaagtatcaattctcatgtaacttttaaaaaatattgctaactaattatgagattccacctataaaaagtgttagaaccatatataagcatgttagataggttgtgcaa

SEQ ID NO: 381445 - DNA, 6301 bp, Cannabis indica
attatttattttttattaaaactgaaaacaggcctgcttaattcaatccaatgaaaaaccaattaatgcattcaatggttggaacagatccaatattagattggatcggatgactcaattcgattggattcgatcggatgacaaaattcaatatccaataaataattgaattagatcagttaagcccaaatctattgaatgtgatctaatgaacacccaaggtttggaaacacctaagcttatcccctctctctcgttgaattcatgtagtattagtataccgaccctaatttgaaaatcaaacaaaataaatgaattctattgagttaagtcagaaacaaaaaccctccatcaaaccaagtcttttgtgtctttcttagtgtcctaaatccaactgatccaaagataatctctctgcatgagagtgttgggcttttccaactggggatttttctcttaacactcctttggtttcaatcctgaactccaagtttctttatactttctacactattgtttctcttttgtggtcagtggttggggagtttgtttgtctagtattggcttctctttttcctagttcttgggggtttaggagtgagtttgttggaagtttgtgttttgtcttttggggatatatttttgtttccgtctacaattgcatggcgcaatcttcatcaaaagtggtgggtgagggccctccaccaatctaatgatattcccatgatggaagaacatgaggttagtaacagtcttaatgatagcattaatggtcacctagtttcaccacttaaagagggtcagcaagctggtggctcttgtggtgacgggcaagtcaacaaggaactagaagtggagaatctacgtaatgatttcctccaatctatgtctctcgagttggaacctgattttgagattaatgaggagatttatagaaccggagtgttagcttggttttttgacgggaagggagtgtccagaaaccgtctcaaagagaatctctctgaaatttggaagaagttgaaaggtaattggaaattcaaaacaatgaagcctggatattggggtattttttttgacctggaagatgactgtgttgaagtcttggagaggaggccatggcttattaacggtaaacttctcattgtcagagaatggccagatgatggtctttggtacaacgttgattggggaaaggccattttctgggtacaagctactggtttaccaaccccttttttaaacttggtgaatgcacctagaattgcagctaaggctggtgtgtttaagggatctgatgtagtcgaccaaagaactaccttgagaagaggctttctaaaattccaagtggagatttccactagacatcaattatcggcggggttttttcttgatatcaaaagaggtagaaaagaatggatccaattcaattattacaagctacctaaagtttgttttaactgtggatatttgggtcatgacaagagttcttgccaaagaccactttttatgcttatccgccagaggggaaagcagttcctgcatatgggccttggatttgagctgaatcggcggtaatcagctgtttcaacactataaaccagttagattggtttagaaaggaaggaatgatgggtccctcgaagccatcccagtcgttatcggagaagaggaggttccaggtggcggtagatgaggtctccggcaagggtaaggccccaatctcttgtaatccaatagaggtttcgaggcaaaatccctttgggaagccaatgaagaaagtcgtcagggttcagagcaattcaccagggaccaattcaaggaaaaatttgtaagttgtggacgctgtttcttctgaacctatgggctttgacctggggaagaataagaccgttccttcgccttttcagaagccatttcaggataaacaagcaaggtcagtctctcctggggctctccatagtctaaatcggagaaaaactgatgctgagcgtgaaaaagaaattttaaaaaaaatctcatcacgtccttgtcccaaccctagagacaacgggatcctaaccactataatggccaacattgggcctacttatgaacagatcattgaaggcacacatgtaaacctttgtaaatcaaggcaacctcatatgcatcctgagcccacttactttccctggccctctgatgcaaatgaaactggtttggctgaaaactaatgggcccttctgaagttgatacttttgagcccatccaacctttgtttcacgaccctcctgatgtatcagatcaagtccacttctgcccccaggctcgtaagagaaaagcagctttaacgctaattccttacgtccttatgacctctgagaattcgcgcaaattttttccaaggttcctgatcttttcttcgaaattggaagactcttctttcaaagctggggacctgcttgcttcttctttgtcttcaaagaaacagggcaaaaggaagagagttagttcgaggctttcgtctcgacttaaagcggcttccatggctaagatggagaagtcagtagaacaagctacaagtgatggggtggtaagaaacttaactgatgatttgaatttggttgaagggcaagttgaaagtgagcaaaattttctgtcgggcgaggaggcggccctaaccaagccccttagtcccaatgagggtattttcttggaatttccgtggtctcgcgagagactcagcaatccaggccttaatggtttgggtggggagatacataccagactgtatctttctaatagaaactaaagtggctagaagtcgaatggaatttgttgctagaaagttgggtttttataattgtgattgtattgaggcaaaaggaattgttgggggtttctgttttatgtggaaggtggatattaaagtctgtctgctagataaaggagagtctttttttttgaatttgacatttgggataatcaagttgagaaatggtggaaccttattgctgtctatgggccaccctatgagagtgaaaaggagagattctggaggttcttaggtgatagaagctcttcctggaatccatcatggcttctaattggagatcttaattgtcttgcttcaaaagaggataagcttgggggtaagagggtgtcctggaaagaattaaaagtttttgaagaatttttagacgtaactggtggtgtagatctttggtttaagaggtgtaagtatacctggcagaataacagggctggaagaggtcttattagagaaagaattgatagggcagtgggctctcctcattggtttgctgaatttccgcgagcaggggtgagaaatctccctattacagcttctgatcacggtcttattttactggatactttgttgtatcaagccagaggtttcattcccttcagattttttgaagcttggtctgctatggagtcgtgtggcaaggttattgcgaataattagcctcggtcttctcataatcctgccactagatttcttaagaatgcagattttgtgcgaatagccttatcgagatggaggaaggacaaattcggagacgttaattgtgctatatctaatatggaaaaccgtctgacttggattcagagtcaagttcctaatcaagtcttggaagaggaagaactgacagaagcctggagtttgaaagaaagtatgcattgtcagcaatcgagggagctttggctaaaattgggagatcataattctaaattttccatgcttcaacggtcattcgcaaaagacgtaatcagatttgttacttgcaagatgagaatgggagaatatgggaagatcggaggcatatggcaggtatcatcaataattattttaacaagcttttttccacttctaatccctgcattccctcggacttcgacgagatgttcggaatcaaaattgatgtgagggagaatgaacagattggtagagttcctctgataaagagatttttaaagtagtaaccaatatgcatcccctcaaggccccgggacccaatgggttttcgggatgtttcttcgtaagtactggaaggtagttggcagcgattttttctctatggtcaaggaatttttcaccacgggttctttgtgcagtaaattcaattattccttcatttgcttgatcccaaaagttgagaatcctgataaagttgagcagttccagcccattagcttgtgtaattttctgtataaggtcattgcgaagatcatatccaaccgtcttaggcctttaatggacaagttagtctctccagttcaatctgcgtttattccaggccgttggattgttgaatcctccatcttaacacaagaaattattcacaagattaaattgaagagaggagctggtggtctaatggctattaaattggatatgcacaaagcctacgacagattggaatggagttttctcttgagagtgttacgagcaaattgctttagcaactgggtgtgtaatctcatcatgcagtgtgtgacttcggttacttactctgtcctcttgaatggtagtcctatcaagaagattacgccttagcgtggcttaagacaaggagatcctttgtctcccttccttttcatcttatgccaagaagttttatcgaagattcttcagaagtcggagtgttcaggaagtactcatggaactaaaattgctaggaatgctcctgctatttcgcatctcatgttcaccgatgacacaatccttttcgctcgggcaaatgaaagagaagctgaggaattaatgaagtgtcttgctgtttatgagaagtggtcccgtcagacctgtagtaaaaataaatcttcggtattattttcaaaaaatatagatcagaatcggagatcctccatcctgagacatcttaaagtttctgaagttagtgatgagaaaagacatctcggtaatccatttgtctttaaaagaaggaaaagggtggaatatgagaggctcaaacggaacatgatgaggagaatagaaggatggaagatgaaaacgttatcatacgcggggaggcttactctgattaagtcagtatcgtcttcaatgccaatttacgccatgtcaaccaacagaattccagttaccacttgcagagaactagatgcaattatgagaaagttttggtggcttggaagtaatgagaaggatcgctttatggctctgcgttcctgggacaaaatttgccagcctaagtcctcgggtggactggggttaaggaggtttgaagatgttaatgtagccttattggctaagttgggttggtttttagcttgtaaggcggataaactttgggttcagtgccttcttgagaagtactgtcgctatgagaatttctggagcatccggccgaaagagagtgatttagttttatggaagagtatcttgtcttctagaaatattatccaatgggggtccttatccttagctggttcgggtgatcttattgatttctggcaccagccttggatcccgtggctcaactcagcggagttcttggctactatggagagtgtgagagaccctcgatttactgttaggactattgctgatgtctcaaatggtaataactggaatgaggagattattttgtagatttttggagaagctcttgggagtagaattttgtcaattcctcgaatccctgaacctcatcctgatagagtggtttggaagatgagaaagcatggttgcttctctgttaaggatgcctatgctcttgatcagggggacaggtttggagattgtagggagttgtggaagtggatttgtgacccctcggtgcacccaagattgtccttaactttgtggagagttttggttgatgctcttcctactgctgctagactttctgcttttaccaggtttggatgtgtcttctgtgactctaaggtagaagattgcaaccatctctttaagaattgtgctttggccaagctatttggtttgctggcaggttccctatggcggtagaccagatgaatttcgccactttgtttgagttttttgactatgttttgtctccactgacttcagatctcagaagggaagtcgttatttacttcggctgtattctccaatcgatctggaaacataacaactgagtctcttatcaaggttgcacggctgatgtgaatatggtcattaatgagattgcctcctcattccaagaattctctgtgtttaggggtaaaactcatactcttaatgattttgagttcaccctagtgttgggttttatgccctacataagactcatttcaatataatcagatt

SEQ ID NO: 381446 - DNA, 2030 bp, Cannabis indica
tcctccaaaacaatggacattgttggatgactctttactctcctccaatcggctgacctaaagccccctgagaggagagggtcctttgttaatttctgtataatttgagacatacctcatccgcctcctaattatagtaccaatatttttttcaaggcatgtctacactattgttataactaaatgtggtgtaataaattttattgactataatataattatacaataatattattattagataaatatgattaattaaaacataattaggtatctaatctttccttaatcatcactggaaacccacctttcattttagaagttaaataagccatgaaaaccggttcaacaccttcttccaccgccgaaaccacctcgaaccgccgcataactccggccacaaccctcttcatctgcaagaacgccatttccttccccaaacagatcctcggccccgcctgaaaaaccggataactgtacggatctctccctacaaacctccacttctccgccttctcctcccactccagccaccgctccggcctgtactccgcccaatcctttccccaaatcgattccattctccccatcgcataaggatggtaagtaaccttctctccctttctcaccgctgtaccgcacggcaaaacgtcgtcgtttctgacttctttgctgtccgacggtaccggcgggtaaagcctcatgctctcgcagatcgccgcctgtgtgtaaaccatttcctttgtttcttcgtaagccgagcccgatagtttggaaatctcctttaaaatctcgcgctctatacgcgggtttttcgagatgagatagaagaaccaggtgagtgcggcggaggttgtgtctcgtccagcgagaatgaagcttatcacgatatcagttacaaatttctcgtctgagtgacctgtgcttaaaaatctcgagagaagatcgactgattcgagcgacgatttctcagcgagttctttgtttttctctttaattacagtcatggcgaaatttctcacttctgaaacaaacacagctagatctcgctgagatccgattccgataaaccgcttaatcttccaaagtaaaggaatcaaagccacagatcgttctccgctgatcttcgtcgcttcatcgaaagccaccgcgaacttcgattccggcagagaaggtaacaaatacgccggatcgtaaccaaaagcgattttacatatattatcgaaagcgaaacgctggagtagatcttgaaggtcgagaatcttaccgtttccggagcccccgtctgcggcggcggagagaataggtaagaggcggtcattgagttcggagtcgactacggtttcaacgaacttacgtaacgacttgttgttgaattcgtagcttgagatctggcgctggaacttccaactctttccatcggcgcagaagattccgtcgccgagaaaatcggtgaggttgacgcggatggattcgcctttttggtaattggagaagtttgagctgagaatgtggcggacgacgtcgggattggcggtgatgatctggcgagggccgatgaggtggttgattacgaaggtagcggtgggtgagttctggagtagctcagtgaaccattcgaggcggcggtgtttgttagctgaggcggcgaagtatgttccgaagattgggtaggatttggggagttgagttgaagaagaagaaggtttaatggagtttttggatttatggcggagaatgaagattagggtaatgaggatgacgaagattaaaggtagtatttgagaaaccgccattttcattttcagttaattcagttgactactctcactctgttcactctgctctctctctctctcgtttcgttttatatatatccatgcgaaaagcgtgttctgtggttgtggatgtgccacgttgctattttttaattggatgaaagatattttagagctgacgtgttaagttttaagaaagaaatgatgtgttatttttttaattttattttatataggagccaaatcttctgt

SEQ ID NO: 381447 - DNA, 2342 bp, Cannabis indica
ctgtaaatgaaatacaaaaatctctatatttgctacattaatatatatgtattatgtgataataatatgttgaaaacctaaatatgaagggaaactagaagggtcttcagggaatgtggtgtcttgtctcttcggtctcgtgaggcagaagattgaaggcagatgatttggcgagtgcaaaaccatgacaagtttcttgaaggtaacatcaagatgggctcgacccattttgtcttcaatgacggtcccactaatgggtcttgaatgttgatttggagtccacatgtccaatgccagaaatgcaaataatatttatcccctagcttctagaagttgtgtatggtggaagcttgcaccactctctcaatttggacatgtggaaattgaagattggaatagtgatatttcaaatgccactcgactatgaaagctggcttctgtctgtgacgatgatgtgtccatgcatcaatcgtgtgtgtgtgataaggcacaaccatcgaggagtcctcttccagaaacagcttattttgacgtctattaaatttttggcatgaaaattgaaaaagagtatttttatcattgtatcacaaattgattctagaatgcattaaatactaggatatgcatagatcattggactccccgatcattggatggaaattgtgtttctagagagaagatcgtggccatctatatcctcctcacgtggactgcctttttgggtatatatatccctggtaacttcgaattacatattttccttcttttttcaaaattttcaactttcaaggtgtagatgtttccctagaatccccaaaaatccaaattatcttcaaagctaagccttcttcatcaccctagaaagagtcgtggacttttgcctcagtctacttctgaggatcagggcacgagagttcccacatcttccttttctggtgattaagagtgttacattagaagaaattgcaagcctatatttcgatgcagatatcgacacattgatcgcttttgtatcttggctttgtgatcagtgcgatcaacttccccagccaaatccaccaacgatcagcttagcatcttcaatatcattatcaggtgttatctttttgcacatgggttgtatttttagaatttgtcattttgaattgcattggcatggtttatccagggatgagattcggtttttttgattatgtaattgccatcttatgtagatttaggcaccacgaaccagataatcttttaaaatttgcgcataaaaatttctaaagtaaatcgatttgcggtagaagtgctggaaaattcttcctttctccttaaatccttcttgttttgggtttgatgttaatttctatcatctctcttcctgcgttgttcctgacttcctatctgcaattgtttttggatagttagtctagttgggacctctttaagcagtttatgggggaggatcccaactccctttctatgctaggtagttttggtggctaactgcttagattttgttctttttgtacaaaaagtatgcataagcaacctcgtcgagaagaggatgagtcagaggaagaagctatggagcgaagagacacaccctagttggtcctgaatgagagtccttgagaattggaccagaacatcaatatgttcaggaactacaataacctgaggaaatatgagaccttacgagggctcgagaatgttccaggattattctggaataggtctccatacttgaggagaggcccagcaagtgcacaaaaggaggcttcggcatctagagctgggctcacattgaaatgggcgcactgttgggattttatgccctaaataaaacccatttaaatataatctcatttgttatcaatagaagattagaaattatttatgtttacatgtagtttttatgtttatggtttaatgtatacattttctgttaagtccagaacatatagttattcacaattacagtgatgtcaacacagtggaatataagtgtgattatatgcttcaaaagataatgtcccatgattcatcagtgcactagatttacactgatgtgatactcagcgataaagcttacttacaccttaataagtgttatgttctttccaggacatttgcaaagtatgctagtatcggatgtatgcagtatacattggactgggaccgatattgatcttggtaaagatattataatcttatcgttgtatctttctaagtcaatatcacaggttgatcttagatcaaaagatcttaatcctgacatggttttttgttctttaagttgttagtcaaagcctttcatttggttcgagtcacacgtacagcttgggaacatgata

SEQ ID NO: 381448 - DNA, 1800 bp, Cannabis indica
aaaacatgtaagctcaaattctattggtccataaccaaatacacggatcgcaaagacacacactttatatccatagatatgaacctgatccaacggtagatacgcacccaagttctttcttctactcttcgttcctgttttacatatccaatctatacagtattcactcttgcactaaatttcctactttccctcagtgcactcatccatttcaattcgatctctttctttacctgacaaacaagggttttagccatggacactggcggaaagaacaagaagggatctgcaggaggaaggggaagtagtggtcccaagaagaagtccgtctctcggtctgtgaaagccggtcttcaattcccagtcgggagaattggccgatacttgaagaagggaaggtactccaaacgtgttggaagtggagctccggtctacttggccgctgttcttgagtatctagctgctgaggtaattctttcattttgttaatttcgtctcaacttttagggttaagtgttctgattatgttatccgtccaattcattattgaacttagatttgtgggctaatctccaatatttatgtttctttaactaatgcttaatattttgatttttgttgtgaaatcttcaggttcttgagctagctggaaatgcggctagagataacaagaagaatcgggttatcccaaggcatttgttgttggctgtaaggaacgatgtggagcttgggaaattgctttcgggtgtaaccattgctcatggtggggtcttgcctaatatcaacccggttctattaccaaagaagaacgaaaaggctggcaaagagcccaagtctccatctaaagctaccaaatcccccaagaaggcttaatcgctatcgttctcaaccacttccaatttagtttgagacaccttcttttcctcctcttcttgtgtatgtatttctattagaatttcctagtttttgcttatatgctgaaactttgaaagaacgattcaatgactttgtaacctttttatccgtctctgttcattgtgtaatgacatacttttttttgaattcaatcttggaaagatcgattcgatgtaaatgctgtgcaaagtagttttgtatattatcctgggtatcttttacaccgatggatgtatgttctttcgttgtttctacctttatatactcatatgttgttccctatttcttatgaaccttctggcattaggcacctgagatagtaatataagtagtttagtttgagtctttgaagtctgtaattagaatgaaaataggaatatgcaataaaatttaaaatgtataaaagaaattgatacattggaattagtttttttttttctttttaaatggaataattggttgtccaaaacttaggttaatgttaaggcctccgaagttgagctcaaagagaattgattagcctctctatcttgccttttacctagagatttcgaaacctcccatagcaaagcaaaagaagaagggttcgactccaacccacgtaatgcgaggtctgattgggttattggtatcgacccaaatcttttcggtgcattggctgtcttcaaaagcaatgaccctgaatgtcctgcttaggttgaaaaaaaaattaaatgctctcttctttgttttcgatcgccgtttccttgatcatgtgaaggatcaatctttgactgatgtggccatggaggatgggattctatatgccacaccctattgccactaaggtagtttttcaaggattaaggatgagtagatcccacttttttttttatttttattttt

SEQ ID NO: 381449 - DNA, 1692 bp, Cannabis indica
gattcatatgttaatatgcacctgaatttctccttctttctaagatttctgtcaaattttctgtaacaatgtctaaatcttgttttctattagcattaagcttggataggttggcttgtgttcttgtatcaatgtattgctttctaatattcacaatgacactatctgcaaaaccttgcattaattgttcaaacaaacaaacatttgggatagctagtaaagacatagatatagttaatatatgtgcttttaattttttgagagcttataaacacttggaatataattaaagagtttaccaaatccaataaagctataaggccttgtaattttctcaatgagattagaatcgaacttctgaaactctttttgcaaatcttgaagatagtgaaaagctaactttcttggatatgaggaatcggacaaggtaatgatagcaatttcattctcaaccaagtagcttaatatttgtaaaaataaaaaaaaaaaaacacacacaaagaccattacttctcttcctatttataaagctatcttctttaggattatcatgactatgatcaattatgcataaaagtatatggataaacttgaagggtcatataaattagataaatgtaaaatgtagtttcgtgtcttataaaaatagaagaggaactataatgaaacttaaaacatagaagatttaatgcaaattaattaaagaagaaaaaaaagtacttgaagcaatattgatgatcaattcggatggtcatcttggaatgtggcaaagatcctctagatatttctttgagtattaattctccttgttgcttgtaaaataagaagctcttattctcttccttatttacataccttggtccttgtgcaagaggtaacccctctttcactcttcctactattgttaccttcaccatatattaatatgtgtatactttgttatgtgtatacaattttgaaattaatgagatctcttgttacaattggcctcaaatttatctggggttgaaaccacaaggaaagagctttcaaagggcaaagtggcaaaaaaggacttggagaaagaaactttagcgatgcaagttattctttcttttgtttgaaagtttctttaagtttatgtactaaagggctaattcatccaatttcaaagacaatacttcatacttgctcctctcctaaagaaataaacaaataataaagaatggtttaaccgtgtggatgtggtgatagtgtcctaaagttaaagcttacacaataaatagacaagattggcatttaagaagagcttgtaagagttataggcaaaggcaatggagatttatattggcgtattgagacagtcaagcatgcggcgaatcctgacatggccacttctgagctctctatgttatttgtacttattattaagccctcacatcacttgtgaaaatatattctctttctaggatcatcattattagtgtggaacccaagtttacttgcattcacgggtacaaatgccaatcggtaaggcaggacgaaatcgcagaaatttgtcacaaggtgataatactattacaaaatagggaatttttgccagtcaaaagtttgttaaaaactgacgcctatgttgagaatcatggggttccatctcaaaaaccaattggcaatgagtggagtagcccatgttcttatatatggctcaattct

SEQ ID NO: 381450 - DNA, 3586 bp, Cannabis indica
taacccaccggcaccccattggcataggaggtgagaaaaagaaaggaaagggtgtaagtcaattatgtcgtaaataatgttataaaatatttgatagggtaagctgcttaccttattaagttctaatcttctccagacactttataaaaaaaaaatctaaaaaagtacagatttgtaattgatcccttatcttgaaaaccttttcccaggtttcccattacgtgtacaattatttgtaaatcaggaagaaaaaaaaggttcttatttatgttgttagtggaagaaaatattaaaatgaactatgatttgatcaaagaatatagagccgtaaaaaattaaaatacgcaaaagttgtatccatatcaatataggtatataaacatgaaccgtaaaagagatcggtttgcttagtttgcaaaccacaaagcacgtgacataacctgacttgatgggctgtttaatttggacattgagtaacagatgtaacactcatggctaccacttctttctttaaagatactaaatattactttcaatttacaataacaggatccattttactcaaccaaattataattaagtcgtatcaactctattgtacctcacatgcgtacggaaattgaaattagaagtactttcgttaaaactaattctgttatatataccaagattcggtgatttaaggcatacattagtatagatatcgtgatttaagatgggatgtatgtaaagtcaccactatagtattataaatattgaaaaaaattatccttaaatttaggtgtatatttggtttacttgtaagagtagttgaaaaacttgattagtgtctcaagtgttaagcaattggtacttgaaaaagtcaagctatcaaaaatgacatcatcatcacattcataatcgtgggatgtggtttttccttcccgcaaacaccgtcccacatttgacccataacacttagcacatgtcaattaacaatctaatcatttttacactacccttaaaaccttatatattaagaatgattcttatactatgttatacatgtatcattataaaaccatatcataatatgaacctataattattcatttgaatccttaaatcattgcactctaatatattatttacgcaaagaaacttttatttgatatttgatttttgatatgcttagtaaacgatattaagtgctgatcaaactaacatgggcccattttctagtttggcaatcttatattataaacttccattcatattttatataacaagtcaaataattataaaacaataagcttaaggccagccaatcaaacccttttctctattcatttccttacataaggggaactagcctctaggatatgagtaacatgaccctcagagcaaatccaaaaattattagccattctactattattattattacaaggtcacaatagcaaaacaaaaatatgaccttgaaaaatatcattctagttgtagtaatatgtttagtacaaattttttgtttgattattcccacagttctatcaacaagtgaccaaaacagcagcctaacccagtggtgcgacgaaaccccgcacccgggaccatgcaagtacttcatgtctcacggccaccaccgtttcgagccaccgaaacagcggtccgattttcgaaagattcttgttgaaattgccattgacagagccttagaagccagacgacatgcgtttcaattaggcccaaattgcgagagcaaaccacaaaagtctgcatgggccgattgcttaaagctctacgacgacaccattttccaactcaaccgcactctcgaaggactaaacaccaaaaagagatcttgtacggacttcgatgcccaaacttggctaagcacagctctaacaaacattgacacgtgtcgagccgggtcgttggagctgaacgtaacagatttcataatgcccattgcttccagctacaatgttactgagcttataagcaacggcttggccataaacgctgggcttgtggacaacaaagaagcccaccaagtcaatgatgatgatcatgatcaggaatttcctagttggctttcggagactgaaagacggcggttgttgaaggcctcgccgtcggcgataaaggcgaaccttgtggtggctaaagacggttctggacattaccggacagttcagggggccctaaacgctgcggcgaggaggagagttggtactagatttgttattcacgtgaaaacaggtatatatagggaaaatattgaggttggtattagtaataataacattatgctcatgggagatggcttgagaaagacgattatcaccagtagccgtagtgtcaatgctggatacaccacttatagttctgccactgcaggtatacttgattcatttcattcttcatcattatttcaaaatttaatttgtttttaatctactattagttttgtacaatcttgttttatacaattacaaaatacaaccttaagtcaactatatttaatgagcatttgctgtttggttatacacacctattatttttcaaatctaaagatcccgattgaattaattaatgaaattattggataaacaacatttcttttttcagaagcttactgaaatatttaaccaattacaactagccaaagtcgatcgggtaaagaatttggtcaatttatcaatttacaaaacatgtatgttctattttgtacttgtttgaaacagagtcaaagtagttttagaatgaacgaagtaaaaatagagagcccaaagtgtataaaagaaaatattatattacttaatgtttgaataatttgtcaaatgtcaacacattttagccagaaagacactttttaacttttttttcccctgaaaaatactagtaacattattcacagtctaatagtgcaaattcccccattttatttggaaagtccattaagtcaagtttggtacaacagttaacttaccaaacaaagtcaagtatttcacgagttgaattcatgaaatctatgtacatggaagtgtaccaattattctgtttttattgtgttgttgtttgactaatttttcaaaaatacttttcttttttgtacttaaggcattgatgggcttcgattcattgctcgtgggatcacattccaaaacactgcaggcccacaaaagggccaagctgtggccctcagatcagcctctgatctctcagtcttctatcgatgttccttcatggggtaccaagacactcttatggtccactctcaaagacagttctataaagaatgttacatttatgggaccatagatttcatctttggtaacgcagcagtggtcttccagaactgcataatctacgttagaagacccttaaagggccaagtcaacgtaatcacggcccaaggacgtaacgacccatatcaaagcacagcaatttcaatccataattctcaagtacgggctgcccctgatctcttgcccgtggttagggccttcaagactttcttgggccgaccctggaagcagtactctagaaccattttcctcaagtgttttttggacaatgtaattagcccagcgggctggttgga

SEQ ID NO: 381451 - DNA, 4711 bp, Cannabis indica
aagaagaagaaaaaagaaaagaatacagtacctgatccctcccccaaggaacacctcccccagactcgtccattccacctccagataaagtagctatggacacagggccaattgtctgattaagaccatactcagccactgccttgtatgccatgtcagttgctcgtctgatatcatcaagagcacctgttgacacacggcctgaatagatgacttcttccgccgcacgtccaccaagaagagtaaccaagcgaccatgtaactcatcaataaagagtaaatatctatcttcatgtgttgggggaatataagtaaatcccaaggcaccaccagaccttggcaatatgcttaatttctgataaacaaaaagaacaaaaaaatgaagttaaaagctgagagggttgaatggatggctcaatttcaaaattgaatggtcctactataccacaaaatatgcaattcatgactaaactgaagagtttaaataaccacagcaattaatcagtttattctcccagaacccatcattattttctgacaagattagaaactacaacctaggtttcctgataggactcaatatagtcacttaaataaagaaactaagcctgaagctaagaatcatggagactttcagatacaatgacccagcttataacatatttcatacaacttgcttcacagacaacatgctagcaaaattaaacaaaattttacctcaacacgtggctgtccaggaagaagatttgcaactgcggtccctactactgcgtgaccagcttcatgtctagcaactacagccttctcatttccctgcaacctggcagtcttcttttctattccctgtaatgagcaatctattacaattcttcttctagtaactcagtgatcaatgattctaaatttgtaaacacacacatgtaaaaaccaatagaaaagcatatgcgctgaatctaaacataattaataaatgcatttttcatttgataatgaatgtaacaattggcagtggctagtgctctgaaaattatttaatcagctgatagatcaaactacataaccagattgacaaccaaatggctgggtaaattcagaaaacaaaaacttctaaggtatgaaccatgaataagcagtctgaggaggtcagcaaaaagagggttaatatcatcaaccagctatgaaactcaaagtgacaatactgcaacatactcaaaataattatcatgcagttttaagttttgaccataaaaggggagggagtcaaacaaaattaaaacaccaacaaagaaatcaacacagcatcaaagttatacacactcacaaacacacatttgcaaaaagaaaattacagctattgatctctctactgcttgaataaaatcaactttctccactataactttgttctgtcttccagccaacaaagcagcttcatttactagatttgcaagatctgccctgaaaatgaataaaatcaaagaatcaatattatagaattacaatagttcagccaaaaaaaagggtctctgatattgtttcttcaggaagagcagatggcaaaaagagagaaaatataccccgtaaacccagtagtcatagatgcaatgtcactgaggtcgacattttcaccaagaggaagctctttcttagaaacatgcacatttaaaattgcttctcttccactcctatcaggtgtctccacctaaaagtggaaaaagaaaaagtatgtgaggcaagttatctttagagataaggaaaaacaaaacttcacatcatatgtcaatatcaagcatcctatgatacaaaccatgacaacgcggtcaaatctccctggtcggcgaagtgcaggatctaggacgtctgagcggttagttgcaccaagaacaattacagcagaattactatcaaatccatccatctcctgcaatacaaattctaacatgctgtctcacctggacatcaaaaatttgtgcacatttgatgagaggggaaaaatgccaggagcttaccgtaagcaactgattcaaagtctgttctctctcatcattgctgacaatgcgaaacttaccatcacgacttttagctactgcatctatctgtgtatagaaaacacaagtctgtcagtggagagctgcatagatggaatctgattgtaccctataacattttctggttctgacctcatcaatgaatattatcgatggtgcttccttctttgctcgtgcaaagagatctctcacacgagaggcacccatgccaacatacaattcgacgaactcgctagcagaacaacttataaaagggacatcagcctccccagccacagcctttgcaagaagagtcttacctgtcccaggaagacccacctgtaaggtaaacaaaatcaaacttactaattgtatatgttctctattcactacacaacacatggttgcaaaaaaaaaaatcaagtataccaccgtgactttccactagtagcatcataccaccaaaattatctaatcagtctaaagctaaaactcaccagaagaaccccacgaggaggacgtgcaccaagtcgtacatacctatctggatttcgaagaaattcctagccaataaacatcagaatttaaatatatttcctgaatgggtgggacagcaaacaaggaagaaaatggaagaataaatacatatactttgggtactgataattataacaagtaataatatccaagataccactatttcttctagctcctccttagcttcgtcaacaccagcgacatcagcgaaggtgattacttccccttgttcagaaacttttgtaccaccagctcccccagatttgcggttcctaatctgaccagcagtatgctgttgagtgtgcaaaaccataaatttaacgatatgtgagaacacataggcgtgtacccagtaaaggccaattagaggcttgcgtgccactaaaatttgagggaaattttaaaaaacggcaagtaaatcccatagcccttttaaaaatcaatattcccacaaatctataatacttgaaaaaattgtttatgccacaaatttataatctgagttagctgtaacctttaattttgttaaaaaataataaataagaaagaaataaagaaagttttcttatagtcacatgttttaagtttggcacaattttataaaattgtaaaatggctaagaaaatgtattagtattgcgtaccaatttttttataaagttatgcctcaagcatgaaaactcttaagataattacaacatctaacagaagaaaaaaagaatgaagccccactcttcaaaattcctggccaggtaggctttaggtattagtttgaaggacacaagaaaaggcatgctagctcatacctgagaaaagcttacaggaaagcgatggagaagtcctgcaagcacagccacataaaacaacgctatctgcaaaagggcagagacagttgaaactcaacatgcatgaggcctttattgcataaatatagtattccatcctctatccggattactaaataaagcacagttcatttcagttacagcaaactgagcaacaaattaaaatatcaactcaagcgacaaactttaaacctattcaaaattggattttgtaggccaaaacacaaactaggaggttcttatctataaacatattttaattgcacaaaccaaaacagacggcttaccaatgcagaattcaagaatccaccagaccgtttatccggcgaaccaaactccacctcattctcaagcattctctcatatggggctttaatatcagtcggtctagtcgtcgtgtaaatcaccctctttgttggagccacactcctaatcaaggactccgattcctgcaacttactaccagccataacaccactgttcacttcaccttcctgactagcagcctcggattttaacttaaacataatatgtactccgtcaacctccaccttctgaacttggttactatttattttactcaaaaaatcgctgtaagggacactcacaaaagtggtcggcgtcctcggctctgaaccgggcaacggaatcccgggtcggagcaacctcataacaaaaattacaatccccaattgaagaagcaaaatcccaatttcctgagcctggaccatgggctgccaccgccacttcccgcctttggaccaccaccagttacctttcccctgctgcttctccctcctccgattggagcccgaattcggtggcttattattcacaccttgcccctcgctcgacttcgcttcactcttttctcccgagtcgctgtcctgtccactcgccaaaatcctaaacctcctcagcccgccattattacttctcaggtgacttccccagagcccgaatttatccgaaatcttcaaggcattaatcgacgggaacgataccgaattctgaaccaaacatttcgtgtcgcgatgaaaaactctagactgaacacgaaggaatcccaatccatgccaatcttggaaactagagttcgaattcaaatgaaatttcttataaattacggggcgtatatactcaatcgtcggcatcaccgaacttcaatagcgaaacccaaattcaataaacatatataattaaagatatatctacaagtacgaactgtatctgtttatccgtgtaaaaatatttttgtatgaatataggttaactgtcttagaaaataaaataaaaatatata

SEQ ID NO: 381452 - DNA, 1275 bp, Cannabis indica
atatatatatgtgtgtgtaaatacatatatatatagtgaagtatatgttgttgtaatatttatttaatctttttgttagtccttgtattatattgcaggtagactatttgattaatgatatctcttgacactcttttttctcttgagctttattccactaaatttaattttaaaggtttaatgaggtcatttaaaaaaaaacaaaatagataaataaatataaaaaaacacaattaaagaaaagaaaaatgacccaagcaaaagaagagcataatcaccgaattttgtccttatatatacgtttctttgctattaaataataaaaaagaaaacaaagagttaattattatttttattaccttagacaattcctttgcacaatgatatcatattattgtaggcttttcacaatatctatagacactagaaaatcgatttggtaaatttgccaagggccaatgctaaaccttatgtcattttattatattttgtttttctaagtactaggttaggagatttgttaaaggactttttccaaccaagtctcccttgtcccctaaaaatagggaaagaattggtagctattagctaatattgtaagagagaaactttggttaaatattaactttattattgttgttgtgggtgggtcttcatttaattaccctagctaataattactaaaccctatcttataaatcatgtcatgtactctttcacacaattaatatattcaatcatataatatgtggtgagaatataatttgagatcatcaccatttgacctaattaaatttctatacgtttgaatcttataagtttatagtttaagtagggttttttttttttgataagtaagacttttattaaaaccgaaactcaaagagcagccacaaggggcactgcctcccttacaacagatctttcacaaacaagattaactctagcgaggtagggcgagcctatccgcaattgggtttttcgcacgagggataaacataaaagaaggtgaataaccattattttgcttaggttggtcaatttgtgtatatgatcttatcagaatatatatgggtaaaattattgtaggatctagcaaaattcactatgatagaactatgtatgtaaaaaattggtggtgaaaatacttaagtaatcaattttattatggttaactatttgtataaaaaaaattaatagcaaaattcgtaagtaaaattagtttttgaaaataaatacctatatataaaaacaattcaaattaactttataaaa

SEQ ID NO: 381453 - DNA, 3629 bp, Cannabis indica
tgacatggctgcttagctagttgtcaagtcagtgccatttgatttattcattaatagcttaccatatgatctagcccatacttcttatcaaggacttgatataagcttaaggttacaggagacaacaattatcctacctaagctctctctatatatggtggttgaaactctcttcatctctctctcgagaaattcctttacatgtgttacgaaaaatgatcagaattatcttaggtagttcaaagatcaatgtggaagactatagagaaaagagtggtttgaattccttgtaatacctagtatcagagaaaggacataaagttagggaatccaaagagtggattcaatattataaatcagctgtgtgtttataagtatttttgacataatatatatttatgtttaaataattagaaacatgttctaggtttttttatgtatttggatgatgtaatatataaaataggttacatgttataattcttaacagtattccctttcctcaatatttttttaccatgaaccggaccaggaccccgactatcaacctcggaccccagcccctgggacccgacttggaccccaaccctgacccctggccctcgaacctagctccaggccttaaccccataacacccaatcgaacctagaaaagactccggcctctagctaaacccagaccccacttgaacttgatcattagatcccaatttcaaccctgacctgaacctagctcccaggccctagcccttgtccctcaaccccaacttagacaaaccttgacacccttctctccaacccaaacccgaaccctagcaactggctcttaggtcttggcccttgacccgaatcttgtcccccaacccccgacccactttctctctcctcatttaaataaaaaaagaaaacaaaaacataaataaaaataaaaataaaagctattaaacaaatttttatgctttgttgttaatatcgaaaaacaaaaatagttatcaaacactattttatatttataaaataaatgaaaaacaaaaattgtgttcttattttgctgttttaagaaatttaaaaataaaaatttactaaaccaccttaaagttttttttatcacaattgaaagactaagttaattcagacgctaacaataaaatattaaaatgggtgtaaaaaatttaaaaattatactaacaaggctcgtgtaaaacacttctccccgaacataaacatgaatgttttttcatatttttattaatttaaaggaaaaaataattaaaggtatatatatgtaatcaatgttaaaaaaaaaatatgttatgttgtgtagtggtaaggattgtttttattggtatccttcattgtttaggtcaagggtttaaaacccaccacaacctttcttgaaggaatctataccacgtgatttcctttttagttattaaaaagaaataaataaataagaataatataatataataataataataataataataataataatataaaatatatatatgggtttttgtgattctttaccttatgtgtaaattaagcaattaatgtgataagaataaaaaagtgaaaaaaaaaaaaaatttaaaaataaaaaataattgctaaactttttatgcttactagttgacctatatattcctttttagatttttttttttagttgtatgtaaaaaaaaaaaatatctcattttgtgtataaatacaaataattattaatcctattctatatttttataagctcaaattttattagggtttctttcaacattcttctttcacattgagccgttttcagtcaccattgttagaggtaattctattatttggtataaattattataattaaatttgtgttgaattatgcattatttatgttctccatataattccactaattttctatttggaattgtttttcttagttaaaatcccttcgtaaaaatatgttaacggaagaaaaatctaagcttataaaccatattaatgtatttggaggatttactaatacttaataatataagaagaaaatttatcatcagtcaatttagaatagcattttataattatgaattataatcgctttggatttgtatgaagtttacattgaatggtatcagagatataattttgtaacttttatcgctatttcacagaataatctttcaaatgtaatgattattcatatagaagagttttataaatggatcgtataagcaaacaaatctttgtttgcgatttaggtttaaatttgaatggatttggttataagtaaagtagttttgacattaacggagagataattggttcgacctccatctttcacaagtggcacataaataattatttgttgtttaggtgtctccactacattacagagactttcaaagatggtagatctaattagcgctcacgcgtttcacctaaatttgtgtactttttttgtgtctaagaacgaacatactcaaattcttatcctatatatagtatttatacaaaatgtaaaaccacctaatttaattattattatcccgttttatatctttaacgcttattaagacaaaacaaaacatttgtttccttttgttggagtgagttttagaccaacaattatactttatgaagggaaaaaaaaaatctagaagagactagctataaatgggatatttttataaatactcaaaagtaaaaaaaaataaattaatacgattttactactttttttttacaaatatacaaaatgtgttttttttttcaaaacaatgttgttttcacatttgcaacataaaaattacatgaaaacaacaaataataatatttttggaaagaaaaatacaagtaaaaatttgtaagagaaaaatctgtaaatatataaaaatatatataaaaaaaaccttaatataataagtgtcactttacttattttgtgtaaaaattggtatcaaatgcattgtaaaattttattgggccaatctaatccaaattgggctttataggtgaagcaagcccatatatggagaaacttgaatcggcgggagcggttgatcaagaagaacaatttcgtttggcagttgagtccttattcgatgaggcagacaaattattggctgataatgagcctttggaacacaatatccaatctgatgggaacgtaacaaaggtttctatctttttatttaaactatttgtttactttgttttattcttttagatttttgaaaagtgtattttacaagtatttgggtaatatatatatttggtaaataagatgcacaagcacctacatacacagccttacaatcattccatgtacaaatttgacaaccaaaccctgtccttcattactattttcttttgtatgaacccttttaatctatttacaattagatgcttgacaaacaaaacaattgttttagtagtttttatctcatgaaacctaaaagctctatatctttgaggccaaatcaagtatgagaaatgttaattataacctcctattacaacctcatattacaacctcttagtcaatctctttacgtccaaaatcacatgccgaaatattttttttcaaattttgtttcatagcggtatttgttatagttacagtatcatccctgtaa

SEQ ID NO: 381454 - DNA, 2116 bp, Cannabis indica
taccctgtaatcatttaaaaagtcttttttacaaagcactttttagggggtaattgttgtacatgaaattcggctatgtaccagaagctaacacgtgtccaacaaaaagaatttgagccaactcaaatattataataacggcattgcatcattaaatgcactttaaaataactcgttacaattaagtacaagttgatagaaaatgttcaaactcatggactgtttagtcttatgcgagacaagaataacaactattaaactaagattgacaagacgcatgtttacctcgggacagacagagtaataaaatgtacaagacgagacagtcaaggacctcgtgaatcattaaccctctcttgagaagagaagaacttatgacgctcaaccacatcgcgttactcatattgtggaaatcatctcgcatcactaatgcaaataaaagagatacagcgagatgaggtgcttttaacacttaatgtttttcctattaggatggataagaagaactcacgattgatgagatgtaactctcctagttagcataatcttctgaaggataaaaataaggatcggttgggtagctattagttattatcccatgtgcaaataaatgaaacgtggggaatgtccacgtttcattaactgttgtaaatgaatcaatcccaaaaaagaataactaccaacctatattcctataaataggggcgaaatccatgggaaaagggacgataaaattgagagagaaaatcctattatttcaaatattgagattgtattttctatccagaaaatatccctaataataaggactcatggagtatgtagattttaactacaaaatcacgtaaaatatctggagttatttattatcatttatttctgtagtgtatttattgcaaaaaggctatttatttagttaacgaaaatttgcgtaaaagtcattactcgttagccaagggagtcgaacctttataaattgctgtgtctatttatttacttgctttcattgtttacacgtggtgatttcgatcataaataaggctctgctgtcagttgacaaaatatgaggtcaacaaaagtctatttgcatttcaaagtatttaatgtgagataaaggatcttctttgcatgtatataatttttatgttggcattttgaacttaggcggtaaatcgagagcattgatttctggtgagaatggcaatcctttagtccgattaagttctagatctatgagtttgggccggttaggccttgaaaaaggctcttaagatgatccatttatgattgcattaatggatcaacttgacttgcctgttgaccgacctatatcacattaggatctctttgaactggatcagggacatagttgttttgtattatttggttgtacgataggaggaatatcctatttgtctaatcctacaattcaaatcatttttaaggtcgtgcatggtgcccaaccgattaaaaactgacgtgtctagacctttgcgtctgaccattctaagcgaggggttcgcctgatatctctatttgagcatgggtattaaactgatcattccctcccaagggatgtgttggcaaaattttcccgtctaccatttggcccacattttgagcttgtgaccttggattggacgatccattgacttgggtttgttaggtatgttcagccaaacactcttccaacccgttctatggccctatgggaatactagtattagtcattggctattggctggtgatctgaaaggttatcctgattagtacagtggcctgccaaaaacggttgtcaattgtcgcttgctgggctctcatgatctccatctcttgatccctccactcgtcaaattggcatcattgctcatcaaaagtaagatttattactgctcgaatatcttactggcatggtgaagattattattatggtcttgcattaccgctaatgcatctcgcaaattctgcatttcagtgtcgtctctgactttcctttgagaatttttagtggacaagattccagttccaggggtagtctgctcagttgcagtactgttacaaaaattatggttactacgcaagtatacgcatttaagtagtatctcacgcaagtgag

SEQ ID NO: 381455 - DNA, 3031 bp, Cannabis indica
aacaggaagcccttagtagaatttatgtagtgttttttctttaaataagaaattggctttattaactaattacttcagctaccaaataaaatagcaaatcaattgaaacatcctcaaaactaaaacgacgatcagaaaataaaataacagcttttgcaaaattatatatggactattaaattaacaaatcgtttaacaaaaagacagaaacagtaccaatagaatcaaacaaagatctacagtatgaataactaaaccggacaaagaaattattttcactgaactccgtagagcttgaaccacgcatggacaatcagactccagacaaacattttgccattgcctttctttgattcagctgagaacctctttgatgcctataactttagcaagagatggttcaaccatgctatgggaaaatgaagttttgccctcaataagcatcccattagaatctcgcgccacgaggccaatgccataactttgactgccctcgaacaatgtcgcgtccacgttaatcttgatactattgacatttggtggtgtccaatgctctctcccatcacctgtctgatattcagaccatgatgcatccatgttggattttctagcattcttccattgatcaagagacttcttagaaaacacaacaatgttacctaggttaaattgtttatttttccaaacgagattatttcgggctccccatatatagcctaacaaacagcagccacaatacctttatgctccgaacttactgcttgaaaagtagtgatgcaccaggtgttggagttgtgccaattcctacacagttccaatagacttgaaccgccctgcaagtgaccaagcaatgcagagttatttcctctgattcacggcataacgggcatagggtacaaataaccactctcttaacacgaagttgtaccaatgtggggagacactcagagcaagcacgccacagcacgttagctattttcggcggcaccttcaagctccaagctccaaagcttatgtcagaagtcgatacagtgtcttcataccaaaactcttttttaaatttcatatataaacatcagtcaatttttatagaaaatatgtatatgaagataataacactttgagaaactacaatttttttttagagattacttcataaatttccaaaaaataataaaaaatttatatttttacggatttataatatttacctttttacggatattaatttttttttataaaaatacaatgtgttattttttaaaaaattaattttatttttacgttgctactaggaacaaaataatgtgtttaaaacaacgtttctctaaaaaaaatacgtgaaaaacaaaaaccgtaaaaaagaaaaataagtttttttatacaaatgctatgcttggcctgtataaaccttgcgtgattgcataatgcaattaatttgaggaatcataatgaaattagataaagttatactattgctatttaccatttgctagactttaaacattaattaaataagattttaattgcacgtcaagtcttttacctcataaataaaaccctttgtgccatattacactcaatattaatttagtggtgtagccataaccaaaattcaactacaaactttttttttttttttgatgaataaattcaactacaaacttagtcaagttagactaataacgatagcaatattagtaagttgatttgggtatggatggtccccattgaagagtgagtgagttgtcattggtactaaattgtataaaagatgcattgtgttggtttaggatcctttttggacggctaggatttacttaactagtttgaagcatatttgaaggtcaaagactgcatatattaaggtcaagtagtgggtgaccacgaagggtccttgttgtgttggtacactaattatgatgtttttcttatttaagtcattgcttaaaagtcccttaatttctatttaatttataatatgtataaatatataatttagaagaaagggtctatatttttccacataataacactgaccttatctggttctcatgttgtcaaaaaaatcccatgtatcaagctcgtctttttcatcacttacatttacaatttcttttttttttttaataaatttgtaactttcattgaagattgaggaaacattacaaagttacaagatttgagatacttggtggaatattaccattccacgctacaatgttacgagtaatagtactattgcttctatcatatggcaaaccttccctaactggatcagtatattcagacaaattctcatttgtagaaagcaatctatgaacaagcacttcagaatttgtctctataattgatattggaagagaaaccgtagaacgcattgaaggacaataaaaaaaaagcttgtccttctgctgctagtgggctagagcaacccaacatcttcttacttaaaccaaccaccacttaccattcatgtttgtaacgaatggtcattgtctacttgtaaaagattgagtatttagagttgcatcaatgtttagcttgaaagtaccagcttgttaattgctacttgcttttgtgtaacaagtactattgaagtcaattcttttaacccgggcatgtgttatagtcaattcttttgtctattcttgattttccaaaaagaacaacattcatgtcattccaaattgcccaaagaagtccaaggcaatcttcaaacaaatctgcatttggagtcttgaaagcttggaacaaaaagtcagaaatatcactatatttatattctttttatataaatagagtaaaagggagaagatttacaagcctttcgagccctagagcaatacaagacagtatgtgacactatctcccgatcatcaccacaagagatacaaaaagaattagagatgacatgcttattagctagatttaaagcacaagggagcaaataatgatagagtagttgggaatattttatcaagatctagatttactaataagtatgttgaattaacatcctaaatatgaa

SEQ ID NO: 381456 - DNA, 3095 bp, Cannabis indica
aaaaaaaaaaaaaaagacaaactaagtagaaaactactcgacaatcggagatcctaagttcattaacgataaattgataagtgtttattctaaaacacttcctaatactcgtgcataaatctaggattttttttttaccgaataatgtggtaaaaaagaccttaaaattaaacatatattttggctataatttatgtaccataatgtagagcttttcacaagtttttaaacaatatatagaacgtctaaaacggatacttaagtgacagttatgaccaaaatacaaaaattggtcttctcaaaactacccaaatgggcgatcgtttctccaaatactcgaaattttagggtacttccatgacaaacggttgcccgtttctaccaaacgggcacacgttttgcactagagtttttagaagttgaactttatgtatcaaacctatcccaaatctatccaaattacactaaactcttcaaaacatcattataacatattataatcatgttttacatctcaaaaataacaattatactcaaaatcaaaaactatcattgacgagcaagctttgaatttcaaagcttaaacttgttccaacttactacagctactaactaaccacaaaaccaacttttaaactataaaactagtaattaatcaacatctaactcaaataacaccaaacaaaatctaattcccaaactcacacccaattacaagcttttcatcaaaattcaaagagaaaaaagggtaactaataatatatctcaagcttgatctgacttccttattaagaatcttcaatctcagctctaatttagcaaaaatagaagaagatttaagaaatttggtttggtcgacttggttttttgtttaagccttgatttatcttatttgatttctaaaattaatttctgaattaatttttatttaaacaaacaattatcttagctaaaaactactaaattacccttaacttacttattgggtaactgaccaaaaagcaccttttaatctgggctttttaaattggagacttctggctagaatcattaccgactttttttttttacaaacttttcaacttgttcgacataattgcacaaaagaaaatacttgataagtttctatgaataaaaaagaaaacaaggttaattattaaaaaagctaccctgaacatcagggggagaaccctcccaaacaaggaaggacggggaatcctcgtcagaggagtcttcttggtctagttccacgaccattgcttttccttttttaacaaccgcttagccagtaagatggatcgctacttcagaatcatccttgatacgaataggtcgtcctattggctcctgactttgcttcttgggatttttcttatccttgttcatctttggaacttctcgctgaggagtgggatccttggctactttttcattacctggttcctctttggattgataaattctgtacttaagaaagttttcagcagtagccaggagggagatgttacgtgcatactctaaaagttgaagaattatctgcgctcttgaccttaaccccaaagtgaaagggggacagcagtaacttggagccaactggaatgagagatggtcgacatccatgtccttcacaatgtaatgctcttgaaagaagtctctaatctttgatacatccttgtgtgtcataccgctcaacccttggtgctcgttttgagaaaagtagaagtagcctgatctattctattttgggctagacttaaagtcaaataaccaattagtgtcatgggcagaaggatggtctcatccttgtttggcatacaacatgaagagtgcagccaggtacttgatgccctttgaagtgaattgggttgggtagatcctgtagtaatttatgatattcttgaagtacgtatgtaagggtaaggtcgcaccttgttcaacatgaggttcggaccacgcacagagtccctccccaggattagtggcaagcttcccgagagtaggtgaaaaggcttcaactcctctgagcaaacattttgtttgaagattcaacaacctcttgtatgtatgtatggatggaggagaaacccactgaggagcgtttctctccttagctctaaggggacgggattcctcttactccactttcatgtagtcttcatccagaaccaagacatccccaaactcaaaaaaaggctctccgacctcattatatcccctaaacggaagaaccgagaagcttcttcctctctttcctctaatactttgtctccatcttgattagaaggagtcgttgaatggacctcgacctggtcatcaatctcttagacttcaatgtccctagtggtatcttaaatatcctccctaagagttctagcttgttccacactgtccatcgtaaaaagctgagcagtgtgggtgcttatccgaagtttttctataggtttacttggttttcgccattactttacgcctgggcaaatggtttggtttagtagtgtgcttcgcaacagtgacaacaaattttgctaatacagagtgtttcttcaaaggctttggacgaccttctagcaatgtgtcagggacgtcaacccgaactttatgcattcaagtagtaggtaaataatgcctccaacctctattcaatttccaaatgaactgaaatcctaaaaatcttaattagcccaaaaaaaaaaaaaagttttaggttgaagtttgacccaccccacctttgcttatttttacttttttatttagacaatcaatttgtgagatataatattttagtactaagttagtttagaaatctacaattatcggagtatcttccccatttcacataagatcttacctaactttttctttttcaattatattaatctatgaacagtgatattttttaaaataaacaaataaatataaaagtaactttactttccttattattattattattttattttagataactaaaatttcacttacctaatttccatttcaagaaaaataggggtaagttgaaaaatacctcttttattcatcaattaatcaaatttacctctaattttatatttatttgaaacatacctctttttata

SEQ ID NO: 381457 - DNA, 3758 bp, Cannabis indica
aaaaaaaaaaagcccaaaataattctagtaactttatttagacactttccttaaggctcaagaaccttcaagagtgttcatctatctctttctctggtacctgtttttggtacatcgtccacccaattgaattttgtggtggctttcatgttttaattttttaatctctttttgtgcctttttggactacaataaatgttacttttttcagcgtatttttgcgtcggttaggcataatacgtcgataaaacaggctttaatagtgccatacattatgtgccgggaaaaaccaaacacatggtggaaagtaagaacctaaatcctcccatctagggataaaataacttttgctagcgcaaaagttttgtgcatttttcatttggttggtaaaggtttttccaacgcaacaatgtgttagaaaaacctttacccgccaaatgaatttttgcagaaatgacctttaccagcgtacttgtgcgtcgagaaaggtttggtgtttagggtttaggatttaggcttaagttttactagcgcataaaagcctttgttttatttttttttaaaaaaattgataatttattttattttaataattcataatagtattttaattaattttaaatattaaattagatttgaaataattataattaaaaaatagttgtattcacatttataattaaaatagtatcctgatcaagctaaaatatataactatgatcgatttgtactaaagttagtaactaaacaaaatttatacagttattagtaactaaacaaaatattaaaatatttacgaaaaaaaaatcaaattcgaaagttaattataaaacatatattgttctaaagtcgggtaatgtcatcgtcgttgttgttctgagtcttgggatgatgcgataatgatctaacaccaggaggagtggggaatggcgaaaaaatccattggagacatgttgaaaataggcacaacctgagagagatactcaaactgatctttgaatcgcttgatgtagagttgttgtgtttcatattgctgcttcaaatactcagatttatgttgtgcctcctccactttttctacaaggcctcatactgttccataataatagtttgtgaggcagaagaagtcgtggcatgtgcttttttgccccaactaccttcaatccaaagcctctcagatgttgagatcgctcacccggtacttgtgtcattacaagcaggtgtcatgggtactgggtggggtttatagcatcctcagtaggtaaattctcattgggtgcaggttgatttgtagctaattcgtccatttggtcttaaaaaataattaaattaaatagtcaatttgagtaaaaaaaaagttgaaagaaatattcataaattaataatatcaatgtaaatttacataagttcgtagcaattatttgttgcaccatacttttttttatggtggaactttcgaaaagcatccacatcatttggaagtttcctttgttggttttatggtagtaaattaggtaccatattattagattatcatcgtaacatattccaagagatctctggattgtatttacactaaatcaaaataataaaattaataagtttagagtatacctctcgaggcctatcagtgtatccttgaaacttctcatatgttgtaacccataatccgttgatgaggaatttgcaatttagactcacaccaatgtctttcaaatcgatccaccaaatgtaaggaatggtgtgtgctattaggataaagtgtataatgttgtgtgtgttgttgagatttcttttttccaactatatctacgcgtcgtacttcttcttcgagcttggtaaatccatctactcgatctaggaattctctcattgatccataattagtctttttatatccttccatagctctcctagaggtttgatacctcccagtattgcatatccaaccttccttcttcagtctgccccttaatctttgttgcttcagtcatgaacctgctaatgtaagttcttaaaggttttcctggtatttgcttcacttttaccatgtcttctaaatgagagggaagctgacgagcggaggaaaattgtacatagaattcagatgagaaagaaatccatgagctaaacttctgtggagctagtttgaagtaccattattaggcgacctatgctagtgtagctgagaagattttgcaatgtacattacctttcaccccttgcaagtccatttgcatctagtgagataaaggatctttttttcttgaatacatcttccatattggcattttgaacttgggtggtaggtcaatagcattgatttttggtgaaaagggtgatcatcttgcatgattcagttcaagatctatgagttttgattcgtcaggccttatacgatgcttttaagctgatctatttatgcttgcataagtagatgaacttggccagcctgttgaccgacctatgtcacattaggatctcttaggactggagctgtgacatagttatttgcattaatcaactacacggtaggagaaacatttcacccatccaatcctcttctacggttcaaattgtttctgaggtcgtgtacggtacctaatcagtcaaacaccaatgtgccaataggtctttatgtttaaccatcctggttgaaaggttggcttgatacctccgtctgagtatggttatttagccgactacctcttctcgaggggcattctaagatctacccgtctaccaattggctcagagtttgaatccgtggccttggattggattgttgatcgatataagtttgtgcagtatgatcagctacatactcttcagacccattttgagatccaaggggatgctagaatcagtcattggtttgttgaccggtgacttgataggcccttctaattagtatggcagcctgcctcgaacgactgtcaatggctgcatgttgggctctcatgacttccatctcttgatatctccactctatgaactggcatctttgttcatcaaaggcaagattgatagctgctcggatatcttgttgctcatggtacaggatgttattgtggccttgcattaaccctcgcaagttttaaagctcaatatcatctctagctagcctttaagtgtttatggtggatgggatttcagtgccaggagtgatttgctctgccgacgtactagtattcccagtttcttgtatacctggagtactgaacctagccaaagagaaagtcactccatggcctactattggtggttgtgtattaacttgtctaagggtcatccctggtagatctcttgtgtttctaaaaatctactgttgggattttatgccctaaataaaactcattttaatgtaatcatatttgctatcaatagaagattagaagtcatttaagttaacatgttattttcatgtttatagtttaatatacaatttttaataaatacagaacatatagtaattcacaattacagtgatgtcaccacagtggaaagtaattgtgactatatacttcaaagtatagtctaataatttatcagtgtactagatttatactgacgtgataattagcgataaagtttacttacaccttggataagtgatatgtccttttctgtggcattggtaaactatgttagtatctaatgtatggaatgtacatcggattggactgatatcaaaattggataagatatcataaacttactgttatatctttctatgttaatattacttagttgatctt

SEQ ID NO: 381458 - DNA, 3059 bp, Cannabis indica
gacaacctaatttttgaaagtataaaggatagcagtaaaataactattcaaggttggattattagagtaattattgctagaagtgcagtagtggtaaaatacagacctgcagtctagacaaaagtcgcaatctatggaatcagaaaaatgaatattcatctggcccaaaaaattgagtattcagaagtcatacaaatactatttttttctgattaaataacttaattagctgctgaccacagctaggtccaaagcatatttgtcttctcattattatttttcatttgttctattaaggctactaaaaaaaatcctaaaactacctatttctgcaacaagatccaaaattgtaatcacaataaattaaattaattgttttagcgattagttcaatgttaagagagtttcaattacatcttccttctaagattataagattataaaagacctaagttatacagttagcttaatgttaattgatgagtttgaaataatatggatttggaattttaccgtttcattaaaactcatccatgaaaaatatttgtttagcaaacaaacgtcagaaaaatattttcacaggatcaatctgagattgtagggatcatatatttcagagtactctgatgtaagcaaatagaattttaaaggttatcaacaccattgataggaacattacagagaatagaaaggaagcaaagttgaaaattgaatgtagctgcaaactataaagcaaactacataaagagaaactcctaccgaaagtaaagttcttgcatacctgattttctgcttctctttcactaatggtactgtggatcacttttttggtcaaccctatatttgttaaaattggttaaagatgataccaaacatgatatcgagcaaatcttgccaaaattagagcataatatcttacaatacaaaatagataaaagcatgcctcaggaatgctacaaaaagtgtggaacaacagatgtcggcatatattagctggcttaccactagctgcatgatgactctgacaccattcccccattctgtctaaacattctttagtttggtggataaccaaatcaggaccctaaaagagaaaattatcctgaatcacaaaaacaaaaagaactatatgtatgtatctatacactcatagcaaaagagaaattttcttcaatcataacaaagagaaaatatacatatatagaacaagcacactgcatgtgaatcatcgactcaatcatgcagtgttagcaattatatgggcaatctgaacaagaaaaaagagaataatttgccataatgtggtagaagatgaattcaatttgggaaagagtaaaatataggtttctgtatgaatttcttcatatatattgaacttagaaagtacctttcgataagtttcttttaggttgtgaaggttgatggatatatttatctttcttcccgttttagctttgtgaagatttctaatttgatttgattttttccctgtgtttatggtttagatgaaattgatccctttttacattttttttttctttctgaatatttcatcgtctttttcttctaatatctcttaatataaaactttttttcattcgaaaacaaatactcatcagtactcaggaggacaaaatggtttctctacaaaagtaaatgctagatacttattaatgcaaagagactcacgagtacttattcaaccgtaggttcacatgtttcacactctttcctttctaagtggaaaacaaaaatttgtcagaaacaagccaagaaactatagaggaattaacagacaagcaaacctttaacaaaggacttaatgtgaaacagtagttctactataactagccctcacacaaatattgtcgcaattgactttgcgtaagagcttggtgagcaattgtgcgacacactaagagtgttataattaaaattgagtgtaattcggaataataattactaaatttgatgtatttgtttaaccaaataattacacaataataatgcaattagaggtaattgaggaagtctcaattatactctccaattcttatagcagccacgagaattggctgagtaattacaaaatgctattattttttaaataaatatttattacacaaatattatttttatgtgtccttactaactcatttgataaacgaaataagaattcttcaagtaattactacttgacatccaaataattattgtgttgtgtaataaccctcatgttaatgtgtttctctaaatgtacatttatttatcactgctccaaatgcgcggccaagactataaagttgcaatgtacatcatcaactaactgcgtacttggtgttcactagtacatttataagaatatcctactagtgcatttataagaattataagttttgcttgtttacgattttccttttaacaaagttttgcttgttacacacatctacactcttttgtaaataatgaagtttaaagctcttagaacaattacaatattttaaccaatctcggtatgccttaccaagaagtgagcatagataaatgctggcaatcgtactacattaagattacattcagtgataagtataattaaaagaataaatataaacaaggagaacacacaaaatggataacaactaacatataaaagaggtgtcaaataaaaaacaagaaaacacaaccaaaaaagaaatgctagaaggttcataatacaatacaaaaatggaaaagtacctccacttgtttgttcaaattgccatcggtaattatacaagcaatctccagtatccgatcaacttcgacattcaaacctacacatacacataaatgaaccaataaacatatatataataaataaagtaaaccaagaaaaactatacatatatttatatagtgacttgccctgagttttagttccatgcaaagagaatcaacttactaatatcagaaagtaagtttacaacatagccaacgggctgatgagaattatatcttacatcacacatagtaggtgataacagatttaaaaaaaaaataataataaaaaaaaataaccc

SEQ ID NO: 381459 - DNA, 3454 bp, Cannabis indica
taagggtttcaaggagcctttttcaaattttgaggaccttaggggggctttcaaagattactatttcttccaactgctgtaaagactccactcgcactttctcacaaactttgccatctagttgtgacgagactttgtctctctatcggggcccccattggtgatcactgtcaatggttgttgaggcctcgaggcaatcgaaagcaacatgctatatcattctctagcttcatcctgatcccttttcaatgtggcgacaccctcgggggttggaaatttcatggtcaagtggtacattgagatgaccgttttcaaccggattagcaatggccttcccaacaaaatattgtaagctgacggagaatccactaccaagaaggtggccatcattatagaatgttagggtctcctccccctcgttagcagcaattctatcgttccccgtagttagtctggttttctggtgaacccgtatattggtgacgtacatgatttgagatactcaaggtccaatcccatctcctttagagtactgtaatataggatatctactgagcttctgtcgtcgactaatgttcagtgtacctgggtgttaacaatttgcaccgtaagcatcagggggtcattgtgtggaaaatgtacacctgttgtgtcctcttctataaaggtgattaggtgttctccccctcaaaattatttaggggcctccactccaaattctaggagtgagtttctcaccttgcctcaagggcgtacctatcccttttccttcgagcttcccctcctagacaaggccctctcatgactgttttgacgtccttcggtgcattagggactccgatgggcactctttgttggtgctcttcatctgcttgtgccctatctatgttcgcctccctatcaccgatggcagacagtggtagatcttgctctggtgcaaccaaccgttctttcaaggtgattttccatgtactgacaaacacgagaacgtctacccattatgtaacaattgtgtgtaaaggagcgacttggtttgagcttttcgttcacaaacggtgccagattgttgacagtgagaactcgtgaaataagttagtggtcaaaaatgcaaggtcacccaattatgtgataaagataagataaagatgaaggtgaaaagatgtctgaatattcctctctatagtgaattcaatatctgagttacaccaaattatcttccaaccccatttcacatctgagatggggtgtatttataggctctaattgcttgatgtagaaaatggtcccattgggagaagacatcactttctcgctgcatgctgcaggtgctagggtagccaggcaccctgttcccttgtctagtatcaaatggttcctagttacaggctgcaggaggatggtcttcgcgtatagggtgttggagagtggttgcagcgtacccttggtcgggtcttcaggccttgcagattcgttttcaccgttacttgtacctccttgcgctcagtcttcagatggcgtggtggtacgctcttcccttacacgccttgttcttggagctttcatccaatgtcctccttgtctacatgcctttgcttctttccttatacgcacgtccctccaaatacacccatgcaacctcacctttgactcccttctcccaaacacccaaattcccctatatgcatacccgaatccccccacactgcacacaccgcttagatgcgagccccccatgggcttgcatgccagcccccaactcgcacacaccacacaccccctcacttggacacactcccccacatgcacacatggcttgcatgtgagccccccacttgcacacaccacactccccctcacttgcactccctcccgcacatgcacttacgactcacgtgctagcccccatgggctcgcacgtgagccccataccgcctcgcaccatgccaaggtcacccttcaccactcatccacgacttgcatgccgcccccccctgggttccacatcggagcccccatgcactcactccgacaatacctcgcacatgatgtctatccacacatgtatagcctctccttctttcactcgcgggtcaaacaaatgctccaccacttgcatgaaagttccatgactcacccaaatgcccccgtctcacccattggcccacgggcttgcacaacaacccatggggtcacaatagccatgggaccacacaacaatcggtcaactcgcatgggagccgtcatctcgcatagcaagctgtcttaaattggaagtcttagtattttggccaaagattcgcaatatacatcggaatcggacaattcaagatgcgttggaaaaataagaaagagatgtttgaatactatgcttgtggaatgatctaattctgaacatatcactacaaaagtcctctaacaattataacctagtaagttgatcttactaactctagtaatgagttgttacggggttgaccttcgagttgcacggatataccccaagacttgtaagcaaagatttccaagattaacgatccttaggcaatatgcattgactcagtcattcttcgactgactcttacaattgatgtctctcgactattagggctgattgttgactaatctcgaaaattaactgtcaatttttggggttaacaggggtcatcaaagcgcttcaaccactcaaactacctgcaccgcaccgcactagaaaaaaaatgtgccttgaaattatttgcggtgcggttgcagtatgaatttttcctaaactgtgcggtgcggtgcggtttagggttttgaattattaatatccgttaaaaattacaccgcaccacacattataaaaataccaatttttatatttatttatatgtgaatgttaaactcaaagcccactaattattgtatttttgaaacttaattgttttttaatatttattttcaagtcatggtatttttgataaatgttgctaaaattttgttgtatttgtgatagtttaattatttggtgatagtcccaactacaaaaaatgcaaaaaccgcaccccaccgcaccccaccatctcttgcaaagcggtttttgtggtgttttagtttcacggtgcgggtgaggtttgggaaattcgaaaaacctcatgtgcgagttgatttgaaaaaatagtcaaaaccgcaccacctacaccgcgaacaccactaatcaaaacagtgactgtttcaaattcaagaatagaagtgcagaaaaactactacgaaacaaaaatttgactagaaatcaagtttaatttacataaaactaatatcctcatttcaattttcatatccatgaaatgtaaatctcaaaaagtttaactagagttctcaaacaataaaactcaagtataactaaaaaaaattacattaatactgaagtaaaatatttatcctggtgtatttttgtaacgtcctaatctatagg

SEQ ID NO: 381460 - DNA, 1191 bp, Cannabis indica
aattttttagttatttggataagcttaaagtgaaaaaaaaagcattaattattcaattacttagagacttcttttgattattttttttttaaaaaaaaataataatttactgactaaacactttttagttaattaaagttacttattacacgagcgtggcgcgttgatttaatattttatttaatgaaattaaataatgtgtgacatgtcacctaatattgatttgaaacgaaagcttaattactttctttttatttttcatggaaaaaaaagcttatttattatatccacataacctatgttataatcttaaaataaaaaaaattatgttttcaattatatgagtttgtaatttcttttttaaaaataaaattattgataaagtattagaagaataaaagaatacgcatttttcatattattgaagctaagataatttttttatttaataaaaataataattatgtcgaaaaaattaaaaataaagacaggtccagagaatctcttcccggaatgacgtgaggatacttgataaccgcaaataaataaataaataaatttttataattattttttaatatttaaaaatgtaataaataaataataataatttctttctagttcataaataaattttaatttattttatttatcaaaaataattataatttgttgttttactcaaaatagtatgtaaattttggtattcgtaacttaaaaaaaaaaattggtatttgaagaggaactaatctgtcagtagcccttgtgcttttagatatttcctttgtatactttttcttattttctcataataataatattatgtattttttttttttgatggaagaataatatatgtattgacaaaagtaaatatattacataaattgatcaaaacttacacaacaataggttaaaaataaaatgctccctattgattggttaattaagattgaatagttctattttatactttctaaaacagtagttaaaactttacagttagttatatatatagagatgataatggaaaaaaaaaaaaactaaaaaaagtttcataaatattaggctaattagtaatttttccccccaaattttgacatgtactaaatcgtgccccttaaacttttttggcggttaaaaattcctctcgtactattgagattgttaaatttaaggacttttatttaa

SEQ ID NO: 381461 - DNA, 4775 bp, Cannabis indica
aactttaatatttatgttacaaacaggataaaattattcaacctagtacatacataaaaaaaacgatacatatgtgtgtaatatatttctttaaaaaaaactaaggtagtaggagtatcattgtgtgagtagaaaagttaacaatagtgattgattatcacattagacttgttggtagaagtagtagagtaactatagaatacatgttagtgatgtgttttggttaattcacattctaaggttatcacaatataatttatttatgtatgaaaacataaaatatatatttgtatatattttgtgaatgtaaaatatattttatgtatgaatgttgtcttaaatttagaacatctttcaagaaatgggttagtttgggtaatataaagttaaaatgtgtccaatctataaccaacccataattatatggcctatcactacccaatgagtcatgacctactcttaacatgaccctttactacaaaaaataagttgggttggccgggttggaatggtttggtacccactattttgttgcactcctacgttagtgtgatgttctagtttttattttttattttctaagggtaaatagaatttcatggaaagacaaatcgcctaataacatagacataaactaagtaggaacattactccaattgagaattcgatatgaaaaataataggatgatctagcaaaactatgagtcactttgttaataatagaatgataaacgaacaaaaaagagactctggttaaacaactaatcaaatgtcagcaattgttaacaacgaaaccaaaaggagtattcatgattaagtgatcaagaatggcctcaactgtcactaaacaatagacttaggtactaccactgaccattctttgtccttgatccaactaagtgcctctcaaatgcctaaaactttagctaactcaagttccacatcatcagcacaaataatggtacgagcttcaccaaatgatcatgagctaccaaaccgatcccaaattgatgagtggcagtgaacacagcagaattaacatttatcttaatctccatctcttgagactttacccaaaccttggtaccataccacttgtaatggtgcatagtcatccttcatttaagtattcttctattgttcaagatacaattttattgagaaccacattactcacactaggtatttctttattccatacaaattcatttcgagcataccaaatagcccaacaaatcattgctaccgaaccttgatgttccttaaccacctgagctctcacctattgcaacaacgaattcacttgataagccaacaaaaaaatacactaaaaaattaaatatttttcttttaatttttttagcccctacaaaactcaataaattatttaaagtagacctaaatacttttacataacaattagaatgaaaattctaaattcgtgactgacttgttgggaccaaacaaaaaaaaaatgtccccatattaatgttgactatacattggacatcaaacagatagagaatgaaactccaaactatagtcacacaccactcaaataaagaggacattatcactgatctgggacatgcttcaaattaagctaatacatcgttggaaaataccaaatacaaacacaccttataaaatccgttagggaaattttaaattgccaccacaaattacgtcaaaacccataattaaaatcgacatccccatgccccttaagtcaaaaactcaatctcaacccaaccagtaaaactaaagcaataaatatagccaatgactcagtcacgtgaaatgacctgtattttgtgagcgactcaacaatgaaagccaatgaaacaaccaaaccgtcgttcctcgacagtgtgggttggatgggtccaagtggcaagaaggtctctagacatttcatgaagcagcaaacaaattaactagtaaacctaattaaataaatatatatttttggtttaaatagtgcaggttcttctcttattcatttttcttccaattcgattagtctttaatttaaagtacaggtaacaaattagtgtcacagaatacaagagtgaaattgacaatgaagggtgattttgaacataaaataacatgatatataattattaaaaaataattcaaacttcaaagtgtctctatattaaaacagcatccaaactaggcaaaggaaagaaaaaaacaagaggacaagcgttgtattgaaaattaaaatgtacttaaaatcatcaaagtaaacaaaaccctgtttttatgtcatcaccacatcctactaaccaaatttttattttgttctaaataatttcccagtactttactctttttaacagggtgtgaagaaagagagacagagacagaggaaagtgaaacagacttgagcctgaccccttacaacgcctaatgcttcaaatcagagcccaaaaagtcgaacatcacaggagacaattgtcactagacatggaccagtttccttgtttggttctaataatcagtactcagtagtgatgaaactgagaaagctgaaacctactattattattattgttattattacacacaccattcaattttcgtctcttgttgtcatccttgtctaccattgatgaagtgacacatatttgagccgaggaggtagtagtagtagtagcagtagctatggacatggacatggagttttcgccatctgagttggtgatttcacgttcaagcacactcattggtgttcttgtgcttgatgatgtgtctaaattcgacccgtacccttgcatcaacaccatttcttgcatcatattatagcatttcaataaattctcctgcattgtaaaccgctctaatatagtaaggaacatacaacataagaaatcaaacgtaaattaacggcttccattcttggttacttacacttttaatgtgttgacagtttaagagagaagccttgaaagaagcaaattgctgtatgaatagctcatgagttgcaaagaggagcgctgatgccgcaattattgacggtttataatctaagaacttaatgtctttcaccaagaaaaaaaaaacattataagattgcctcaaaggaagtagaatacaaagcaaaaaaagagttaatgtgaaaaagtagtaccattttgggagcagaagatcatgtctgaagctcggtctttgagagcttgtgtcaatgggtcattaatttcgataaaggagataaagaaggagaaaaatgagaaaggtgttatggatctcattcgccaactcagagtatcaagaatcaacagctccattttgtgaactgtttgagcgtcaaacacaagaccctcttctctctgttacatgtcatagtcattagtaattacttatgttttaagagcacggtgagtgttatgtttaactatggaaagattcaatatttacttacataaatatcagatattgagaatggcgagttcttcatctttgaagctagagagaggcaaccaattaccattagtcttgaaatccagggctttccttgctacataatatgaatgatctatcatcaggtacagggtgataaacaaaaaaaaaatggtctgtttgattgctcagaaaattataactgatgagttctgagagaattaccggaatttcttgcttagagacataccgatccatgtaattgatagcaaggtaggatatgaaggggtctaagttacaggagaactgcgcctgataagtaaaaaattaaaaatcaagttaatttgtattgcttttataaaaccaaacaagtaaatctacaaaacccaactacattacaagaaagtaaataggaaaatgtagagaaagtatagctagctataaaaacttataatttaattaattacctgtaaaatatgagaaattgcctcacttcgaaaaggaacgtagaaatctctgtttttaaagcgagtgaaaaagtttcttgaaggcatatgatcagcttcagaggcaaagagatctggaatagaatccgaagtgtggtgttcttgaaagcttgttaacgagtctccaagatggacctccattttcttaatttcttcctctctctttctttctttagtctactttatctgaatgtattccgctatcttctgcttattaatggtgttagatatagttgtggagtagtactgaggtggtcaaggagagaaagccaaaaaaaaaaagaaaaatagaaaagaaaaaacatatagtcgaaaaagtttggagagagtaataatgagggaaaagagaaggttcgctttctttgcagaaaaagaaacagtggactgtgttagtcttcaacttcaattcttatgacttctgttctcttatcaactccattaactttgtacaacatacatattttatatgcatgttatttactatattttgtcctcacactccttaaaaagatgatactacatgtgaatgatattcataatttatcctttctttcttaaccccaccagcacaaatatagtctaagtaattacaatatcgttactaaccaaaaactatacataggagtttaatcagtaaatatgttgtataattatttttggccataagaatacttttttgtctccctcaaggttggttcgggctggcctttgtaattgaattttcgtaataatgtaaagctctctctatcattactcaaacaataaaaaacaaaaagctagagcctagctatcacctcttatatttttccttttacttttcatcttttagaatataaatgttcaatgcgtttgcataactca

SEQ ID NO: 381462 - DNA, 2057 bp, Cannabis indica
ttttgctaatattcttgataaaattgcagcaatactacataccttcagcgagagaactggcacgattagttggagtttgcaaggctccagtaattcaacattttgcagaaacaatttcagggtcaacaaccataaggagctttgatcaagagttaagattccaggaaacaaacatgaaattgatggatggatattcccggccaaagttcagcatcgctggtgcaatggaatggctatgctttcgcttggatatgttgtctgctattacatttgctttctctttgatcttgttgatctctgttcctgaaggagctattgatccaggtaagtatttccatatggatatatttgaaaatctttttatctttccaaatgcaattgttaataccgagtttatatccatattttcatactaaaggtattgcggggttagctgtcacatatggacttaatttgaatatgttacaagcttgggttatatggaatctttgccaaatggagaacaaaataatctcagttgagagaatacttcaatactctagcatcccaagtgagcctcctcttgtgatagaatcaaatcggccagatccttcatggccatcacatggagaagtcaatattcatgatctacaagtatgaaccagtattctgcttgttactacaacgaaactgttatttagctttctgttttctaattaagggacatattgtaggttcgatatgccccccacatgccacttgtgttgcgaggtctaacatgcacttttcctggaggactcaaaacgagcatcgtaggaagaacaggcagtggaaaatcaactctcatacaaacacttttcagaattgttgacccggctgctggtcagattgtgatagatggcatcaacatatcttccattggactgcatgacttaaggtcaaggctaagcatcattcctcaagatcctaccatgtttgaagggactgtaaggagcaacttggatccactcgaagagtacacagatgaaaaaatatgggaggtgggacattttggtttcttttctattcaatttattgtagtcagaaactttttgatcttacattatgtttattgtctctccattacatgtttcaggctctagataagtgccaacttggagatgaagtaaggaagaaggaagggaagcttgattctgcaggtttgtttagatgacactcattaacatcaacgcattcttagtttttcatggaaagcctcacatttatgttcatgtggcctctacttgcagttacagagaatggagagaattggagtatgggacagagacaactcatttgcctgggccgagttctactcaagaaaagtaaagtacttgttcttgatgaagctacagcatccgtcgacactgctacagacaatctaatacaacaaacacttcgacaacacttctctgattgtacagtcattacaatcgcacatcgaattacttctgttcttgacagtgacatggttctacttcttagtcatggtaccatactaatgcaactgcattctaatcacttaatattttaccttcttggtgtttatcctctattttctcattctttcaactattttccttttcttttttgcttaggccttatcgaggaattcgactctccagaaagattgctagagaacaaagcatcatcttttgctcagcttgtagcagaatataccatgagatcaaattctgatttttgaaacaatctcttattgagtgaatatgttgacaatgatgaaaatcgagtagtatggtctgtctattgtttggttatgatatgaactttaatctagttgtttttgtattataattaatgatttggtattaatgctctaattaacattttccagttataatatatgctctactagttaaaatatattttaatgttatgtgacttttcttttttatatctatatttgtttttttttgagttttttttgtctatttttgaaccatattttgtgaatttaggtaatagttggaaagaataaaaatataggaatgagaatagaaatggaatcaaatttaaaa

SEQ ID NO: 381463 - DNA, 1946 bp, Cannabis indica
actcgagctcaagatagattttacgaacatggacaggttttatgatgataaaagaggcctctcatcaagccacagatagttaaacttgcatctgctataaattctttatttcgtgaagcttctggttctgatgccaaatttccaagacgattaccaccggcaacaagttgattgtcttttaatcaatcatccttgatttttacatgtcatccttaatttgatagtagcctgatgacattgttggggtttcaacctaactttactgaaacggttggcatatgattctgtatcagtccgggataatcagaatattacagttgtgttgatcaaagaaaatttccctttatacagcatcttctgtcatctgaagatcttatttctgtagtgtgaatggaaattgatatgtttggtttcatgtgtttagtgatacaattataaaagaaaaaaaaaagatcacttgttccaactgtaccagttttctcagcatcataccttcagtttgttttggtttttttttctttctttttttttttccacactaaaatatctttaaagacattcaagaagaaaagcagggtatgtagattggagtttgagtctcttccagtctccacaatttttggagaacctgaatgaaattgccagctaggccaacaagcccaataaatatattatgcattcacagctaattggcaataacatcttcacatgcaagcaattggtatcttatggctatgaaaaactcttaagatgataaattgttgagtcataataataaatctacaacataatattctcatctgtcttttgggccttgtcttctttaagcagagaagaaaagggtgagcacaaacaacaatataatgagataaaacattaattgtagatgacatatatataatatacgcacataagtgtttagcactattggatgaaagataatgtagttgttggtgagtcggctgagaataatagccataaaagaaatcattgctttgaagattaaaacacctctaacaaacaagcatgtgacacttttaaagctaaatacactgagcaataagattatgttaatctttattttacttattgtaagtgataggaaattacttccaacttctgaatcattcatcaactgatctcatggatgatgcaggaagttaaataatgctcttcttcccatgcactagtaatcatatttgttttgttactttaatagagtactaagctcatgtattattacaaaacataaacgagtatcaaattcttccaaaagaagaatataatccactcagaaatagattgatcactcatggttcaaaatccccattttttttttcttcccctttttgcatggtatattgtcaattaggccaatgaagtgtgtgagaaaagtaaatgtgaaccccactttcaatgactttcttaattccctccaaggaccttaatcatgccttgttccccgagttgggaaagaaaataagacatcctccaaaatctctatctccccccctctctctctaaaaagaaaaggccttaagtttgagtaggggtgtttacggattggtttagtctggattttcatagtttttgaatcaaaccattataacggttttttgaatattaaaaatcaaatcagaccaaaaaatttctcaaaccaaaccattaagaacagtttggtttgattcgaaactacggtttaagtgaaatttataattattcatatttttttaagtaattatactattttcactaagtttttaatttttatttttctaaaatatatatttaacatgataagtaataaatctataacatataaataatgatataaaaacattctcaaaagttaaacataacataaaaattcaaaaaagttataaataatacatatagtcatatataaaatatatgggtgactatttaatggttacatttttattgta

SEQ ID NO: 381464 - DNA, 5206 bp, Cannabis indica
tattagtattttttgagctaaaatttgcttaaaaattgagttaatgatatatttgacccaaattttataatagtgctaatgtattaaggtaaaattaatattttcttataaaaaggtataaaaaagtcaacaaaatattaaatttgtattgaaagtatatacaaaccttattaaatatgtaaatagaatataaaaggttattaattacattaataagtggtaaaaaaataaaaaaaaattgatatttattgtggtataaaatttagcctatgttatattttgtgtcaaatttgacataattttcaaaccatctccaatgtaagatttaacttttgtgctaaattagacataaaaatgagtttgtgttatatttggtctactatttataattatgcttcaatgaacaagatgtaaaataagtacaaaataattaattaaggataatttaaaaaaatacaaaaataacaaaaaaattttttacaaaaatacggtttgtacgaatattcaatattcttacgattttgtagtttttatttatataaaatacgttcttttagtgtatttttatgttgtgttcttgttattttattatcgatttcttgttatttgcatattatttttttttatgttattttgatgttgttttattgatgttttaatgttattttcttgttactttcatgtaattttcttgatattttcttgtgtttttatagaataccgtaaaataataataaaaaaaaaaaaaaacttgaatgtaaaattgtaaaaaaattacaaaaattagtattttatgtaattatttaatggtaattttttattgtttaaatgatggtaataagataaattatgaatgtaaaattttataaaagtcagtgaatcataataattagtgacactatagtaaataaaaaagtaatatttattgtgtgataaatttgacacaacctttagcatataccatatttaacacacttttagaaaaccattgaagtagcaatttttcataagtgtattaaaatatagcaatacatcacgttttaagcactatattggatatactcttaacatgtgctaattttggatcactttatgcatatcattagagtttatttttataaaaatgggttaaatatatgagcattgttattggacactagtggtgtctagcaccacctaaaggtaacactttatgattagttaacaatttttcctaaaagttattattttaagtcatatgggactcgctcataaattttcaataaggatgaaaaaccctctacacaaatcagaaaaaaaaaatacggagataacaaatctccttgtctcaaccctctactaggaataattggccccataacacgtgtcacattataagtaacagtatagacaacaaacataatcaaagccaccaatcgactattaaaccccatacgaagagcaaatgctttagaaaagaccattcaactttattataggctttgctcatatcgagtttaatagctatgaagccctccttaccaaccctcttcctcttcaaataatgtattatctcaaaagacaccatgatgttattagaaatcaattgcaccgacaaaaaaacacttgcgtatcagaaattacatccgacaacaccattttaatctattagccaaaaccttcaaaataatcttgcaaagcacattacatagcgaaatagcccgaagatcactcataaattttggctgttttttttttttttggaattagcactatgttagtctcattcaacgcttgagggaaatagccttcctcaaagaaatacctaactagcttcacaataccagtaccaagagtattccaatattttgataaaatcatgaggccatactattcgggccaggcaacttgtctagattcatttggaatagagcttttttaacccctgttcctgaaatcgtgtcaagcataacctaattctatgtagcagacacagtaacaggcgtacactccaacacttctttaaaattaaccactgaatgagaaaataaatgagtaaaatactcaataacaactgaagagagatcaccttgccaatccacccacacaccacatgattttttcaatttctgaatagaattgttgcgacttcttgaagtatccatatcatgaaaatactttgaatttcgatctccctcatggagccaaagttgcttactcctttgtttccaaaaatttctcctataacaagacatcattcaacttaatctcagcctatttataattatccaccgacaccctatcacgacccttcttccatttacgaatctccaacttacaattcttaattctttgagtaaaattacatgtataatcatttccccaatctagcaacacatccccacaaagtttcactttctctaggatagtattacttgaatacaaattccaactatccttaatgatcttaaagcacaggggctccttaagccaagaacagaaagcgcaatgatgagcaaccacgatagaattaacatgaactaaatgaagaggacaatgatcagaagtagatacttccaaattcaaaagcttagcaaatggaaaatagtctaaccattgttgattcaccaaccctctattgatacacacctccacccaatccgtaaaacctctgctacgttcccaagtgtatggatacccatacaactccaaatcgtgcaatccgcagttaaacaatgtatcatagaaaacaataatcagccaattaggatatgggttacctccttttttctcattttgagaagcgacactgttaagatcaccaataatgcaccacaaaacccgaatttatcctttaaaaatcgtaattaatcctaagttcttctccttaaaaaattatttggctcaccataaaaacctatgagcctccacggcccccaatcttcaccagtaattaccacattgatataattaaaaccatattccaacacctgaacctcttcctcaactcgccataacaaagccactcccccactcttcccttagacatcaacttagagcgcaccatcaaagctaagagtcacacgcaacttctccactaaatctttgcttcgacaaagtctcacacaaaaacaaatagttgggcctcttttggaccacaagatccttaatgaattaaaaagcccatgggttcccaaacccatggcaattccaggctataacgctcataacgattggtgggcttgaaaacaaaggcccacctttaattcgtttttttgacccattttgtccttcaactacctggcccatattgcgcctagctaagtcaatcacctcattattatcaatcagctcagtacgtcatcttttactctccaataccataacaacgcatccttattcaaactttccttttccattgcaatactttgattacctacaccaggtcggtttccttgaaaatcaacctccccattattattcccttattaaagtatgttttaattggaaagaatataagagtaagagtaatatgatgaagcttctgctattctttcttttccttggccttctgctccatctagtgataaattgatttggggtcatgattcttttggcttttattctaccaagagtggttactagtttgctactcgattactggagtgtgacaaaccttcttcttcacatggtttctttggatggtggatgaaactttggcaccttaatattcatcctaaagttaaaatatttgcacgacaaatatcaaacaattagatcccttccaagtttaatttgaataagcatggcatgctaactgatggtctttatcctctgtgtgatgcgtaggaggaaattactcatcatgttttgtggggttgttcttctctttcacagtgccaaaaacattatgagtttaatcttggagaccctttggttacttatactgattttattagtttatttacttttttatggacttattgccaatctctcaagtaaaataagctattgtcattatatggagaatttagtataggagaaataaaaatgtgcgtaataattctttaatgtctcctgagttggtggtcaattgggctcgtgattttttatgcgattatcaaaagtctcttttgaaaccaaaagagattgtttttgtgtgagggcaacagggctccatgtgtcttctttctttcctcttattgtgccttgatgggtctcccctttgatggactttttcaaggtcaacaatgatacgactttacatgtgaagaagggtttttgtggcataggtatgacgattcatgatacccatgggtttgtttttgcctcaattatttggcacatgattggacattttcaggctgaagttgttgatgctcttgctcttcgacatgtgggagttcaatgttaattgtttggtctagataatattcaattcgagattgactgtcttaatgtggttaataatattaacaataatattcctttggattcgtcaggcttagttctttgtaacatatattgtaattttgctctctttaatcatgtgagtcttgctaattgttctacaatttgtggccgacaactttactaagtttgttttatctatggtatttagcaaaatttagtggtctgattatctggattgtatttaaaatttaatcatgattgatgtcatgaatttttaatgatatctctatcttcctccttttttagaactgttgctctttagggtggaattttggggggttttctttctaaaaaaaagtaagaataatttacaatagaaaagtagactccgtttattttctactcaaagaatagtagaaaagaaaaaatttgtctaatagactaattaaatattattttctacacataaaattattcaatttatcaaaattttgtagtaaagtatattgtcatatatatattttgaaaagaaagataaaacttttattaatttgccaaatcaagataatgttggaatatgttttaccaggatatagatttactaacaagtatgtttttaacatcataaacatgaacttctaaaatgatataaaataaatacataaaaggtatgagaaaccttacattggttgcagcggaattaaatgactccttccgttcagatctctaacccatgtatcctttatgtagcaaagtatcaccaagatctgaacgcgaaactccttcttgttgtttggagttcttcactagtctt

SEQ ID NO: 381465 - DNA, 2285 bp, Cannabis indica
aaaaaaaaacaacattaattaatctattaatgataagtaataagatgaaagagaccggaaacatggcaaaacaaacacaggttaaaaattaggacttaccacccaagctttactagattcacagtcactaattatcgatttgaaacgagggttcctcttatgctttttgacaagtgttgaagctgctttcttatttgttttatgttgattagtgagtttagttaaacctagagaggaatataaaaatattatattatatatattcaagaaaatctactggcacaaataaaaggatgggattaagaaggagtacctgatgttttatttgtggatcgtttaaaccgctttttgacagtataagggggatactgctcttcttcttgtacttcagtcttgacagtagtagtgttgttaagagtattggctttagcattattcaaaatatatttgttgcatccatctctgccgaatagcttaacagagaacaatgaatgaccatgcaacttaaaaatgagaaagtcaccaaaaacaagagaatgttttctcacaaagctctcccaattcatcccaaaatacacgtacttgtcaataatcaccaaacccatacaccacaacttcccattatcatctttcaatgttacttctttctcaaactctttcagatatctccgaacaaatgccggaggaatttgctatcaaaattaataaaaaaaaataaaaaaaccacccaatcatcagtaattaaatcccgcaaataaattttgaaacaaaatcaaaatactagttcaagttcatctaaaaatatatatataattatcaatacatattaaacatgataaagaacgaaaatcattaatcatattcaaaattgtttatcagtaataaatagcggactgttaacataaccatgaaaggtttttacgaaaagaaaaagaaaacaaagcaaaacaaacaaaaagagatttattgggaaacaaacaaaatactaaaaccctataaatttgcgtatgatatcattcccttattgtgattctcaatagattttttcttttttcgtaaagaagtaattgtagagagagagaggtaccagacactcagaagaaaatcgaggcacaaaaactttgaaaaactgaggacattcatcaaaggaagaagtctccatggttgtttttttcaaacccttcaatttttattggaactttctttttttttttaaggatttgttattgaaaacgttaattatatatatccttttataagaattatttttaataggagttttcctaaaatcaccgactcacgtataatttataatttttaaaattttatttatataagaaaatatcatataaagaaattatatatttatatatatggttatttcttttcaagacgtaattttcgagtaactcctattatcttttatcatataatattatagtaacccaaagaaacaaaaaggtaaatactattttagtgagggatcagattttcttattttttttttttttttgagtatagcggtatttaataaataattaattagcttaatagcttaaacattttgagtttaaacctatgatttctttctttttttcatgcctctctcaccactaacttaagcttagtggcttaactttctatattttcatgataacttaattctctattttaaaaaatagcgatatataatgatttcaaaatgatgtttaccttaaataaaataatttttaaaaaggaaaaatcaaacctttaaatttttcttaattggtcaggtttttacttgtgtttttttttagatataaacaagaacaaaacgagaacttagtattctatctcacaatactagtttttttggtttctttctttcttataagatgtacaaacattcatatagtcatatggagctacaaatatacagcccaattattaatgggattttattttggaactgtacataccacccaatactctttaatcaattattatgctaataaaattagagaattgctcaaaaatattagtgcttaaagcatgtgcaaggagacggtatatttttatatatgtcgtgaatattggtccaaggaaactgcatttcacgcagcattttgaagttttgtctacagtgcacggtatatatgccgtgcactgtagacattgcatatatattatatataatttaattaatatttatattattatatttataaaattgagaattatttttgaaaaaatttacaatacatatttttaaaagtgatgtataaatctattcctatttgttt

SEQ ID NO: 381466 - DNA, 8821 bp, Cannabis indica
tgaaagtgatattatgttattagtttacttataacctcaatagttaagaaggtttgtttgagcccttgtcctttttcatgtatacgtaatttattttgtatttgtatacataatatttcccaataatgatagtgatatgttaaaaaataaataaaaaagatgcatgtggcataaattaaaagcaattagtaggtttgatataaagtttctatttttatatattaatatttatttttcctatggtcccaacactcaatttctacaattataggtttggattagaattggaccaagtcaccagtgtttttttttcttgaattttgttacataataatttttattattattattttcaaaagatcattaaggtacacataactcacgtgaatattggtagctacacttatcaaatgataaaaaaaaaaaagagagagatctcattattcattgaagagatttttttcataaaaagttgtcccaacttttttaaaacaaaaataataattcaaataaatatcatcaaattactatgattatttaatgttatattcatatttatggtcgaatttccgcttcacaaataaataaatagatatgtagaaaaattcccaactatatattagctgtgttatcatgaaacaaagacttttattttctccttaacatttataaaatagaacaagataagtggaaatttatatctaattataattgaaagtgattatacattaaaagaataaaattatttattgctaatgttgtgagcataatcaatacacaataatgacaaatatttaaatctaaagtaatccaccttagctagcaagattaatatataataatcataatttgccttttctctcggatctattaaaggatttgttataattagacttttttatattaggaatttaccataaataaatacccaccctcttaagtaataatttatatatttatatctgcattagcataattgtgacttattgctcaaatatatttatatatatatataaaagaaaaagacacaatcaaacaaatgaaacatgtggttgagtataaaaaagaagaagagagtttgatgataactcttgtaatattttgaggagttttgtctcaacagaaaaacgctcattttgattccaaaaatcctaaccaagaagaagaagaagataggaaaattacagtaatattttcttctaatggaacaagattcaaggctctatggagaatcaacaacagaaggtgatttggaagctagagaatcagaaaccaatcctttatgccagactctgctcaaaagaaacagaacactttcttctaatcctttagccattgttggcaccaaagtctctcatatagagagtttggattatgagtaagtgatatatatatatatatatgtatataaaaaaatcaaatcttttcaatgacccagttcattttagtgaattttcttttgatttttgaatttttgatttttgatctttttagaatcaatgaaaatgatctgttcaagcaagactggagaagcagatccagagtacaagttcttcaatatgttttcttaaaatggacatttgcttgtcttgtggggcttcttactggaataatagccactcttatcaaccttgctgttgagaacattgctggttataaacttctttctgtgtttgcttatatagaacaagacaggtgattattattaatttattattattcatcatcattattatatttgctaatatgtattgatcatcatcatcatcatcatccataattgaaaaactgtgatgtgtttgtaggtactttatggggcttctgtatttcactgcagccaatttttttctaaccatggttgctgctgttctctgtgtttggtttgctccaactgctgctggtcctggtattcctgagatcaaagcttatcttaatggagttgatactcctaacatgtttggtgctacccaattgattgtcaaggtttattttttttctatctcaaaactaattggcaatgtcaggagtgtcatatctcgggaattagttcagcatgcccttagaccagacaagtagtttgactcaactttgaaactatttagttcaatgaaatgaagcatttatgttcttgtttttgtagataattggaagcattggagctgtttcagctggattggatctaggaaaggaaggacctcttgtacacattggtagttgcatagcttcattgttaggacaaggagggcctgataattaccggattagatggcgatggcttaggtatttcaacaatgatcgcgatcgaagagacctcatcacttgtggttcttcctcaggggtttgtgcagccttccgttcacctgttggtggtgtacttttcgccttagaagaagtggctacatggtggagaagtgccttgttatggagaactttcttcagtacagcagtagtggttgtggttttgagggcattcattgaaatatgcaataatggacaatgtgggctgtttggaaggggaggacttatcatgtttgatgtgagtaatgttcctgttacttaccatgcaatggatattatacctgttgttctaattggtgtcattggtggacttttgggagccctttacaaccatgttcttcacaaggtccttaggctgtacaatctcattaatcagtaagtaccctttgtttcaacttcttttattggttttgttttgaaacaaacaacttaggattatcttagtagagatttggcataaacaacccatcttacttttcttcaaaaagctaatgcatggtaatatgctcctaatggttacaatttttttaggtaccagacaagcattgtacagtatagcttaaattaatattcgaataattaaaaatcttgattgaattatacatattttttttggatcccaacttgaaaaaaaataatgtaaaattaacactcaattaactaataatttgattaaattgtacttttgtcctgtccaatgttaatttctaaaacttttacttatttgcattataattataattgatatataattttatttttttactttaggtataaaaaattaataaatttgataagaataatattacattcgtggtcacaaacataacctagtgattttactcaatgtcaagaaagaaaaaagaacaaagtatacaactcattttacatactcaaacacatacaatatctataaatgcaatgttaagcaacaaaacttggcaggaattttactatagcataacagcaagtacactctcgtgtaagcaacttcttatatttattattttaaacaataaaagaaatgaattttttcttggcaggaagggaaaaatccacaagctcctcctcagtcttggcgtatcactatttacctctgtgtgcctatatggtctgcctttccttgcctcttgcacaccttgtgatgcttcacttgcagagtctgtttgccccacaaatggacgatcaggcaactataagcagttcaactgccccaaaggatactataatgatctagcaactctactccttaccaccaatgatgatgcagttcgaaacatcttttcgacaaactctgcaggcgaatataatgccatctcccttcttatcttctttgtactctattgtgttttaggactgattacctttggcattgctgtgccatccgggttgtttctccccattatcctcatgggatcagcttatggccgtttgcttggtatggcaatgggatctcacacaagtattgatcaagggctctatgctgttcttggtgcagcttctctcatggctggttcaatgaggatgactgtttcgctttgtgtgatatttctcgaactcaccaacaatcttcttttactacccattaccatgattgtcctcttgatttccaaaaccgtcggagatagtttcaatctaagcatttacgagattatactggagctgaaaggcctgcctttcttggatgcaaatccagaaccttggatgaggaatctcactgttggggagcttgctgatgcaaagccgccagtagttacactcaatggaattgaaaaggtatctcgggttgtagaagttctcagaaacactacacacaatggtttccctgttttagatgatggtgtgttacggcctgtgggatcgggcattgaggtaaccgaattgcatggagtaatcctcagaactcacctggtacaagtattgaaaaagaagtggtttctgacagagaaacggaaaacagaagattgggaagtgagagagaaatttacctcggttgatttggctgaaagggaaggaaaaattgaagaggttacagttacaagggatgaaatggagatgtacatagatctgcatcccctgacaaatacaacaccttacacagtggtagagagtatgtctgtggcaaaagctatggttctcttcagatcagtgggacttcgccatatgctcattgtaccaaagtatcaagcaaccggggtgagtctacgtaacaatttccacacacttgaaccctgcaatctctcatcttcaaagcatatctaactctttttcttatctcagtaattgaaaacaagaatataattgaatatcttagattatatataaacaattatgatgaactaacctgaaggtatctgctatttataggtgcctcctgtggttggcattttgacgaggcaggacttgcgagcacacaacattttgtttgcttttcctcatctggcaagatctaagagcagagagaagccatgaacctctataatcaaagaatggtggtattgactttcttggtgtgagacgactcattctttattctttaaaaagtttgatcaagttatccaggttctctgttcccatactaagagggtcaaataagatgccaaaaagatacgtaaaagcttcattcaaattctaagagagccacataagatgccatgctccaccgggacataaacaacatcaaatttcaattattctttatacatgaatttcagtcaaaggagaacaaaatttcatttctctacagaaaagaaccataaaaagaaatcatggaggattttggtcagagagttttgttttgttttgtttttcattcttcgtcctcatcttctcctcctcctcttcttcttctaagaaccgcactacgaatataaatatatatatatatatttgtcgagagagtcagtaaaatacacttgtaatcttcacttgtcattcttcacgcgtttcttcttcttctttcctgatttctttttattttggcttgcttttccacctctctggaacacagccaacacctcaatgctgcagaaattaattcagagcacagaacaaattaacacagaaaacctatataagaatagcatatatgggagagctcatatgaaaaaattgatcaatttttgtgttgtgtcttatgtgatgaaaaaagagatgctgtaaggtttaagtaatcaatacctttgagttccagggaaaaaattataaccatgagccttttccaaacgccatgccttgttagacaagagagatttgcaatcctgttattatgtaatatcaccttgataagtttaaaattgcgaaccgttttgaaataaaacagcaaaaccaggaccagagaaaagatgagcatagaactggtagcaatcacttcaatcatagaattacctctttgaagctttcccatccacagcttatatagatgagggtttgtggcagggttctacggccttctaaagtcactttactccctacctgaactgaatcttcctgtgcacgtaaaatccaaggtcttttttcatctttgtcttttacacttgggctgatgttcacatttaaatagcaatgatttaataacttaaaaaaatgaattctaaccctggatatagataacttaaaaatgaattcaatggttgaacctttgagaggatgactcaggtttatgctttatagatgatatgttttgtaatatctcgataagagatggatctaatccttttcgaggaggatcgacaatgattacatctgaaccccttacccaagtaacaggatcctgttcaattttgtcaaaaaaattaataataaataaaatgtcatgaggtgtccgtatcatgagacatcaatttgaaaagaaaattgattttgaaaggtaaaacttgcctttgatgtatctgcatgatgccagctgatgctgctatctactgaactcggtagacggttaactgtcttctcaaaagataactttgactctttattgatctccacacatctaacagacctataaaggaatgcaacattgtgataagaaaagaatgttttctatcataacaacattcgagagtttgcaagcaagtatacactaaaaaatgtattcctacctgcattttcttgaggcagctaaggaaattccgatcacaccagctccagcatacaaatcggtgacagatgattcataagggacatatttttgtaacttctggaggagcaagttgaaagcctgtagacgagtagcaatgaatgaaacaataagtaggatttttcacagcttagagaaggtagaacttctataaaaaaaacacctttaataagaaaaataaagtcaccaataagactgttctctttttctctggtttctcatataactgtatatttgcattttgaatgaaataaaaagttacccgagtgtttgcttggccaaaactggatggagccaatgaaatatcaattcctccaacattttcccaaaagtctgcttctcctacaagatgtctccacctattgccaaaaattatctgcaacaccaatcaaacttagttagcaagcagtaaagtctttactgatggagaataccgaaaaacaaaaattcatatttctcaaacaatgtgtactttccacttagagataatctcatatcttacattgttagttgatgtctgaaaattagcccatacagagtgaatcaagtggttattgttccaccgtcctcctttcttccataaaaactgcataatatttataaattaggagaaaaagagccttctcacaagttcccagcctttcgaaaaaaataaataaaagaggcaacttacattggtcaaggcatgaagtttttgcgaattatgggaagtttcatttcttgaattccaaactagagaaacctgtactttacctagaaaaatatgaaacatttataagtgaaaactgatggcatcattgtaaacattaagttagtataagaaatgagtttgggccaaaaaccatttagatatcttttggacgcaggaagcgcagtatcatgtgtcgtcacagccatctgcatataaccaccaaggatacaacaaagttaatcaaatacaataatacttacattttttcagctaaaattactatctaatgataaccatttagtcacctgtacatatcgaagatcacctgtaccctcatcttcatcataaggctcaatgtttaattcagtaatacctgatactcaagcaaaacaaatcttattaactcctaaaataaccaaaagaaaattactccatataacaatattgcagttgtagctatattaatgtatacatatgcaagaacacaccttgtttcaacagctctactgccgcatttatgtttggatgatgagctgaaataataactcatccattaattatgtcaaaaatggttacttttaagggaaaaaactaaattgaaatataaataggaacctttgcaatcgggaatatctacagcattatgagtgccctcctggtacaatcccaccacaggattcactgaagaaccacgaaccgctaatttcgcacgacacctccatccccactattcagcacaattttgaaatgagacccagaaaattgagcagtggaatcaatgtaaaaacaaaaactttaccagtttacaactatcgaaagtgaaatcgtcgacaccgtgagcgtggaagaactcggtggcctcgtcgactatgctaggccggtggagatcgaactcgtgcgagcatccagagcacctgaaacatttcaagcaaatttctcattacaatggttcagtaaagagaagaaagaaaaagttgggaactttagagaaattcgtacgattgaaagtgcgggcagtggagagcgcaggttagcgacggcgacgacggtggggttgagttagggttcagtgatagagaagggggtaattgaggtggtggtgttggcgccggtgagtgagaagtaaagggacgaggattgtgggtgcggagcagggttggggaggtgtgtacgtggcagctgatgattggagaaggcggacgagccgacgggaggcacagaaccatagttccgccggaactttttgttgtgtatggcgggaaaggataatatttatctgctcacccaaaacggtctgaaactgaatcgaaatatcatcactgatagccgggtcgggtcgaagccatttcgactagagatggaaatttataccgcggggatgggtaaccgcggggacccgcaccgaatggggtggggattccccatcttagtggttaatggggcggtggtgggggacaatttcaatacccgaagcggggatggggcgggggcggggataatactatccgcaccatatccgaccccgatatagatatatataattttttttattttttttttcaaactttgagacatatttagtttttattttctattaggttatgctttttttaagtagttttatcttttatcttctatgaattatgaatgcataataaatatttgtgagaatattggtttaatttattttttcaatt

SEQ ID NO: 381467 - DNA, 1480 bp, Cannabis indica
tttagtcacaacaagtattttgactaaaaatacattaatttacaataaattgtaatttttgtgactaatacatttagccatagacctaattttagtcacaacatagaaataataattgataattagtcacaacttttttacttttagtcacaaattttattgtgaataaaagtaaatttttttataatatattattataaatatataaaaaagattttaaaaaataaatgtcgctcatcttctcttgtttcttcaatctaaaccgtatgattatcttgcttcagtagggattgagattattctgatcgttcatcattatatacatttataatatactatatattccttgtattgaagagtacacgtaccaatgctatgagagtgttatatatattattaattaattgagttttacttattttattttaataataattttaaaaatcgttaattatttataatagtaattgtagagacatttctggctcatatatattattattaagtaagatgtagtttttgtcatcaataattaggtcatatgtaccacttgaaattaacacacaataataattttgtataccgacaaattgtactatatgcaatctttatcactatatatatagccaaataataagtacttttattattccatattattgagatgaattaattgatcctatatatatacatgtgaattaatgagattactagtgttttccttttcttctctttattatataaatagtacctataatatgccttgcaattcatggaatggatgtttttatcagcttatatatattattactatgctatatatacatataaatattagagtagttataaaaatagcatactataaatatactagctttaggttattattattattattattattattattattatatatcaactaacccaaagtgtatttgtacttctcaatagtattataattatataaaatatataacttataaaaatcacggttttataaaagttacagaataaattaacttaaataataaatttgaccctgtattttttaaaataatattaaatagtattataaactgatttttatcaaaataaaacttaataataattcaatctatagatattatgaaaaaattaattatgttttctgtatctatttataatagaatttgttatattaaaaagaaattatcgaaaattgaatttctattttgtactattttagaaaatacataattaatttttaggattatttcacaaaaacataaagacaataaaaaaaattacaaaaatacggtttcacggaattttaaatatttttacgattttttttattttatttatagaaaatacggtttttttatgttgtaatcttgttaatatattgttgattttttgttatttgtgtattactattttttgttgttattttgatgttacttttatatagttttcttgttgattttatgttgttttc

SEQ ID NO: 381468 - DNA, 3148 bp, Cannabis indica
tctaaaaatgatccacgtgtcactaaaaaaaagtgtcacatcaccctgttcagatcttaggataacaataaaaaaattgctaactaactatatgaagttacatgagtatgttggacaacttaaactgccaaaaaaataatactcttactaaataatacaaaaacttgttagcaaactcataaagtattaccttgttatgcgattggacacctcaattaaatatttactaacattactatatagattattcgctagttacaatattttttaacattcaaacaaataaaataaaattatttgatatttggtaatttaaaatcatacatatttaatatatagttgaactcagatttatttaattaaatttattaatatgttacgacttcgctcaactatgtgagtagcttcaaatttaataatttattaatatataactatatatgaacaatttagtcagaaaaaaattatttcttacatttaattgttgactactaaatataaattcaaattatagattatcaagttaattttattgaaatataaaatattttgataaaatataagatatcaaattagtatttactcaaaataatattacataagtatatgtaggagttttgtaggtacggacattatttttgcttatacaaataaagatattttttttataatcgattaacttaatttattttttatataacgatatacaatgtagctctaattgaaaaatcgtatttttacaaatgcaaataattttactaaatttcaaatatatatatatataactgtaacagtctgcagcaatagaatggaaccatgtcactgtagaacacaaatttgtagaatcaaactagaaccgaaaattaagaaatgtagaatttaaaaaaattgacacaagagaattatacgtggtatcagttttcttttaaatactcctagtcgacggggctacgctcaaagaatgaaatcaattagtaaagtatcaaatattacaaaggcaatttacttaaataaatttagactccctctagtgattttccgcaaccctttgtaatccaccttgctaatctgatctctgaaacacaccaagtagtgaactcccttcagctattgatgtgtgcttacttccttccgaagtaaagcttaaataaatcttctcccgaagatttatgctatcccttcctcccaaaatgagacttgaaaaagtctcctcccgaagacccacacttgttcaaagcttagcttcaaactattctatgaatagtatgagatcataataagaaaaccaaaacctagttgaacactaagtttttaaaaatgaaacactattctcacaaagaaaaatatgaaaatatgaaactagaagagataaaatcatttggctgctctctaggtcctatttatagaatatagcaaccctggagacagccacaaaaataatttcccagtataaaactttcttaaaatatttcctaatttgcaacatcataatcggactctgcagcaacatatctagaccaaaaaagaaactttctaaattggactaagatcacgaatttgaactttaaacttgtcaaatgaaatttatttgatctgctctaatcaaagcaaaaccgaaatcattaattaacaaaaagaaaattcaaatgttttaaaaataaacaactttccaaataaagaatttcttctcttgcaagaaaagcttcctaaacaattacaatcaactggtaataaattttttcataaaagaaataaaacaactagggcacgaatttatcacaataaaatcaatttaattatacattaaaatgcacattaattaaaaattatttataaactaatttgctaaaaaaacttcgtaaataattacaaccaactgggaataaattttttcataaaagaaataaaacaactaaagcacgaatttatctcaataaaattaatttaattgctcaataaaaatgcatatcaattaaaaaatattttatcaactaatttactaaaaaatacttaacagtaacaatcattcaactattttttaaaaaactctaaatttaatttatttacactacaatagtttattttaaaaaagatgaaaaataaatgcaaccttgcaattggcgttttaaactatcttggatattttatatttgaaatttctcacaacttagagcatatataactaattatagtagaatacactataattcaatgaacatagttaataaataaaaaataaagaacaaaactatatcgtatatttgttatgctcttaataacaacaaaattagtcaccatttgttttgtatattgtatacttacatatggggaaaacggtgattaatttttcaaaatttgtatattaaattttttgtcttgttttcttaattttatgtatacacgattcaggtagatttacttccaaagactgcaaatgtagaagaagaactgataccaatgactactgatagtactccacaaaatatactggatcactgctggcttccacgaagagaccaacaaatgcaaatgcttaatttttttcacgaaaatgggcatctctcattgaggtatatattagaaattggtaaacttatattcataatgtatattaataagttaatttactgctaaattatttatatttttgagtttagtaggattaattccattgtcaagtctagatctgaaatagaaattactccaaaccaaaatacaaaatcgattaaaataaataaatacaaaaataccagatctgaaagttgatcggaggttcgctcaagccatggtggcgagaggtggtggttcggggtcgagcaggacgtaaaagaaaaggaaaaagaataaagaggggtagagagagagagagagagagagaagacaaagtgaatagagagatgtgtggtttcaagagtcgacgaacactgccctagactctgcaggttgtcggttgggggaaggagctctgcatgtgcactcctcgcatgtgcattccttgccagcaaaagagagagaacaaagagatcgacggagtgatgagaaccaaagatctagggttttgggattctgggatctcggtctacggtcttcggtcgggaattggatggcatggtgataatagaagaagaaggaaggaaggaaggaagcg

SEQ ID NO: 381469 - DNA, 2833 bp, Cannabis indica
tccattttatggataaaatgagtatttagaagttataaattgagtacactcttcttcactcattacaatgggtttttttttttcatcttcttcttttgaatgttcgttgtaatgtctaacattatctagtatagtttcattgttgaatatcaaagaaaaagaaatctatatgatatgatataatatgatatttactttgttttttttttttttttatctggttaattttcgtatatatttatggaagcattacataaaaaagaaaagggagttgagaattaataattgtgctctttaaaaaatatatcaactttgtttgtagattttgataaggaaaaaacaaactgagagagaaactacaaggagaaaaataagaaaatatttcttaataatctcaatataacgtttttctttttattataagcatttcgattcatattaattaatgtgttgttttatttctctttaaaaattaaattggataaaatgaaaataatcttttttttttttgccgggtagaaaatctgaattacaaactaagcctacaaattaatataaaataaatataaagaagaaagtataagctgaaatgacataactaggaaacattcttgttggtgagatgcgtgagcgtggaaagatattaattagtgctctaaatattagcttagctttttaatatgctatgagttcggaaggtgtgagtatgactagacaacaaaaaaaaaatatagatgtggacacgattagggctagtacaaacagtttggaggctttggacaagaaattaaactagacctttattagaaaaattatcaatcaatacttcataaattaaattttactaaaaaaaaaaaaaaacttaaaaaataggcaaaaattttagaatcatttgtattagaaccacaagattttagtattttttttgtaagtgctaattgtatatttactcttaggaacatttaatatgtatactatacattgggcaccgagttaatcttccctcgtacggagtcagaatgttttccgcgatgtacgctgtgacaagttttttttagaggtaattgtaactagaaaaaaggaaaacaagtaaaaggttattacaattacaacaaagaaagaggagataagctctctaaactaattctcaatcttgtcgtaatgcatctctagcaatataatgagctgaaacattgagatttctagaaacatggtacaaagttatattaagaaaagtagataaagagtcgataatctttgagatgaaccttaaggctgctgaacgatctttccatttgtgcttaaccttcaatatcagctagaggcaatttgtctttgtgtgtgattgggatcttgattaaggagcaccatctgagagcataaaaaaagacctgaacttcagcgtagaaaagagaggcagaaaccaccagagcagataaaaattctactatcatgtttccttcctaatcagtaacaatcgctcctaaccctgtataatgccttcggttatctaagacagcatctacatttaatttatatggtattgggaggatcgaagtaccatttgtaatgttggtagctgaagcatttcgtactgtagaatgtgaacttatctatgcaatctaataggactcaatcagtgaaagaaatcacaagacttgcaaaagttaggcaagccttgaaaagagatgttatttatagaaggagaggtagagtttgttacagaggaaaacaagaaacagagaaaagaaaatagccaaaacaagtggcatagcaaacggttacaacagtaaaagaaacagtgctaactaacacactaacgaactctaactattgctaacatcccccctccagcgaaatggtgatgaacacactttgagcttgtcttgaggtaaaggaatcgatctgtgacagacttttggtaagaatatatgtcgtttgatcaatagaaggcacatatcaaactttcagtgttttggccaacagttgatccttgatgaagtgttgatcaatttctatatgtttcgatcgagcatgaaatacagggttagcagcaagagaggcaacaccctgattatcaacccagattataggacagtaaggtaagggtacttgaagttctttaactaagtatgtgagcaaattcacttcggcagcaatgtttgtgagtgccctgaactccttctcagtgctagaacgagcaacaacttattgcttctttgctgaccacgatatcaaattgcccctagaaatattgcataaccaccagtggatctcctatcatcagggtagctagcctaatcagcatccgagtatgcttggaggtccattctagcagctggtttgataaagagtccctcatgaatagtacccttaagatacctgaataatcatgtacatgcatcccaatgtgtagatgtaggagcatggataaattgactcagcttattgacaatgaaggccacatcgggtcttgtaagagtgaggtattggagagcccctaaagtacttcggtagagtgatgggtcatgaaagggatcaccaactgaaagagataatttgtgagtagagcttgttggactcgggcaaggtttggctccatccattttaagtcgacttagaagagttgtaatgtatttagattgtgacaaatgcataccagctttggttcttaccacttccacacccaagaaataatgaacagagcttagattcctgacatcaaactcagtattaagttcagtgattagtgtagagatgtgatgactattagggcctggtatgaggatatcatccacataaacaagtagaagaattaaggagtcaccactgc

SEQ ID NO: 381470 - DNA, 2368 bp, Cannabis indica
cggtaaatattttgttgtgatcagaatgcctttttgttagtacacatatcgtgtagatagactcattcatttattgttcgaaatactagcaattagttagcttctaaactacttttttttttaatttaagtgtttatatattacaaccatgtttaacctgggactcgaacccaggacctctaacacacacacacccacccacctatggccacttgagctagcctcaagtagtaaactctaaactactttgattgctgtatataaaacgtccaagtgttctttgagtttttctctttctctgtctttaacctctctttcttctcctcttcttcttgctttgttagtctcaatttaatatgtacaaaggtttaacatggaatgactaaatttaacttctggacatctagttattatatcatgatgccatgttttatgaccaaattcatggaccaaattcaagaaaagaaaaggaatatttattaaataaagtgtatattgatatatagttaataattttgactttcaaaatcataaagtactctaaacactcattattttttctttttttgaaacgaagtactctaaacactcatggttctaacatatataacaatttgataaaaggaaaatgcaattcaattgactacttttcaagaaaatacttttctaggaagaagaatatatatgaatatataaatatatatataaatatatatatatatatatatatatatttaccagccttaatgcttggagtttgacgtaaagttctgctccaactatttttttagtgttatggtgtcctatcaaagaatatttgtttaaaaagactatcttttttctttgatctgtctttcttttgtaagtaaatttttcacttgcaatcagtgacttttctcataattcatcaagtttcagtatttttctttcaattattattaaatcaatgactatttacttactttcatagtaaaaatatatatatatataatgtgcaaaaataatataattaagctcaacaatatgtccattattcctccaatatatttagtcggctggtagttgttgtgggtagttagcaaaatggataatttggggaattcatttttaattaatttttgttttaattcatttaaattatttgtccctttgaactatatattcacatgttagtaaagggtgagactaatgttatgtttcttttattatcttttaaatgcaaattagaaactttattaatttgctaaatgactagtaaacaaaaatgtaaattaatatccttcaaaaaaaaaaaactgtaaattaataggacatgcatatagaaaagaataagatgttctaacaaacttataagcaattatattaacaaatttttaaacgaaatataaaaaaaaattgtttaaactacgaagaagccgacaacaatcttcaacaatcagtagactgtaaaagttttgcttcaaatcgcctaaatagcaatgagacaatctgacatgactcaagctccactgtgccacaagctttaatcttattaatctagcttaatgtttctttcatgccaactaccttagcaagctcacgcaccactaagggcccgtttggcacagtttttagaaaagctaaaagctatttttttgaaaaagctgtgataaaagtgtgtttggtaaacagtcaaaaaatagctttttgaagaatttttggaaaagctacagctaaaatctgaagctgctccagcccaacttttagaaaaaactgttttgattaaaagactataataattttttttatactaaaaccacatttacttatttattacatattaaaaaaaattaaataaactaattataataaaaaaataatattatatttttattttattattaacaaacaacatcaacttacaatttttcttatatacttgaatttctatatttttttacatttgataaaacataataaaaaaatactataaattatttttatcaatgcatataaatttatatttaaaaaaattaaaaatatataaaaaaaaaataaattattatataaaataagtttttacatatttgtcattataataaactagattataacattatcattatcattataataaatcttaacaactcacagtactttgaaatttataatttaccaaacactcagctcagcttttttctacagttttcctatagctgctttttctcacagcacagttacagctactttttcccacagcacagctgtgccaaactggccctaattagtgtgacaactagaatagcttccatgtgacagtcaatagtcccgtgatccgtaaggaaaaataccgggtaagctgtacaatcccacaccgcctgggaaggtc

SEQ ID NO: 381471 - DNA, 1462 bp, Cannabis indica
attcagtttctttttctcttttcattttcttctttaagtactttacaattttattcataatataataattctaggtaaggatcctagtatcctacctattaggttgattattatgctaatactagaattgtcatgtgtaagaaatcctcaaaatagatattctgtgcaaggagtcccaaaaaagtacaggaaataaatttatgacaattgctttttgtgttgaggatgaattctaaataaaaaaaaataaaataaatgaaatccactaacaatataataaatcataataatggcccatgaggatacgcacaaaatctttgcctgaaaatatgtctaatttggtctacatgtgtggttctatgattaattattacaaattgattaacagaaaataattaattgatatagaaatggactaattaatttcgtttggctataacacaaagctagtcttctcgttcctcttattatttacaaagaagggaacatgcatcaaaagcatacaagtatcttataatttgaataaaagtatttgatgtaatttctttccaactaaaaagaaaaaaaaaagaaaaaaagaaagattccttgctcttttacttaattaatgaggtaagatttcttctccaaaaaaaaaattgtttttatgaagtccggtttgattttatcaacttcatcattgtgataattacaataattctacagtgagatattttgatttgatatattatttataagaacattgctattagataataatggtacttaatactttctcgacatgtcgcgatgcgattgactagcgatacttcctaaaattaattacattaaactatatagaacctgatatttaactgaaccattagcgatattgacaacagtagagtacgagacaccgttagtgtcttttaatattgctttatttttttaatggagatcgttaatggtattcattgctgaaaaatcaaaaagaaaaaaaaatacattggtgtaatacattacatggtgtatgaatcaatcttttgatcattagattcttttgtgtaatccctgtcaatgtctccgccgcatgttgctttcatatatttcttacacgaattctgaacccaatgtcggatagatccgaaccaattaaaatcatccaaatcataaagatcattttctttaattaacaaaataatgtcaaatattattaattagttattcgcaatatgaccaaatcagtaaaccttcctacgaaaaattggcacttttcaagtcgttttagataaattgatgagaaattataataaatcatctcaaattatatgaaatgtttttattttaaaatttgttaaaaataatatttttttatactatttattatttatagtcttttttattacataaaaattcatatcttttaaatctttttttaaaatttagtaactatatcatttaaatatcatgatatgtttatagt

SEQ ID NO: 381472 - DNA, 4887 bp, Cannabis indica
ttactgtggtatagctagatggtgtacaatatatatgtatatgtttatatagatacacacccattgacattgtcacatttcaggatggcacagctaccacgactacggcctctacctgcatgttgagaagtgagagtcttaagagaggcttgcaaagaatcgattcagctgattatcaaattactgaaactatatcaagtatgaatcctttctggattaaaacatgctgtggaaatgttttttattttggtcttttcagtgcctatttgatgggatttcagtacccttaagccagtctgtaaacaatatgcattaagcaatatgggtttaagctttttacttagaaccatcttatttaaggtattgccaatttcaacaggtgatgcacgggaaattgatgaagtagccaaagagtgggagcatacacttctgcagaactctatggacaaggagttagatgaactgaataaacgtcttgaagagaaagaggtgatgtattttttttaaggttgaatggattatagctgatgttctgtaaaatacttatcttcatttttgtattgtctatgtagtctgagatgaaactttttggagtttctggccctgtggccctcaagcagcattttggaaagaaaatagtggaattagaagatgagaagaaaaccgtgcaggttaatttacagcttatgagcttcttcatcttattattgagaaaatggatatttactgtttgaaattaaattaagcagcaagaaagagatcgtttgctagctgaagttgaaaaccttgctgctaacactgatggacaaactcagaaactgcaagatgtccattccttgaagttgaaaacactcgaggcacaggtgactatcttttcttctgccagagtgtgcatgtgtaggagtgttatcagtttcttagaatagaaactgttaaccaaccatgttgtatgatcttttacaatgtatttgtcccagattctggatctgaagaagaagcaagagaaccaggtgcagcttttaaagcaaaaacaaaaaagcgatgaagcagcaaagcgcctacaagatgaaattcattctataaaagcacagaaggttgaatgtttattacagcctcttatgtctttcaacaatttcataactttattcgatgtaccttatttattatgtgaactcataggttcaattacaacaaagaataaaacaagaagcagaacaatttcgacattggaaagcatcacgagaaaaggaattgctacaggtatatattacttagtatggtatggatgaacagtatcatttatgcaacaaatagcatttagatagtttttggcttcagtagaaatttcctcctgagcatttacacttaaatacttaattgttaaaaagatttgttcaacacataaattcgcttcttttgtcgtgaatcatggctggtagtttctgttcagtagatcaccttacaagatatcttactataaataggtttattttctcatccataagtttcttttattaactatcttaaattttattgattacccgatttcattttgcctcattcttcaatttgggtttttatttgcaatcttagttgcggaaggagggcaggagaaatgaatatgaaaggcataaactgcaagctctgaaccagcgtcagaaactggtgagttgagtgccattgcaatagtagtaaatgaatgcggggtagaaaaagaatgagatagagaagggcacttgaaactgactgatatgattctttcattcaggttcttcagaggaaaactgaagaggctgcaatggctaccaagaggctaaaggaattgctagaagctcgcaaatcttctgttcgtgacagctcaggtatgaggcatctgagacctctgttatgatatgatttgttgaccaaatacctagaacaaaaactaggaagcgttaaaggatgtttctaccaaatctctgtcatttcctttttatctttgatttttttcattgtgtcatttagcagttgctgccagtgggaatggaataaatggacaggtaaaggtcattgttttctttcctcagtctgtgttttcttctttcggagtttaaattaattcaatttgagctatattacagagcaatgaaaaagtctttgcaacgttggcttgacaatgagtttagaagtgatggtgaatgtgcacgaagtacgttacgaatacgagaagcaaagtcaagtgtacgtatttgagttgtctttattataagcttaagtttttaactaaaccattattttagcattttaaaattatggtgtaatccccaggcgagctgcactggcagaagagttagccatgctgagacaagtagatgaattctcttcaaaaggccttagccctccaagaggaaagaacggttttgccaggtactctttgtgtttatgaaacaaataaataaatattacataattcaatcactctcatcaactttgtctatcagagtgtgctccatgtcaccaaatgcaagaatggcacgaatatcttcacttgagaacatgctgagcatttcatccaactcacttgtggcaatggcatcccaactttcagaggcagaagaaagggaacgtgcattcactagccgtgggcattggaaccagttacgttccatgggggatgcaaagaatttgcttcagtatatgtttagttctgttgcagatgcaaggtgcggttttgacctagtttccttaacaacttttcagctatgaaaataatcgactagtgtaataagattgtcgaaaatagaacccatggttttgcttttttaggtttttatttcatttcgttctctctgcagtttttctcctccctaatttttaaattgctactcgaacttatatgtagatccgttaatcctgatcttactgcacattttaaattatctggtgtttagcttgccatttgcaatgttgaatagtcaagaccatccttattctcttttgataaaattgtttatcagggtttctctattatgaattttgcactgaaagtcttagttatcaaatgacatatcttcacaggtgccaattatgggagaaggaaattgaaattaaggaaatgcaagagcaacttagagaacttgtaggtattttgcgtcagagtgacatgcggagaaaagaagttgagaaggaactaaaagtgagagagcaagccatttcgattgcattggctacatcagcaccggtgagactttttttgcataagaaacatcacacatgaaatggcaattaatataatgttatattacattatttgttaatccaagagctttattttcagtaccttagaaattaccttattgtttcaattcttcatcatggccttcagcagggtaactcacccaattcattggaaaacttggctgaagaagtgaacggtccattgtctccagtacctgtgcaagcacataaacagataaagtatacagctggtattgctaatggttcagtcaagtgctcagcaacattcttggatcaaactcgaaaggttaattctttctccctggattatggcattttggatgtcttccctcttcatctattaagtgagtttctgttgttgcacttgcagatggtacccattggccagttgtcaacgaaaaagttagcagctctaggacaatctggaaagctatggagatggaagaggagtcatcatcagtggctgttacaattcaaatggaaatggcagaagccgtggaaactgtcggagtggattagacaaagcgatgaaacactcatgagatcaaggcctcggctacaagctgctagaagtgattcaagatgattaatgttcgtggatcactggccttttgccaccaacattttatccttggcctaaaaagtattggtcccaaacacgtggcatgggaaacatagaaataactgcaggtaacaattataaatttcattcacattttcttctaaaataagatcttcatgatcagctgtttcagaaaaagaatgttacttgtagtgcctattttgaatgatgcagcatcagcatgctgtaaatatctgttgcggatctctgtttatgccaaggatgattacctgattggaaagagctaggtttgtgatctttaaaattttgccatggctacaccatccctggcgcatcttgtaaacctgtgttgatgctagtcaggttgcccacatagttagaagaaggtaccaaaggtgtgacagcaagtcatgaccctctggctagtaaagatcctcaaggaggagttctacaatgtttgttaaccgcaaattttaggagaagaaactcttctgtggtcatatagatgtgtatgaaaatgtgtttattttttttcttttcactatattttatttttttgtgtccaagttgtgataatgtatattgtgtgtaaacacaatatcaacaccctgttgcaagtttttattgcaacacaaattcacaacgaaaagaaaactctctttgatatttcccccctccccctttccgtgtagttttctgtgtgctagcattatagttcttgtaatgattgtatctagtattcatttttgtatttaaaacaaaagaaaatattcaatggcatcaaaatggaagttaacgcaagcaacctttatattctcttcattgatcgtgtaatcactaatcctttgtcactttaactcttttctaaccttttatcactgtgggttgcctagtaggactgggaggggtaaaggtctatttggtatttttattgttttcaaaaatgtgtttttgagaaatgagaatattaaatagctcttttctagttttcataaaattgggtttttttatttttacaatttctatttttttttttttgctattttttacgaaattctacatataaa

SEQ ID NO: 381473 - DNA, 3276 bp, Cannabis indica
ctaaacacctctccagtctcttcaatcagttttactcaaagttataataaaaacatgaagctctaaaaattaagaaaattatccaaataattacaaactccgcaatgcagcactaacttctaccatctttactcaatgatcccaaaacaaaaaaaccctaaaaatcaaagcttgatacacaaaaagaattcaaataatccaaaagaaaaaaggtcatatagtataatcaaaatactcaaactacttccatctttttgccgaccaaggaaaattaaaaaaaaaaaaaaaaaaaacaaaagcttaaaacaaaagactttaaatcaaaatcaagtacctggagagggataaacagagactgaagaactcgcgtgagtctacagactttccggaccctaaaatggaggccaatttatccattacaatggagatccgataccaattcacaaacgaagctcgtatacgccgatcagcggcaccggcgccggggttaggtctctggtatttttccgccgcagtggccatttttgctggcttaacacagctcaaatcaactttaacgaattcagaaacaaaaaagaaagaagctttattgaattattggatgttacagaagatttagttgaattgaataatcaattgtggttatataaatcataattttgagagaaagaattatatgaaacattagaattttgggaagaaatgttgaacttcttcgcaaaccactctccactaccaaatattctaccttaagacaataatataaattaattataataattaaatgatcattttaattgttataaaataaataaataataataataatgaaaatgaaaatatgaattttttttttctttttaatgaagaaaagggggggtggggttagcatgatagttctaactccgttcacgaatgttcgctaagatcctaggtggcgagattgcccttacgttatatgagtcccgaccaagtactagatgcatgaatgacctagattcgaactcatgatttctaactcgtgaaactacttgagagtaaacactttacaactaagccactcatttaagagcattgttctgtggcactgatgcgtttagtactttttaataattttctataatttttattaaattaaaataagtgaaacttaatattcaattatattagaattatactaatagtaatattatacatcataaaaatactaaacaccatgagtatcctttgtatttctttccatttaaataatgtcaagtatgcataactaactaatgagatgaagtttgggatatttcataaaataagaaaacaaacttaagtttgggatacaaacttacaaaaaaaattatccagatgggtttataatggtaagagtagctactcgctggcgtggtcgccaggtttatgagggagtagcaaactcactcaagttaatttattagtggaatggagtatgaaatcttgttatgccaccaaaggtgaaaatttttgtatagcgtatgtttcatttggtgttaccagtagcaacacagcttatcttccgaaaagtttaagtacctctttgttgttcacggtgcggagaagaatctgaaactccagaacatgctctattttcctgctccggtttgattccaatgtggcatcggttggggatatggccggtgcttcgtcgatgtatacatggaccaatgccagaaattctcctttgtctctttgaaaagttatcttgtgaggcttttgaattgatgatgattaccttatggttgttttggtatgaccgaaactcagtattgtttggtaatatgcagttgagattagatgttgttccagatttaactcataatcacctgtcagaattcaaggagtatgttcggcagggtcttcatttgggattgtgcttttcaaacccaattgaaaaacgtcttacttggtgaatgccacctcctcctgattcctttgctcttgtgaccggtgctttggtggttcttgggagaggctttgtcggattaggtggagtgatacgggatgctgcgggtgtggtttggctgcttggtcatttggtgtgttaggtgatttttttgttaatgtgatggagctgcttgcaattagattgggtctgactcttgcgcatcaatttagtttcagtatctcaattattaatagtaattctactgtaacaatcggttggattaatgtttcacccaaattttattttttagtctattttattatatattaatttgttattagctgttgttggtggtggtacttgtagtgtcattccgtgatctacgaatggtgttgctcatacattaacaacatatgttactagttgaagagagtgtgtatggacggagacttgtccacgatttttaaattcttttgtagtagtgatctatcttaataaattatatttattttcatttaaaaagaaagaaagaaatcatataaaaaaatctaaagtcattacattgtttagagaaaaacaaaactcaatgctaaacaattagtgaaaatggagaccaagcgaataactctaagagcttaagaaaatgaaatctcttagagaacacaaagatcaaggcacaataattatgaatggagaggaagtgtaagggtaaacaatggatccaatgttaccatcaaagctaccacttctcctcaaacaattgtaagactttttataaaaccataaaaaaaaaacagataatgacctagacacattgtttgataacttaaaagaataataaaataacaatataaatttaaaaaataaaagtaattgtaaatagagtatattgagaattagaatacatcaattaaacactaaataagctaataataaaacaaatatatagcaacatcaaacttaataggtaagatggaattgtagacacaacaaaaaattatgatatatttgcattaatttttaatattgtattttaatattcaattgtaaaagttagattttccatgcttactataggttaaaaattaaatgataaataaagtatctccaaattggttaggtgtgcttatttttttattaaacctcaaaataaccttctcattttaacttctattcccgtctctttgtcttaacccgtccaaaccgagtactaatgtttatttttttttcatatttaattgttatattttagttattgtgataatgagataaatataaagattgaatttaaagttcacatcatccgctataaaaaaaatatagtagtttgaactttctattttttataaatatgtgtataaatt

SEQ ID NO: 381474 - DNA, 1437 bp, Cannabis indica
tttttttttcagatacaataatttatgacaaagtttttagtctaaaaaaattagaaaaggaatcggatgaggaacgataaagaagagaagattgtgtgttgagtttgctgaggttgtggagtagtactgggatgaggggtagtatttatagtgggaagataagagaaagaagaatttaaaaaaaaaaaaaagtgacacgtcaggagccacgtaagataagttggaccgagagcaaaaggtaaacttggaattgaatttagtgagagtcgtgggagggagagaaagaaagatagagaaattatgtctggtgggggagttgtagtgacagaaggggacaaagtggggtccacaacacgtagacctggcctgaaatgaggcaggcatgtggggttagatgaccgccatgtcagctaagaagagagaaaaaataaattttattttattttttattttttggaagttaatacgcgtcagccaaccactcgtcttttttctggtaaaattgttggtcgtggacagcgatggggtgccggcacactaggcaatttctactgttgtaacccttccacgtgagacagatgcccaaataagtgcactatggctgtttgttaatttaacactgttttcccactttttctttttaatttaaattaaattaattatataaataaacaaatcccctaatacagtatatatcttatcgagaaaaacaaaatcacaaactacaatatgttttttttttcttctttttctcttttgcaatgactcgtgctcaacttacggtttaaggcaaatagtacattggtggtgtgctgtgctgtttcaaagtcaaacctattcggccttgatcaaaataattacggaattgtttaagtattaaatttatattgtttcttaagctttctttcatttttgtttaattatgagcaaattttgaaaaatgttggtgtattatataaagaaataaaattgtcatcccaatttttctttgataatgttgcgtataataaattgataagtggcaaaaataattagtaataggcgaattcacggatatactatattccctttcgtggagaaagagatcatgtccaaatagtatgttgcacggataaagagccatctgatcatagagagtgtttgaccagtaagtttgcggaaggaaaataacttgttctagcatcgctcttttcgtaaggtgaataagcttccctaacagatcatccagactggcagaatgatacgcttaatgaaggctccaagcctcatacactactccaagtgaattaggcttgctagacaagtgttactttccgaataaaagagtactccgtgcaaggtgaatgacaccatccgaccagcgtccaatgcacaacagttcgcatatgctgaccagaggtcacgagttggatatttttagagatatatcctatatat

SEQ ID NO: 381475 - DNA, 575 bp, Cannabis indica
atatacattgaaaattggttgaaccaaaatgggaaacatacatatatacaagtaatgtgtgtataatacatcatgtcaataattgaggaagaatgggttgtgggtgggttttgagatatatgcaaagggaacaatttaaagaaggtgaagccaagtcaatatcaaaccgttggcactaaagtgaaaagagctgtttttgggttttatttgcctcaaaattcttatatactactcaagtgtataattagtatatatgaatgtttctaacactttgtttttgtttttattttttaaatataatgttttttttttaatcttccttggtcaaaaatagcctagtttgactctcattttgctttggtgactattataggagttaagttgctaatgcttacactatgttatttaaaatattttgttctagtgaaacaactagaaaaaacttcacaaaatgtctaatatttatatggtacaaagtaaaatagtttttcaaaacggtttttttaggagaatattatgaaggagaatataatggtaggaaaatgtgtaaattgtgtttgattgtgtagggtaat

SEQ ID NO: 381476 - DNA, 2049 bp, Cannabis indica
attctatttcattacctctaatcaaatgcgacctaactgtatttcctacttgtattattggcaaaattgttgtttggtcctctctgtgcttaaatttcagtttagtttggtgacatttgtgatatagatatttgaaaaggttagcatccagaaatgtgaaagtggctcagtaaatggcaaagatgataatgatagacttggatccacagctgtatacgcatttgtatatcccaatttcatgattaataggtaatttaacttataatttcttacttctaaagtttgttattttattttatattatggaagagttatgagtaaaatggtgtttattgtagatatggtccatggatggatacaaatcttgtactcccattaggacccaacagatgtcaagttgtttttgactattttcttgaaccttctcttaaggtaaaatctctacttattcatacattacttgtaacaatcttttattaattattgttatttttttgtatttaaaagttgacttgaattataaataatatacaaatgttattactaaattatataatgatgttaggacatatattttgtacctgaaattaagatataaataaatgttagttaattttctttcaacttttttatggggacaggatgataaggcttttatagagaaaagtttacacgacagtgaaaaagtccaggtaggtgcttacttttgtagtttagtattataaatatttatgaaaaaaaattacattttgtacctttttttgaaaaaaaaaatgcattttgccggaaagataattaattacaaatatattttttgtataagatgtttacaaacatgtaaaagcttttcattaacttgtaagaattgtttgaaatatgtgtttacaaacttaaaccgtatttttgtaaataaaattagaaatttttatttttatgatttttaaaaaaatataagttagcaaaaatatagctttctctaaaaaaaaatgattttattagaacaaaattaaaatatatatatatatatataggaaaaaacagtaaaaggtaactagttatcttggttaccacttgggttcgagtcccagataaaacatcattgtaatatataaacgtttaaaatcaaaaaaaaaaaaagttaaatcctggttacccttactcggccgactcaaatttttttaactttttctttataaaaactcataaaatttgtattttttgtaatatgccatgtttttttatatttttgttttttaagattatgggtatatttgaaaattcgggaatatttattggattgggttgatgattgtagatggaagatataattttgtgtgaaggtgttcaaaggggtctggagtctcctgcttattcagttggtagatatgttccaagtgttgaaattgctatgcaccattatcattgcttgcttcataaacacataaacaattaacaaaatgatggtgaattatctgacatccttgatgtttctgaaattccatctcatgtcaatggtgaataaatattgtacagaattgaaaagtaaataaaataagaaatgaaaatagacaagaatttttaagaactcaatagacgaatcaatagtttaagttcaaaacatatcaaagttttaatctaaatcattatataaccctcataacttatgcataataataatacttatcgttgaaaaatctttatttctttaactatgagaattttgaatgacaaaatagtaacaaaaaaataaggctaattagtaatttttccctcctgaactttgacatgtagtaaatcgtgtcccctgaatttttttgcccgttaaaaattctccccgaactattgagaatgttaaatttaaggatttttgtctaatttcattcaattttactgtttcagtaattgtttatgtactaaaccatactccccagactttgatatctatcaaatcatagacctcaaacttcaatatgtactaaatcatgccccttgaactttcatcaatgttagaaatttttactaaaattagacaaaagtccttaaatttaa

SEQ ID NO: 381477 - DNA, 828 bp, Cannabis indica
actaccataataaaataaataatcatattccttaatcaaggctgtcctttacaattctataggtagaaaaaaaaaatcttaatttgttttgagtttcattttagaaatttatctgaaaaaatattaagtttatattaggacatttagttagttagagttaatcttgaatagttataactatttttcagctcaggtaataactttgcctatataaggctctctgtaatcattttgtttcaaagagaaaattactctcatcactcaatttaaaattgtaataaaacaagaaagaaaagataatgttatcttttctcccaactgcaagttatagatgatatgtttacatagccttattagacaatatatatatatatatataatcatttttttttataattacaatgatgtctaatgaaatgtttttgtaatgttttattaaatgctagataacatttcagtgtttttaaaacgagaatatatttttgtaataaaatagcacacaaatggaatacaagcaaaataacaataaagcggcttatatataattttcttttgctaaagaatatttctcttatattattccattgtagattattaggacatccattctcttagctcccccctcccctctctctcattttttcttttgctaaagaataatttttactctcactccactactaaacataattcatgcctacaaaagatgaaatgaatggcaatgatgacaataataatgagaacacaaaaaagtgtgcatataagcattgatattataatatagggtaagtttatattgttagactataatgtagtgtatgtaatata

SEQ ID NO: 381478 - DNA, 1986 bp, Cannabis indica
aaacatttgttgggcttcagagtcctggttgggccagggaagaggagttggctcaggaaaaaggtggggcttttgagacaaacaaacccagtcatgggggatctcaagggtttgggctatggtaggcccaatatcaggaataaggtccaggttattctcattatgggcaaagtcgggctgaggaagagctaaataatcaggccccaaaggatctctatttccctcattttgcacattttgaaattcatcatatgccacctcagcaaccacctcacctacattctcttccgtatcagctacattcccactacttgtatgaattctgacaatagcatctcctgacatggccctaacgtctttgtccttttgcatgcatgcaccaccggatgtctcgccgctgggacactgctccagtgagccgaccgtaatgttcgtctgaaccttcttttgatcctccaacagggttctccttttccacgtacctttgcgtccaaatctgcctcggtcccactccgggccgttgtcgcagtcgatcacgaacttagagaaccctttcccacccatcgtgaaacagttacttctcccagtgtcactcttgatccaagttccatacatattgacagctttgccctccttaggaatcaccatcgccgtcgtagctttgcagaccttatcccagtgagctaatctcccacagttaaagcaaatgagaggaagcttctcatatttaaactgtatacatgattccggctttccatcagcagtaaggaaaaaacccgccggtaccgagtgtgccatccaaacatccacccaagcctttaagaaacccctacgaaccagttcttctctttgcttaccatcagaattgacaaaggagcccacctttttagcaatgattgatgcgttatcattagataagcatctgaccggaaggccatggaattggacccaaaaacgggctacttcgaactctgccacctttacttcgccttccacaggccagggtttgaggtttaagagcaccccattaaccagccaaggtcttttctccattacatactcacagtcgatttcattatcgaaaaagaaacccattactccatcctcacactttttcatcctccaaggcccaaggcggcgccaaacccccgtcaagatcttcttgaccacggaagtcggcatgtctttgcagcctatgactttacccacataagttttatttgccaccacctcttccagtgtaatgtcttcaaacaactctaataactccatctccatctcactatccctttgcaaaacttttcccacctccacgttgatccctgccacctggatgtccttactcggcccagccatcgaaggagagacacaccctaacaggacagaaggaaccgcaccaccaccgatacagggcagagcaccgagaaaactaccacaaaaaaactgaaagcactgaaacttaacaccacacagctagacagaccacacaaaaaaccccagggaaacaagaaaaaacagcactagtaaacaaacaccactaagggagagactctacaaggagccatacacaattatttattctactctgattggtattgtggagatagactctatactagccactgttttgtataatggcgtatggcattttttatgatcaatagacactttatttcaaaaaaggttagcttcgtccctagcttgatcatttctccattttctcgattaagcatgatttctccatggagcaattctttgcaaacaacttggcttacactaaatactaatgttattctttggatctgattgtgctatggcaatagggctgcagaatgccacagtaccatttctggtccacaaactttatatattatgcatattttacttttttgctacaatggttctaatctattttgttgtttatttttatttttttatttttgttgtaattaaattacaattacatttaaaaaataattaattttt

SEQ ID NO: 381479 - DNA, 5098 bp, Cannabis indica
aaaaaaaaaactgacagaatgtgacagagagagaggcggagaagaaggggaaagcagacaagctacccaaatggtaaccactacaaataaggaaaattataaagagcttataagatacaatctagcatgaggaaaaaactatgtagcaaatgaagttaaagcgctacttagaagccggacaacaatctttaaacacaaaacgcacccaatgtttttaagatgtaaaacaaagatccttctccttcatggccaataagatgaccaagatacctgcaaggtccttccttgtagtggtgaatttctggagtaatgggccatacaattctcaacttatgaccttgcttgattgggacaaccttcacaagaatctgaaagcaaataatacatgcacagaaaaattgatcattcaatatttatacagcataagggtttgtttctctacggagaccaaattttaatccaaaaaaaaatatttatacagcataaagcataattttgtgatcaaagctagtaaaaatgtgaccttgcaatcatttgactaaaaaatcaagcgcaccagtcatacctgtaggtgttgtgatgagcaaggttgaccaggatagcgagggctgctgcggtctttgtttttaatatctagaaacttttcctccacaagggcttggattttgtccagattatctgacagtatatgtgatccatttatattagtaccataattatcataaattccacaatattacccaagcttaaaaggccttgcttatttaaatttggctacgaaccttttccatatacaaccagatgcatgaggttcgctgaataattttcttcataaagtttaatcagctcctgtctagtatccaacccttttgcttttggacggacctccaaagtgtcccagtttcctatataggtgagaaaatgtaggaatagtagacattttaaaccagattcagtaatgttgcctcataagacaagtattacaggatttaaatattttatcttaaaaaaaaacgatcaaacacaaatagtaacaaagagaaactaaaggaaagaaaatagaatgacaaaacaagatcaagcaagcttcagaagcaggtcagattgacatagcaagaaattacaagtaagctgggcatggttgacaacttcgacaaacaagcaacgtgcatcttaaccaaaagttaactaaattagctttgaagatttaacaagaaagtgagcagcttgaggatgggcgtagaaaataaaaaatcaagtattagactaatctttcttgaatatatttttacatgaagattagatcaagagctgtttatcctatatggtatctttgctaagtaagctttcaaaatcatgaaacagcttcaaacagaaaatgtgctccacagaaattgaatccagataaaaatcacaagacaacttcaaatgtcaagtgtgtatcaccaaaaatgtctgattaaataacatgactctttcaccaattgtcccaaactaaatatacaaaatgtgttcaacaaagcccttcagaaatagaaccatcaaagaatacacaacagaatatcagcaccctctcgaaatagagtttgaccaaagagaacgtcaccaccaaacaaatgtcaattcaccagtttttcaataaatatacaactccctgagcatttgaaatatcagagagaaatgcagcttgaagactatcaacactctaatattgaatttgaatatataacaagtgccttagatgaattatgccattatttatcttcagcaaaatccagttagtaagtacaatagatattttgcttatatagttaaaattgaagaaattatgcaaatataagaagataaaaaggcagggaaaaaattaagaggggaataggagtgaagaacatagtagtgtcttagcagttcacccattcaaattaatttctggcacctagattgctttcaactttatattaatatacaacataagcaaacagccaacatatgtacctgtactgaatttgtggaatggatgactctctgaactcaaatgtttctggagctgcacccaatcaagttaagtcatcagtaaattttgataatatcactaaaacaaggcatcaccagcctctaacattcaatagagataatgtaatagccctaacggttttataatattttatagtcataagttttagctaaatactacttgcaatttttaaaattccacaatagaccctacatttgtcaaaatgaatcagagataacctttaacattattctagtcagcctttaattaaaggttttaataaaaatctcaaaatagcattattcaaattatataaactaattaaaattaaactaaaaaaaaatcaaaaaatcaaaactaaattcaaacacttgggttttcattaaaatcttgtcaaaaagtttgactagaattaagtcaaaagttatctttagtttagtttggtaattacaaggttatgaaatttttgaaaaataaggttatgcctgcctggtatgtagttaatatgcagggatataaattcgtgcaaaccttctacaaaacgatataattggttcaacaattcattaaaagcaagataaacaccaaaaaatcttgaggagttcagagcatgagacacaatactttagaaaaggacatccatttctcatactacagaaataaatccatgaataaacatttctatagaataccagggaaaaaaacatgcattttataagcagccaaaacataaatattgaaagaaaaaaaaaactggcagactattttaaacatttaccaaacataagcaaagagaaaagtaaataaataaaatatatataaaaatgaaaatacatgccatgacattaaaatagtatatttggcatcatataatgtcatagaaagacttcataaagaatcacagccaagtaaaaagggtacctggtagattctccaagtatcagacagtaagtttttctgattttctggaacatacaaaacataaaatatttaatgaagatcatcaatcaacagaaggaaataaaagattgagcatgatcagagcataaatgctaacccgaatcaacagctttgatttccctcgtagtagcatcagcagacatcaaaggtttgataaaaaactgagcaaatctgaacataaaaatagagatacttttagatcactattatcatggttacactgacaatattaaaaataaaaaatgaaaatgatcgaatcgtcaacctgtctacagcctcttcaaaacaatcagcgttcacatcaaaataatagttggtgtgctcactagctgtgaaggcatttgtgctgcccccatgctttatttttcaaacaagaaaatacagaacaataagatgagttgtcaatatacaagtagatgagcagacatgcactaagatcagacagaaattttccttatatgagtttatatgtgtatacatacatattaagagttcaagtatatgacataagtcaaaatctaactacttaactaacaaccataatcgtaaaaatttgaacccatggcaacataaatttgaaatcaaaataagaaaaagaaaagagacttttcgagtcaatatgcttaagcgcatctccaaggtagctctctatattttataaataaaatagttagtgacttttgtatgacccactgcaatcacacctctattttcgtaaaatgtagattgttttaatattactgtagacttttaagtaatgtaattatccaataaaatttactttttattttatgtcccattgttaataaaataagactcaggtagtcgcaaaatctctctacattttaactaaaaaagaatgtatgagcaagtccaattagaataagctacattctatgtggagtgtgatttgagtggttcacacgaaaattactaactattttagctttctagctaaaaaaatagagtacctttggagacgttctaactagtccccttaatttgctctaacatactcagatttttgtaaagtcccccttcatactacagcaattccttccaagaaataatatccattagattttcgataatacacctaaattttaactacctcataactagcacactgtttaaaaggataacttagtgacgcctagaatttcatgttctaaaaagagtaagcatatacgaccctacattagcaatgaaacctcgttctggatgcctattctctgatgaatctcatttcaaatctctaaaatcacaacgttttagtcttcacaagtcaaactgcctatcattttaaataaaatacagacataacaatttattgccttccggatacacctagtgaaaaagtagataaaattatataagaacaaaaagattctgtgaattttgagagtgagcacctcagtaatgtactttgagtaactgtcctccaaaggatacttttcactagcataaaacagcatatgttctgccacaaaaatcaatatctatatcaatcaataaactcttaaacattgtggttttcagaaaatacacttgtaattaatccaaatttcatgtatttcaacataaaatgtttcatcattgaccaagaatacttcaagaaaactaccaataacaattcattctcatcaagaaaaactaaattaccaagaaaatgagcgaggccttcgaggccatcggggtcgcagaaagatccaatacgaacatccatggaagcagcacactacaacacaaacaaacaaacaaacaaaattaagcaaaataattctcatgaaaattcaagaacaatgaagttgaaattatgccttatcagtatccggatcgctgattaaaagagcctggagagaattagggaggacgatcctcctatactctcgcttgtccgtacgagctttcacaatctcgcccatttctcctttcccaaccgccatttctgtgagttgttcttgttctgtaaactcagaagaagaatgagtttggtttaatacgccgccttgttgaccagaacagaagactctgccttgccttctaacgattctttactctataggcgcggcaatctaatctaagctcagctaaccttgcaccatttttttctttatcctaaaa

SEQ ID NO: 381480 - DNA, 2790 bp, Cannabis indica
cactttattttaccaattggatatatgtatattatctataagtacactttttattaaagttaatctcactaaatgggtgatagcattgataggtagatattatctgattatttcatgtgataaattattagtaaaatatgtcatttattatttttttcacagggctcaatggttgattagagattgagaatgagagagtaaatataaagaaaggggattattggaaattcagaaagttaaagttgatgagagagaagggttggaaagtgagagcaggtaaaggtaaccgttgtgcaagaggtggatttgatgagttggaggccaggttggcagcccagccctacgtaacacatctgtgtaccccaccacagaggattactccttccctcacatggtctcgctggtcgttttggtacccactacaacagtctctctaaacaaaaataatttgattccgaaaatacccttgcactatccattaaatgcaccattttctctatcatcttcctcgttctaacatcacactcgctcaaaccctagagctctctcccagtttcagaacttgaagcgattttgaactaaagacaaaacaatgtcgaaagaagtaagtgaagagggtcagactcaccaccatgggaaagactatgttgacccaccaccagctccactctttgattttggtgagctcaagctctggtccttctacagagctctcatcgccgagttcattgccaccctcctcttcctctacatcaccgtcgccactgtcataggctacaagaagcaaagcgagaatgaccattgcgggggtgttggcttattgggtatcgcatgggccttcgggggcatgatcttcgtcctcgtttactgcactgccggaatctctggtatggagttaaacacttttaactcagtgtgaaatttcaacaaacggtatcgttttcttaccagcttaattgaaatgggaattttttgttggttctctacaggtggtcacatcaaccctgctgtgaccttcggtttgttcttggccagaaaggtttcattgctccgagccgtgttctacatgatcgctcagagcttgggagccgtctgtggtgttgggcttgtaaaggccttcatgaagcatgactacaacaaattcggtggtggagcaaacaccgttgcccccggttacaacactggtaccgcccttggtgctgagatcatcggtaccttcgttcttgtctacaccgttttctcagcaactgatcccaagagaagtgcacgtgactcccacatccccgtatgttcatcttctcctcccttcatgtcttttctttttctttttctttcaatgtcccttgcatggtgaaatcttcacttgtgaacaagtaattaactaactaattacaataataaacatcaggtcttggcccctcttcctattgggtttgccgttttcatggttcacttggctaccatccccatcaccggtaccggtatcaacccagctcgtagcttcggtgccgccgttatctacaacagcgaaaagtcatgggatgaccacgtaaggatattagtcagaccaatatttgtattttaaagatctgaatatgttataatattttacagtgttttgatacatgggttcttgttttgttttgagcagtggattttctgggtcggaccattcatcggagctttggccgccgcggcgtaccaccagtacatactgagggcagctgccattaaagctttgggatcattccgtagcaacgctaccaactagaaaattaattattaaattcataattattttgtttggttgtgtgtatgagaggttgatcaatgtttaatttttaattttttactttttctttttttttcggtatcatctttcatattttaaaaccttttttttttgttagcttgtgaacctgtgtattatttgttcatgagtagtggtgatcagaagaagtgttctttttattctcttcttgttcttcttctcatattatatattatccatttaattaatatttatctcttggctaattatactccctatttcccagaaagcaaacaaagtaatttattgtgtttcagagtgttatttaattttgtcgtttttcacaaattaataatgtaacccagctgttaagtctcgatccatctggaaaggtatttccttcaaaaactggcaaaacatagttaacaagtgttttttcttattttagtttaatttcaaaacaagagtccaaagttgaaacgaaaaagtaaaaagaaaaaagaaagctgagaacggtagagagagagatgaagtagacatgataggaatcctgtgctgtgaaattattgaacactagacacgtgtcgtacaggcagtgtgcttgcccgtctgtttgtcattgcctcacatgggtgggtgaagcttgataggtctggttcactgcttttatccactgaatcttaaaatttacaactttatttaaaaataatgatattaacaattaattaagtgaatggattgggaaaaatgataccgagattgttatcaagaacttaaaagtgatggttctatttgggagattgtgaattatgtgcgctattgcaagtttctctctatttttatgattaattgtaatttttcttgtatagttagaaattgtaactacgcggcctataatgtggccaaataggtatttgctaataaaattacgggtataatagagatatttaatatcttttgtaatgaccatgaggtctaaccttaattttatttataaactttttttacaaaaaaaaaaa

SEQ ID NO: 381481 - DNA, 2346 bp, Cannabis indica
atatcatccacatatacaagtactaaagtaaaatacggctgtgtgtctcagatatgtatgataggcccaacaaagacaaatccgagaacagattgatgtagcttctcaaacctacaggctttataaagtgtacaaaccaaatgctttgactaacttacttcaaaatcaggtgggtgctctataaacacatcatgcaaaattccatcagggaatatgatagactctagactttctcttagcaggtacaccataagaatagaataaatagagggaaggagttcatttggggggaatggcattatttggtaaagggttgtaacccaagtgagagagaaaagggctctcaaattccctggattatttttttgctgttctagtcaatttgataggaaatgcttatcagactacagtattcacatattgctgttgaactttccaaccttagtataaagctagtcttagaacaacacaaatgtttgtaactggtttcaccacagagttgaagtattcagtaaaatcaaccttgtctgttgggcaaatcccttgccaccaatctagctttctaattgttgcttgatcttgaacacccacacccacacccactcacactcaatatcttttttcctccctattgatttccaaatcacaagtcatcagtcatggctgccttaaattgttttcttgctgtaatgtatgtatctaccacagattcaggttctatggtagccacaaagatctaaggtttggagtgtaataccagccatttatcataatatgtgtaattgtgtttgattataaaaagaaaatgtgtaaaagaattttgcaattttttttttcttttttaagctaatacagtcatatctatatgtattttgaattagcctcatatacataataagtaggtatacttctcttcatcagtgacaatgtgatgacaattctgaactttaccacctttcatttcctcaagtcaccacttaaagctcttatttaacatgtacaaggatcccttaaaagggaaataaaatcaaataataatgacaaaataaaactctttactacaccctaaaaatatggaatcaataaattacaatagttaacttacacctacacaagaataatactaaaaatagaatgattttcctacactcctgtttttcatgctagtttttaatatcctatattctccataggtgtggtgatcctatctaattattcaagtatcaatatggaagaagaatgctaatcatcactattaatgctgttttatttgctctttctttcatacaacctattgttatttactctcaaagaacataaaactaggtgttcttttcaaatggtcatatatatatttgcatttgggattgtaattatattctgacattaaggtgttacatgctgcttgttcgacagggaaccctgcaaacgacattgtcaacctaatcaacgacaaccgaacatctcataagctttccatactaaatgatagtccaggactcggttgtatggccttgcaatatgctgaattatgcaagaccaactgcacagccaacaacaccatagactgcaaaccatcagaagatgacttcactgaaatcttcgctccaaactgcggtgttgagctaccaacttttggcaccattactggccgcatagttggttgtcaatcaaagtatctcgagccaccattagccttttcacacgttctagccaaagacaagaaggctgtatctgttcttcaaaataaatctcattgggaggtaggagtaggcatggttggagtccataaagggcctttcttctggtgtgttctgttcagcagcgggcgaacaaactccacatttgttcttgaaaatcgcggtttggggattaaacagaagaaaggttgttacagtggaagtagcctcccatgcagttcaggccttaagttggctccttatccaagtaatgttatgattatgagcttgcttgtttatcaactacaacagttatactccaatgtattcttagcaatgtaaaaaaaaatcgaaactcacaagacaatgtccaaaaattttgtcacatgttttattgaaacttttatatttgttgagcaaccaaaattgagtttatctgtaatgttatttaaattcttgcaagtctggaaaatggtcaacaagacaacaattatatcaactttagagtttaaccaagtattgcttcttttgtttaaagattccctcataacaaagaaatgattacaactgcaagtaataaattaactcgaaaagatactcttaaaagaaaggggttttttcatttttatatttttaaacagtttttttttttgcattttacggaatt

SEQ ID NO: 381482 - DNA, 3527 bp, Cannabis indica
aaaaaaaatataggaccattctggttcatgaacctcaaccactatataaccccttctccttctttattctcaaaaattcacatttcacactcctcttcccaaacccacaatctctctctctctttatttgctttgccaaaccaaaaaaatgtacggacagaatagtacggaatcggattttgcattacttgactcgattcgaagacatttattaggcgaatcggatctaagattcggggctccgattatgaataacagcatcaactcgggtatttcgggtccggttttctgtcgtagcaccagtttcagtagtctctacccgtgtttgactgagaattggggggaattgcctctcaaggaagacgattccgaggatatggttctctacggcgtcctccgcgacgccgtaagcgtcggctgggtcccttctctcggatcggattccagtgaggttagtgggagtgtttgcagccagctcaccacttgctcctccgacgcgaattacgcggttaaatcggagccggagaccttaccggccgttaacgaacctcttgagtgtacggcttcgagtttggaaattccggttgagaaacagcggaagaagcctacggttgtgccgtcgaaggggaaacattaccgcggcgttaggcaacggccgtgggggaagttcgcggctgagattagggatccggctaagaacggtgccagagtttggctcgggactttcgagacagccgaggacgccgccttggcttacgaccgcgccgcttaccggatgcgtgggtcgagggctttgcttaatttcccgctccgtattaattcgggcgaacccgacccggttagggtgacttcgaagagatcttcggctgagacttcttcgtgttcttcgtcggagagtgtgtcgccgaagaggaggaagaaggtcggtacaacatcgccggcaccggaggtccggttagagacaggtaatgtgaatggggttggtgttgggcaacaagtgggtatgcaagttgcatcgtgtatacgtggcgagcaattattggctactcaataatgctggacaagtaaagcaaaggaatcaatattatatgacattgtaattatcttagacgggattttcacttaaattttggatttttgttctttctttttcttttattttttctagtaaaaaaagaaaaaatggaaaggaaaaagataaaaagaaaaaaagtgttatattattctacaataggctatgcttgaaaatttatatattttaaattacaatataggcttgaattagttggttttgtgtatatatttcttctacatattggtttttttgttggatcaatataaatggaaagtttctttattattattttttttaatttaatttatatattggttatgcaattctatccattacatttggcctatgaaaatggaaaattatggtaactagtgaaaggtgcaatttgaaatttgatttgaataaaaggaatcttgaaaaaagaaaaaagaaattgctccttccacaccttatgctggacaatatttttaaaattaattattttattgataaattataatcttaaataattatattttcgatacaataatgatttgatcattcaaagtataaataattttcattctttctacagtctatctataccttatattttaaacatgttattcaaccttacaacaaaaacatgtaatttaaagcttattgttgcatgaaaattactcataaagatatgaaaatttattttaacataggaactgtacaatcacacttcttatccaaaagtagttttgtttataaagttgttttaatatatatatatattctcatctaatgtaccaaataatcaaagtaaaggtaaataagttgataagttgaattttagccaataatttattgaaaaaatttatagtacactttctaaagtatttcggcatactctttctttgttgtttaatagaattttttagtttaaattatttttataatcgtgtacgttgtatttatttacaatcaattataaatttaaaaaaaaattaataattacagtgctaaagttatttattcaaattatttaaaaagaattatagatgataaaaaataactacaaaataaaaagaaaaaaaaaatgactttgataataatctttgatattctagttcacacctacctctcctaatcagtggaaaattattaataccttaaacatacagtaaggaagaaaaaaaaacagacattgtacctcccttcattttgacttatgtacattctttacatgaaaaatctcatacaaatatatatctaaaacaatacaatttaattcatttattatctaaaaacaataatatctatatgtacaaaatttagggcttaaagagaggataatgtggactatgagtggtcaatgccttgcttgcgtgtacaaaagtaaagaaatttacattttattattgcttttgggagaaaattgttagatttttcttcccacaatcacttctatttcgttttagtttcccactaatataactttacgtctcttcaaatcttaccaaacttagggagaaaattacaaatttaacacaactttgtttttttttttttaatttgtatatattaaaagaaactctaaaattatttttttttttaaaaaaaaaactttaaaattctgcttttaagattattaaattaattaaatagatattataatgttatcaagatgtttatacaaatatagaaattatttgaacagaagagaaatatgtttaaacagaaaattaacaaagaaaaaaaaaatgaaacataaaataaagaacacatatgattatacgtgttatcatcttttctttcaaattgctactagtttacggggtcatgcccagaaaattaaatttattagatgaatctcaaatgattacaaaactaaattaacttatacaaattaagactcctttcttgatttttttttcaccactgttttaatctatcctcctaattaaatttttaaagtgtcgagatcttaaacttcgtagcacttgcatacttcctcctaaagagtgactcacgaacaagacttctcccgaagcttgatgaacgatatctaatatttgtacaatttcaacaagaaacaatacagtaataaacagtaatagattactaagaacttattggactcaagttcttcacacaataaagaaacactctaaaatttgaaaataatttagaacatgatacaccaagagagataatcaaaaccaacgacctaagggtgtctttatacacttcagaaacccttcaaaccgtggaagaataaacaagatactgccacccattaaatgaaaaatcttcccaaacatgttagtcaaattctattcaaacagacagacaatttttacaaacagatacattgaactttgacagttttttagcaaagtaccttatatataaataaggaaactgtaaagtccttttttggcaagttagttgacaaaataatttttccatttatggtaagatt

SEQ ID NO: 381483 - DNA, 3538 bp, Cannabis indica
ttcaagtatccatccgagtatcagctgttggatccgggagagacattatgtcttccgtgtcctgtaagctaggacaaggtagggtgaattttcgcttatctattagtcttgacttgttctcgattccgtgatagaattgtaatagaggatattgattagcgagattatgaggttaatccccttccttcatacgccatgtggcacatgctcgaaaacgcggacaataggtataaattcttaactcgatttgatgtgtatattactgtaaattaaaatatgggttaggaattcatattttgacgtgtaaattatgtatcagggattgtatttgatagagcacttttggttgtaatttattttggattgatctgttaaaaattattgaaatgtttattattgtgttttacaccggctttgaaaaatggaaacgtctattttgcagtcgttataatgtttgactttaagaaaaattaacaggaccttttaataagctagatggttttaaaatttagtgattttggaataaatactgataattatttttcagatttatttttctgatttaagaatttagtttggaaatacttacataattaggtctgtattcatagttcgaaaattataattttactattacattaaattacaataagtaaaaaagagattaattttatggaaaattattttagttctaaataatttataaacagagctaaacaattttgagtaattttaataaatattaacttttcttaaaacctatccctaaataattattatgaatttatgttattgtctaattttaattaaaaaaaaataattaaagtcttgtttatgtttataagcaaagcccaatttatttttttacaattttgagaaaattctagtagccttaatatattttatgatacgaggctaaataataataccgattacacgtgtacaaaaaggatgtatatatatatttatagattacacgtgtacaaaaaataattaatcgagacatcctaaaactagaaataataataataataataataataaaataaattactataataataaatgaacgttttcattcttggcttcggcttgtttacacatgcaatctggcataggaaatgtatataaagagccactgggttttcttgtttctgtacctttttgatcactgtggcgaagcatgtcccgcatttgtcgtttgaagtcttcccatctacacaagtaaattcacatatgaagtggttaagttaatttacctgtgataattggatttatattcgcaagacaagtgtgtttaaacggccattttcacctgatatttggattatcaaacaacagagctaattttctcttgtcgggtttgattgttttagcatgtcccccaaacaaatagcgccggtggccagtcaagaagtgtggaaaattgccaccctgagtggtgacaaacacttcactgtataggcaaaccgtgtaatcaagagcagccaacctagatgagtggccctatgacacgttttaaaatcccattaagggatatgaacaaccaaactcttgacttgaaaacagaataagattttgaagacactagaaatgtgaaacatatcatgcaggacatattaccttaaaaggagcaagctcttctgcagaagcaagtgtatctttcgtttctaaacgtggaaacatttgctttagtggggccatatacttatctgttttataaatgtttccagctgcaacataaaccgaagtagttttatcgaaacccatgcccctgagcatcattcccacctgcagacaaaaggatggttacatgaatcattgaatgttgcaacatattcagttgggagtgtctatacctccaaaggagttaaaaggacattttccatccactcggttttgcaccaggccttattactctgccccttctcctaaattttcctctccaacttctttctcgagcaatatccatttcgtgtttctcttcctctccaccatcatattcacagcatgaaaaagcaaaccatatacctagaaaaagagaaaattaggttctattgtagctatctacaaattaagttcatttatacctcttcaaaccgaagatgtacagatacatattttccatcactttggtagcttttcttaaacattcgatccaccattttctctgccagcctctttataggttctgagaatcttagtgcttcaaaattggctaagcatctaagcccttgtacacttgaaggaactgcatgagccaatctgttggagaatggtgcaatccgcacagccctgcaccatggatggaaaactatatatatctgttaccgtacaaatacaagtctacatcaagatgagaaagaggggaaaaaaaagcatgtatatttgaatcggtcatccttatttgagtacaacagagaactaaatcactttagggagagttaaaggtaaaaacacgtagtgcacatataacaagcaaaatggacaggcactaataatgttgtacatacgtagttaagttagtcaaatctatctagtattcaattacaaccagtaaatttcttaaaacttcaattttggcagttaagttagttggagacaatactgtctctcaacacttttggacattatctttaaataccaacctcttctacggtcaaagataaccttttttgaactttttcttcgtcctcttctaaattctctctgtacaaaataaagttataaaactcgatcctcttgtgggttcataaattatcaccattgtaacaccaaatgtgaatcaataaagattaaagtcaaaggttgttccatctggggagtaaacagttgtcactgccaagcaactgatcgaacctcgttaaattggtatgattgaatttctgctttgcacttatgtcttttttattctcttgatagttagttcatgttattgcactaattgtcatgtcattgtttttcaaagtgattaaaacaccataagtggtatcagagcatcgggatgcaaggatcaagatttggtgattggtgatcaagactcgatcaagatgaattcaacgaagttcgaaattgacaaatttactggggagaatgacttcagtctaaggaggctcaaaatgtgtgctctgctggtgcaccaaggcatatcagaagccattgaatcaaaagctcttgaagatatcaaggaggataagaagaagattaaagaaattcaaaagaaggctcacaacaccatcctcttgagtcttggagatgaagttctccgagaggattcatgtgagaccactgtaattgggttgtgaaacaaactgtcctcaatctatttgaaaaagactttggccaacaagttgtaaatgaagaaaaggttgtacaccttaagaatggatgaatctggtgaactcaggaaacatcttgacgagtttaacaaaatcattctcgaactcgacaacattggtgtcaagattgaagaagaggatcaaggaattgtcctattgagttcactatcaaggtcttatgaacattttgttgacaccat

SEQ ID NO: 381484 - DNA, 4663 bp, Cannabis indica
ttatttacaaactttttgaccatattaaacttagaaagatatataattatataatattaattttaataaagttttgtacatagttttaagtattcttcatcttaattttaagttaacattaaaaattaaatttataattagatgtttaattaaaatatcaatccaatctaattattaattggattgaattaaattttgaactctaattaaattgaataagatgattatattttcaaaaatctaattaataattagattggattagattaagaaaaaaataaaaggtttttacactatatattaaaatttctaacttctttagtgtgaagcaaattttttttgaaaaaatactgtataagttttatactgtctactgtattaagttttcacagctgttccacgattatttcttagttgttccactgttgttttaattgttgcattttgttgttttacgactgttttataaaagacagtatttttgtaaaatattcgtgtggcaataaaattgtaaattttttacccaaaatatagtattttttgtataaataaaaaaaataaattcgatcagatgtataaacaccaaaaaaataaaataaaaataaaataaaaaaaagaaaaagaaaaagaaaattcacgaggaaaatatatagaaaaataaaaagaaattattaaattaatgaaaaaggagtaacaaagcaaaaagaccgtcaagtgtggagaacgtgaagtagtttatactctagtccaattaacaaatgcaactgcaatgaaggccctataaattctcacattacatatctaatttacaaataagcaacaccaacaatggcttcttctcattctctatttatttttgttattggggttcttcttttccaattttcgtatgcaaccttaaacgacaataataataatgaagatcggcatcttagcttttcgtccagcacttattttccaaaacgacaagccgaaaagctgataatggacctgaatttgttcccagacgacgatataaacgtggcatcacatgagttcctattcgaaaccgataagatgatcgtggaaaggagtttccagttccctcatattgccaactctgctactccttctcttcaagaacttggccaccatgctggttattaccgtctccctcattctcaatcagcaaggtaatatattacatacataaatattaattgctctctactgagttgagttaaccatcacaattgtcgtcattttctttcactttgtgatccattttactgctgattgcgtctagggattttgaatttgtacccaacactatattatttatatattgtacaactatttagtttacttttgggaagaagaataaacaagtatatagggataaatgccttaaggtaataaatgtggacacgtttaaataccacttcacatttgtatgtactttcagaacagaagttgcctttataacaattatgaattttcaattatggtgactgcttagctggctagtttttatattttaataatttctggggaaagatactcttgtcagaattagtgtattttattgagaaatgaacaaatgaaggagaaaaactgagttttctttcttttggtaataataatacaatagaattgaagataaggtgacatgatttaattaacttatgtttctattaaaattacaggatgttttacttgttctttgaatcaaggcaaaacaaaaaagatccaattgtaatttggttgactggagggccagggtgcagtagtgaactggctgtgttttatgaaaatggtcctttccatattgcaaacaacttgtctcttgtatggaatgaacatggctgggacaaggtactgcatcattcccatctcctcctatcaattatatgttctttttccctttttctttttgaaatttggttgtcgcaaaacttttgtcgtttctccattgcgcttaaattattgctcaagttcgaatattttgagaaaataatccaccctctaaattagtcaacactgtcggtgtgaaaagtactaaaaattatgctttttatatttaaccaggattattcaatctaagctaatctttaatctttattaaaaaaaaaaccaatctttaatctaaagttgcctgcataatgtactaatattgttgaccagttttgcttgattcttcccttctatgctcaccaatttttttttttcctacctggctataatgcaatggagaacttggggagaaggttaagcgctaagctaataatgccacttttaacgatgtttttcaggcatcaaacctcctttttgttgaccaacccaccggaactggtttcagctatacttctgatgacactgatattcgtcacgatgaagatggtgtgagcaacgatttgtatgactttttgcaggtaataaattttaatattgctaaaagaatttaataaaaatcttagctgaacagcagaccatcttatagccttgctctaagttgaagtctagtatccaagtgtatcaagtagtattgctctttgcatcttccttccttaggcatttttcgctgagcatcctcaatatgttgaaaatgaattctacataactggagaatcatacgctggacactacattcctgcatttgcctcacgggttcacaaaggaaacaaagcgaaggaaggaattcatatcaatttcaaggtactctaatacacctcatgttactgtacttgctaccacagtaaacttatgaaatgatccattaaaacataacgtctgtggctgaacagggatttgctattggaaacggcctaacaaatcctgaaatccaatacaaggcgtacacggactacgcacttgacatgaagttgattacaaaagcaagctataataagattaataaaatgcttccagcatgtgaacaggcaatcaaaacttgcggtacttatttttgctcaactatctttctgtttattttacctggtcatttacttggccttacaacttatatattggaaacataacaggcaccgacggaggagatgcttgcatctcttcttatgttacttgcaacaacatattcaatagcatcatggacgtagtggatggcataaatgtaagtacacaaacacacagacaacgggataacaatctctgtttttgagatggcattagctcttgttgaaacataatgaatctccaaatctgattgaaggttctcacttctatgcagtactatgatgtcagaaagaaatgtgagggagacttgtgctatgatttctcaaacatggagagatttctgaaccagaaatcagtaagagatgcccttggagttgggaacatagacttcgtttcttgcagttctacagtgtatgaggccatggtaatggactggatgagaaatcttgaagttggtattcctgctcttcttgaggatggaattaaggttcttgtgtatgctggggagtatgatctgatatgcaattggcttggtaactttttctctttttatcttcactcaaaagtctacctcatagaataaagctggcttttctcaactaatattcttccactaattgtcaggtaattcaagatgggttcatgcaatggactggtctggccagaaacaatttgattcttcatcaactgttccattcgtagttgatggtgcagaagcgggattgctaaaaggccatggacctctgactttcctaagggtctctctctatctatctacatatatatcctacatatatatgtttaaaatttatttatttggagtcaatatgtattgggtcatcatatatatatttgtgtgtaatttgcaaatttaacttttggtgcttatatgaaaacaggtacatgaagctggtcacatggttccgatggatcaacctaaagcggcattagcaatgctgacgaggtggatgcaaggaaaactaaccacggccgagacagatgaaaaaatagcgcccctatgatttccccaactcagttagcattttccattcacaagattgaacaattattgtgtttctaaataagtactctaatcttatagcactaatctatgttcatatcgtatgcaccatggacttcgtttcacgctatttatgtctattgttgtaattttacaaagttttaatagaaaatttcatattgtggcgaacatatactaccactaaggaattaagccaccctctgcccggcctcgatcctacttttacaattttgttatatatctgccattaaaaaaaactacgagactatgggcttgtttggtactgcttttaaaaaaactaaaagtaattttttaaagaagttgtaataaaaatatgtctggtaagctgataaaaaacagttttttgaagaattttttgagaagctacagctgctctagcccaatttttagaaaaaattattttgattaaaagactataataatttagtttttttctatgttatttgaaagtgatacaataaaaaattaaagaaaaaatattattagttattaggtgagattatttgaataaagaacaataaataatcacgtaaaaatgaaaaataattatttgaataaagaattcaatatacacatttatatatatgaatctcattaatcaaaaagaattattaaatatatgaacaataatttgtcacgctatatgtt

SEQ ID NO: 381485 - DNA, 4033 bp, Cannabis indica
tcaagaagtttcttgtcctgcaagtggaggtgatgaagaagctgtgtctcaaaatattcaacgtgggaaatcattcccctttttgaataaatctatagaagagaagaaaagaaaaaacataataaatgaaataaggcaaatatttggtgaacttccactcaaaatatgtaattagcctttaagtcaaactataatggatgccttttaaatcctttttgcccatttcaaagtatgtaattaagttttaaggattacgagcaaaaaaaaatgaaattttaaggttagtgattctgaagatttataatggcatttgttcaactaagtaattattcaataattgaatgtaagtgagaatttcaattacactttccaattactacgactccagtagtgaaagttaagtgtaaatatactatgattataaaatattactattattaaataattaatattttcttgtaatatataattacaaacatatatttgtcaattgtaaaaattactaataaacatcaaaagctttttatttcaaatgcacctaaaagaaaaaaagcactcctgtcaagaataaattcagcaaccaaacttcgattaaagaatgatgaattattcctaaacaacaaaattaagtggatggaaactaaattacttattcaatctcatgaaaatcattataaatataaaatatggctccaaatatgacttattttgaatgacagaatcattcattagatagcagagaccaactcaaaaataataaaaaaaaaaattggtattactttatgaaggaagcattcattattttattggtttcttttttcactgaagaaaaaggaaagggtaaaaattgcaggccgaagcagaataccatggccgcttacaggtcctgcttttatacattggattccactttttctcatataagttctccaaagccataaattatacctcactgaaacgatttcctaattgaacagagaagagtatgagtggtaatgacaccgaagaatgaatgagtgagcttgcagaaggaacagaaaggcatagaacatgaaaatttgaaagaaacaaaaaaggcacatcgcatactcaactattgtgagagttcaagattcatcaactccaatgtactgggaatgagaagcagcaagaagggcagctccgattcctgatccatcattagaatgctcaataacgatgctttccgagactttttctcctagcaattctgctatggtagtctccaggcagttgctgtatgcactataatgctcatacagtcctccatccaaggctatcactgtcttttggttctccccttccttggttgtttctcttcccaatttcttcagaatgcccaaaatcccagcagcagcaaggccggccccccgagttgcaacaacgtcacagagttgaacaattaattttcttgctttcagagacgaattaggtatctgaatcaaataaaaagatatacaagcattttatataaaagccatttagcaaatacaagaagtaatcacattgatttttctccagcaaatattaaagtttgtcagatataaaataaaatgcaaaatggcccccatgcaacagaacaaaaagttaaaaactactgtgaaatttagtctgaaaatgaacaagactactccaacaatttagtgaaagattaagtaaaataaattgactctccccaccctggccaaggtagaatgagagaattacctccaaaatatccctcaatttttccgctacaaccttaagatcgggagaagtatcatggtgcattgcagacatgtgaggagtcctgcatgtttcatggttagctataagtacaaagtgagctcaacaaaattacgcaaagcatctcagatgtggaatattaaaatatcagacaatcacaagaattgtcttgagaatttcagaagttacatagacaaagaattatacaatatattaaggaaggggattcaaaattggactaatgtagtaccactaggctatgcagtctaccaaaaaaaaagttatcctaatacgatcatgttagaatatttggattatattacatagcaaaaagaagaagaggaattatcaaattaatcattattaaatattaaactcatgaagatgaaggattagataaaaataaattatcctattttttaatgagattaagttaacctaagggaattatatagattcttgaattaattttttcaatatcctcttcaacttcataataaattcacatgacaaaatagaaaatatcaatgtaaccaaaagactaaacatgcgttttgaatatagttaacaatcttacattttgaataataataataatagttaacaatcaagtactgttacgattaataaagtttgcttgtgctgcctctactctaaaattcttagcatagtggttcattaaataaactagccaaaggtattgttctgtcaaacacaataacaattaagtacaaactaaacttaacaccttcaaaactactacgagacaccaaaaaatgcatgacaattcatgaatgatgttgaatttgttctcaaatctcatacaaagacaccacacaatggaactaaccaggtaaagctgaaaatagttatgctgacaataagtgtagattctgcttaacaatatcaccactactacaagacacatacaatgcaaagttcacgaatgctatccagttttttctgtttgtggtctcatagcaaggcaatagacaagtgacttgaccaggcaaagctaagtacagttatttctaaagattgatgcggcattctaactaaacaatgcaagcaccataaaggtgtatcacatgcttgatggtatttctatgcaacaatacaaaccacaacaaaattataactaacaatagctagggagcaacatatacaacaaagactaatgaaacttagaggtgtaggtttaacctcaatataaatggaattcttagttttggtggtacggtatcaccaaaaagagaaacttcttcggcaaccctacataaaaccctgcgaacaacttcacccaagtacatgccagaaatgagtttctcgaaaacctgagataaacaaatggaagcactaccaatgtaaaatcatgtttattaagaaaataaagcaaaattcatagatattatatttaaatggtaaatataacaagatcagaatacctgttcaccagggtttaaactctccgcatccaaggagtgatcatactcggttagcggtaggtgtgatgacctaaaattaccccactccatgttgataacctgcagtgaatttagcactggatttgagattttaccttcattgcaagcttggttccttaatattgctagcaggatccaattgaaaaactgaaatgcagaaaatacttcgcaataaaactgacatcaagtgaataacagccataaaacaacactgaccatctctcccgacttaggtagaagtccatgccattttggaatggcatgtgcgcattccacatatgctgcatttgttccagtgcctaaaataacagcagcaacaacatccttgttgctatatctgcctccagctagtgtcccaactgtatcattgacctggaaaaaacaaataaacaaaattaagaataactaaaacttgaatgaacattctcacaacaaaggagaaatcttggatatggactcaaaaacagaataaaatcaaaattattgcgtacaagtattcctaagaagctaccaacgtcaacctaccagagctgacacacgcatatcaagaccttgcctctccagagctcttgtcaactcagcaacaacatcttggccaacctattaatccagaaaaataaataagcaaatgagagaaggaaaaaaatggtttcattattcccttagtaaaccaaattagattgcaagtagctcccatgctcatgaaatttaacttccatctaagatagcatttttatgttatcaacagtaaaataactcctggttctgaagtcatgaattttaacaatgctaactgaaatcgcatc

SEQ ID NO: 381486 - DNA, 1636 bp, Cannabis indica
gtgtataagagtcatcattccgtgagtgtaagggcccaataaaagcttgaagcggggacgttacaattgagtttatgtgtaatcaaactgatatatatataaatatatatatataaatataaatatatatatatatactttcttatatattttaagatataataataaattttgtgatattatttatttggttgtaaaaaacaaaacaaaataaatgattcatagttattttatggaatcatattcaaatgaacattttttctagttgatttttaattattattattatttttattattattgtaattattttgatgtatatattttaatgtatttttaaaaaatagtatactattttttttaatgaaaatatgatatagtagtaacaaatagagatagtctctacacaaaatagcatattgcaaagcctcatattatcataattaattagaatgattttaaacataaatcaaaaaatacattatatataaaaatagagcaagataaatcaagaagaaaaacaagttgattaaccacttgcttaactatcttttcccttaacaatatatttattttcatacttttctgagactaatgatactaaatatatcatcacaacacttgtttttatgaaaaatgttatttattactgcaatcaaatataaacattgttgtagagagattggatttggatatataagattattcttatgtctttgtgataagtttttaaacaatgtgggtcttaacaaagctaaagatgaaatgttcatcttaacaacaatcaaattaaattatggcctaaaatagttaattaatcaaaacaatggtacattgataattgttaactcaatgatttattttaatttttgatattacttttatattatgatgaggctaaaatttaaatgaaacgaatcaaatataagaatatgtttgaataagttgctatataattacacagcataataaaatataatttatattttacttgattaaacaaacataccaaatcgacttattatcccaaattacacctaattttgaaaaacacttcaagaaaaaaacaatatccaatggatttatgatgttaatatttggctcttgctatatgatagtgaatttgattatctaatttgcaatggaaaagaatatataaacatgtctataaatttatattgtctctttctttaattaaaaaataacatttgtgtaatgtttgatcttttaatgtaagagaaatattatatagaataatcaagaatattactttgttatattttgttgggattacaagactactatacacctaatttttataataacataagatttcttagccatgaatttggcataaataagaaatcaagatatattatttaaaaaaataattttagtattagctataaataatttgttaataattaactttttttttttcttaaataatggaattttattaatagcaatcaactaaaataataatctataatttaatttgggacatctccctgttagagatatgaccatgattaaaattaaaaaaaaacaaagtacaaatatcagtcgcataatttctagggaaaaaaacaaaaaaatacaaaaaggaaaaaaaattacaaaaatactttgggcc

SEQ ID NO: 381487 - DNA, 1183 bp, Cannabis indica
tattctttgatgaatcttttgacacatctttcctctttccacttgactgatttcctttgctcgcatctcatgcctttgtagttattatacttgcagtggcagtactcgagctaggtttgtctttcgagctggattttagcaacttcagttcgttatgtgcttcttatctttgcacaaaaattaaagccctatcattaaattcaccaattaatttatctggtcagccttgtaaatcatcctagagctcacaattattccactctagagtgttgttaattggatactgacgttcatgtttctaacttttgttgttgctgtactaaagcgacttaaaaaggcctttagtgactcccctggttgttgattgatgtttgttaatgacgatgcttctggtcttctgcttctcgtagcctaaaattactttttgaattccttaaatagttgttcttgtgaaatgatggaatgatttgtaaatttatcaaaccaactactcgccgctccacttaaagacatggggaacaatatgcaacgtaagttatttgaaaaattacttgcattatggtgttaaaattgttcaaatgtgtcactgtgtcggtggttccatcgtattaatcgacatgtggattcttgaattcctttggaaagtgagaattgagtatgttaggatgaaatgatatgtctcctcgtcagagtcataccctgacaacttcccatatactccatcctgatattgcctgaacttatcctccaatagtatgaccattagttgaaatggatccacaataggttattcgacttgttcttactgattttccatgttatgatttaatcgttctcggaggtctggagcattttggtttagttactcatgtaattcggggtgtctatggttcaaatgctcacggagatcaagttcacagcgcctacatttcttaggtcataattacttactgatctcattggcgagatacttttagattggtaactctacgagttactcatgatttcttattcatcttggtaacgacaccagacatttctttctctttctagtcgccattagggctgaacattttgaacgggtttgacccgaacccgagcaacccgcccgaacccgaactagtgaacccgcaaaaaaaaatttaaaaaagtttacgggcgggttgggttcaacccggtaccc

SEQ ID NO: 381488 - DNA, 2045 bp, Cannabis indica
gtacttgatggtcatgcccagggaatgttggatttctctcactccccaagtaaagcattttaccctttttccaagttttcacactcacaatacataaactaattataccacataccctgctctcttcactttatgtctctaatctaaaacataattaaacaaaaaagaaaggaaaatacactcttgggttaataataataataatacttgtcttgtgcccatctctagacaatggtttttatatgaccccattttattctcattatggtttaaaatgtgtaatgttggagtaggaatagatcattcacaactactctttctatatttttccttctttcttttttctaagccaaatgcatgattgattttgcacactatatagtggaatttactattctatccttttcccttatttattctacctagatttggttaatttagttcctgtaaagattatttttttttaattttttttattattaaatattattattcacactacctcttggctccacgtctggcatgctggttttctttatgctactactactacttgtactactgctagaccaaaagacactgcctttttctttgggtcttgattgaatacttacataacatacatggtctcttgtggtcttaaaaggattatagccatggaaagcagaagcagcagcaccaagcttttgatttgaaaatagataatattgaattcaaattgaaatccccactttggtttttggatttcttttgtcactctcagtcatcatcacaaaacagaattcattattcataagggggtctcttctctgagcctgaactcaagctttgtgacttacaagtttcaattcaatgggaatgaaaggagcagaagctgctctttgttttttatcgtttctcttgttttggacttctgtatttggaattctatcaccaaaaggagtaaactttgaaggtataactcttacaaagcttatatagctttgttttgtcctccatgtgtttgagcttaaataaaaatgggcatttctcatctgggtactttttttttcagttcaagctttaatgggcataaagcattctctagaagatcctcatggcgtgcttgagaattgggattcagattctgttgacccatgtagctggactatggttacttgctcacctgaaagcttagtcattggcctgtaagtcttaccaccctctctgtttgaaatgtttattttggctcattacagagaaagaaaattgaacatttccctcttggaaagaaaatgttataatggaataacagtcaaatcctctgaggtctttggtatattgatattgtttttgtttcagaggcactcctagtcaaaatctatccggtacactttctccaagcattggcaacttaacaaatctccagattgtgtaagtatccgtacaatttagcatttatttccaattccctcttgctcttttcattttgtcattcttttcaggtattaatgaagtgtgtttcactttacagattacttcagaacaataacattaaagggccagttccttcagagcttgggaagctccctaatcttcacacccttgatctatctaataacatgtttaccggaacagttccttcctctttaggccacctcagaaatctccaatacttgtaagcattcaaaaactcatactgtacaatctgcataatgtatttgttctattctaattcttattctgatatgaatgttgtcgcctggtttaggaggcttaacaataacagtctctctggaataattccaacttcattggttaacatgacccagcttgcctttctgtaagtctatcaactatttctttgttaatacataaaccatgagtcttttgggctatgctcttctcattcggttatcttttgaatttcagggacctgtccttcaataatcttagcgcccctgtaccaagatttcctgctaaaacattcaagtaattctctctccctctctctctctctctctctttcaaatcaatgcctaagttcaacacaatttatctattta

SEQ ID NO: 381489 - DNA, 2716 bp, Cannabis indica
tcaagaaaaaaacattaaaagcattaattgtatttttgtttgtcagaaaaaattaaaacattgttgaggtgcgtaaagttgaccgaaatcgaaattttcttttcgcaaaaaatatttcattattacggggtctcgaaagatataacagcattaattatcaattaatttcaaatgtaattaaagaaaaaaaaaaatgtattaattagtggatctgtatttataagtatatatattcagctaaatttattatttggagaagagaacttgaaatattgagacttcttttttttggcagcttgggacttatttaaaaacaaatacagtgtattaattataatttagataattaattgttagtataagcatcaattttattaattaattaataattataaaaagaaaattgtagtataggcactaccgttgctcttatcaattatctttttaaagaaaataataaaaaaatattattaaatggtcattaatagtagttgcacacattctacttgtggaagagtgcaaatgtcaactctacttcaaaaacgaaaagtatgacaaaaactctcttctctttctctttctctttattaatacctctctcacagtcacacataagcaattgtatataaatacagcgaacctgccacacctttcttatttgtcccatatatacttccactctctctctctcttaccttttagagagagattatcgatcaaagtagaacagttcaaatcaaggaagcaaagttgaaaattaacgatcatgaagctcatttggtctcctgaaacagcttcacaagcttatatcgaaacagtcaaatcagtacgtaatctatacaaatataacataaatatatatcttaaaattttatggttatgatttataatttatttatttttgtcagtgtgagaaattcacagaatccgcagtggccgagcttctttccgccatggcaggcggttggaacgcaaagctcatcgtcgaagtctggtcccaaggtggtcccatggcgacgagcgtgggtctcgccgtcgccgcccgccacacgggcggaagacacgtgtgcatagtcccggacgagaggtctcggcaggactacatcaaggccatgcggatcggcggcgccggcggctctggagcttggccgatgccggaagttgtggtcggggaggctggagctgccatggcgggtttatcaggggttgattttctggtcgtggactcgaagaggagggatttcggtagagttttgagagtggcgaaagtgagtagcaggggagccgtttttgcatgcaagaatgtatggcaacgaaacgtttcggcgtttcgatggcagtgggcggtcgagagggggacacgtgtcataaggtcagtgcttcttcccgtagggaaaggtttggatatcgctcacataggaagttctaatggtgggtcagggtcatcaaggaaagctcctaggcgttggatcaaacatattgatcaacggtcaggagaggaacacgtgtttcgggagtgatgagttgctgcagggtgaaaggaaagagagagttttcatgagtaaattttgatgcaacaaaaaatttggaaagaacttatatatagagatgtataagtttacagggcttaatttttagtcttgtttggtttttcacaaattatcatagttaacaagacaaaggaagaaattggtaaaatgctttaaaaacatgtattttcaaagcatttaactcttctttttcctttgtgtgatattttgttgatccagatgaagattatagagtataattaattagtatataaataagttgtaattattaacttttgctgttgagatattgtaaatatataaagtaaatatctttagagtggtcttttatcatttatatatttattatatgtattaattcagtattctttccaagtaactagcattaatccttcctattatgtatgtacgtaatttaaaatcttagcaaaaaaaatagtatttaaattaatatgttataaatattatttatgccctcaaacttatatgtctgatcacgtagcatgaaacctttagtttttcatacataatgatatcctttttttcattaattggattttaagagcttgcttttccttttttctttttaacaagaatttgctttgttttctttcttttcgaaaataaagcgtttggaagggccaggaggccgtcattacaactagtaaattgatgtacgtatcgtgtttgctcgatccatactatatcgtgtattttaaaacatagattatgccatcttgtgtaataaaaatatatgagtcatgttgtgtcttgctaatatttttaaaggataataaattcgacacgacctataatgtatttggtattttcgtgttaatactttactcgtgctgcgtagtttcttttaaacggatcggtctgtttttatattttgattcaaatttgtactttacttttctatattatttttacaattaatgaactaattaccaaactatatgtattttttactacttcaattacatttatataatttggagcaattttttttttccaaataatcatataataaaaaacattattataactattataatttaaatgttataaatacttaaatttttatatgatagtactttaaagataaattaatatataatttaattttatattttttaatagtataaattataaaattataatat

SEQ ID NO: 381490 - DNA, 3883 bp, Cannabis indica
ttttttgaaacttgtacaaaatcatacccttaaagtccttaaatccaaattttaacgacttcaaagcaaaaatcctaattattgtcattgataaaatttcaatgtttattagaaaaaaaaaataaaaaataaaaaggtagaaacgaaatccaactaaactcaattttagatattgaattgcaatttgtattggtggcaacgaaaccaaaaggcccccattagagaagaacaaagaagaagaaagaagaaagaagaagagtgaagagtgaggagtgaggagtgaggttagggttagtttgtggtgctacaatttcggaacgaatctctaaccgaattattttcatctttgagaaagtaaaaccaaaaccccatttccattccatattaaatattcaaattcatttggtaaagtaataatctttttccagtttcttcaaccctaattctcttctattcccttttgcttttcttctatcaattctcaaaattctttgtctgtgtctgtgtgtgtatatgcagtttggtatagataatatgtagaagattgtaatggaattattagtatagtatggtgtattgccattgccattgccattgccaatgtcagttcttgaaccccatagttgagctgggtagctttccttttcgaaaatgaaacccaaaacaagtgcttcttcttcttcttcttctaggtcttttcagggagatggccccaattgggtactcattgctgggggtgcgttgttaagtaccttatcaattcgccttggttacaagctcaagcaagctattgacaacaatcccaacaacactttcagacctgctcctaaaaatgcaaaattttctgaaagaaggaaatcctcctcctcctcacgttgccctacccactcaaatctctatacctttactgaagatcatgatgccacttgtttcaattgcttatcaggttttgttttctttgttatttttactgattatcctttatttacactcattctcgttactatttggttgtttgttattatttcaaattcaattgcatatttgggtgtttggatattctgcaatcatatagggaattggaagttaagttttaatatctgctaatgtagtttttggcataatttaatggtgttaaacttccttctctaatgatgttaatcaatagtgttggttgtttattttcgaaagttgtaagacaatataattttgttgaccataactaagtggacctatactcagaattactatccatacttaaagaacattatttgtaatgaccgagaagtctaatttcgaatttatatacgaacgcgcgtaaaatcaaaaggcttttagatagggatatatgtaggatgttaacaaacttcttagaatatttctgaatatttaacttggggatgtttataacacctatttgcttcaggatttgttgctagtgatgccccatttactttcactcataagtgcctattgctcttagtcattttgggctcaaaataacaaattgcaagcttacaggaaagcagataaaaaaatcatcaaacgaatatagggacgtagtatgagctgctggttttaggaatctgataatttttcatgctttttatcttcttcttttagtcggggtcactctttagtgttatgattttccaatccgaacattgtgtttttgttttgggaggttgctgtgattcggggcaattttcctttttgcattcttatggtttaagtgtattttcttttgttggtgttaacttaaacctcagtaatgctcttggaacaggtaaaggaggtggtatggacctttcatgccaacaagataaccagatgatgaccgaacctgatggttctctgcctttggtgacagttccaggtcccgagtttaacaaagacaatggtgtaatgtggtcatcttctcctgatcgacttgagctgcctccaaagccctttaaccaccattcaaactgctcagattcaccatgtgtctcagaatccggctctgatgtctatagcaagcgggaagtaattcacaagctaaggcagcaactgaagagaagggatgatatgatattggagatgcaagatcagattgttgagttacagacttcatttaattctcagctagcacactcaacccatttgcagtcccagattgatgctgcaaacagggaactgtttgattcggaaagagaaattcagagacttaggaaagccatagccgatcactgtgtgggacaatccaatgacaagtcctccacagttccgagttggtcatctgagtgcataaatggtcatgcaaatgggtatcacgatggagaaagcaatctcgaggtagcggagaaaggaagaggcggggctgagaagattgagatgctgaagagggaaattggagaattgaaagaggtaatagaaggaaaagactacttgttgcagagctacaaggagcagaaggccgagctttcgttgaagatcaaggagttgcagcagagactggattcacagctccttaacattttgtaggaagctcccaattttgtgcattctttgcttgttgttatctcttgattttcagattccaaatttccgagaatccattccataatttccattaacattacattacatacgtagtttagattttgtttttgttttgttatatatttgttgtagctgtttgtactttttttttttttgataagcatgaacttgagtgagacaagttaatgtttggaacttgagttggctttcaaaatttgtttgtttcgcttgaaaaaagagtggaaaaaaaaatgagctgattggttttaattacttcaaatacactttatttcattaatagtttgtgtgtattgtaagtcatatcaattggtttaaattctgatacttgcatggccaacacaaatgaaagaataataatggtttataatgctagcccttatacttcatatatattaatatttatatacatatgcattaatgaagatgtcctggaaaagaataatgtatcacatgatgttatgaatttgcacagtcccaagaaggttgtaacagctattatttttgtgtggtaaattatgttccaaagttgtgtttggagttcgtggtgttatgttcttgcgagaaattccattgaaggtggttcaaagttttactgcaagctctgaagtcaagctgcgatagctgaaggaatttcatctaagacttgacgttacagatccgaaaggttttcagatctaattttcattttgagagatttcaacgagcaaaacaaggggatcttgcattcctaatcaagggattcaattacttaacgtaaaagtttgttgtaatatggattggttagtctacgaacgttttttaatagagtgaaagttattactctgattcagagaaactaagcactagtctgaattttcaatgaacttgtaattgagttgacaatgcaaatgaaacttatacttctgtgtgttgattgttatattttaaatctttaacgttcatgtttaaataaagaaagataaattattgaaaacttagggttttacaaaggttttatcagagagagagagagatagagagagagagagagagagaagaaataccgctaaagagatggtcgatttctcaggtgattgaagagatggtcgctgttaaggtgcatgaagtaggccgatgactggtcgacaagggctcagtcgatttctcaatcgttaggaatggtggtaggagatgaaatggctgtctgtaggagaaacggctgtagcctgtaggagaaagagagtatacgattattaggtttagaattttttaggtccaaattattttttaggtcagattattttaatgttaaaaaaaaaggtcagattatttatatatatat

SEQ ID NO: 381491 - DNA, 2939 bp, Cannabis indica
actaatagatttagtaacaaagatatgggactcactttatgactctttgtataccagtcactaataaagagtgtaatatctccatctggcaccagaaaaggaagtgcaataactgctctattgtttataataacccctccataccctcctgcagctctttgaaagttcaaggaagggaagtaaaagaaactccctatctgatctttcacctgaaaatcatatgtccaattccaaccggccgggatcggacaattagtccccgaaacgccatcttgccaagagtttttcctgtgctgtactccattcctgcatcaaaacattatgcaaattttgtttttgtttctacatttgaatttgtcaacaattaaaaaataactcccatatgagaaattataccatgtaataagtaatggctcatcaagatgattcttgacattaacaacaacattccagttggtagtgacattgagaattggtcctggaaactgcccatttatcccaataacctagaaattatgaagcaacaaatgtcatttttatcaattaaattaaatctttaagtctaacacagtaaaatactgaagaaaattaatatgaacaaagactttcaaaaggtaatgttgctcaaaataaagtaagttgccgacaacacatacccatgatataaaagttgttcaaacagagaaaaatagtattatatgagctcattttctagttcttttttccctatcttgtaataaaaaaaattccagatcttttgtgccataaaaattaaaaaatgggttacagaagtgtagtgcattcccactaaccataaccaagaaaagcaacttaaaagacataaagagcaaaaaacaagctggaattcaactaaaagaggcatatctcaattgggttatgagaaaaattaaccaaaaaaattgaaagagaaaggaagaaccttttgtttgggtccaagtggagaggcattgatgtatgaaacagaccaatcatagaagacatagggatcaccagccaaaccaacacttaaggaaccaagaaggagaatcaagtagaacaagaagaagcaaggacatggcagaactgagggcattggaaacccccaaagtctcagtctcagtctcagcttccctttcaaaccttacttactacccttttgggctttctttatcttttgctctagtttcagataactcttatcaatcaaagctcaaaacttcaaaatagagagagaaaaggggttcctttgctttgtttgcttcaacaagtggtgacatagaaacagcagagctgcagcagaagcaaactttggtggcagtaaagagagagaaagagaagtaaaattttgtaaaatagactgatataggcacatgtgagagtgagaaaatgtaccaggttgggccccagatgagggagcctttggtttgtggtgttgtttatggggtccctcacttcaaagcttcaaacttttataggcagtagccactgttgctttgttgtctacttttataaacagccaatggaatcttactatataaaggtcatggattgatccaacaaaccaagcttcggttatggaatgtagtgaaaaaattatataatatatattattagactcaaagataaatcgaagtaaagaaaaaggaaatctttttgactgaaattgttggatctggggacccttctagtttatcatctggattttacatttttacatatgctttttagtttatagtttttgtcatgtttgaaaattgaattctgttttcatattagccactttctttgtagatattcttattcttaaaactactacattcttcttgcaattaatttagatcacaacccaagtcaatataactatgattttataaattattaaacaattattgaattctgtaaaaaaacacacacacaattatttgaagaagcattagaacatcaattgtaacatttcttcaaaatgctaaaatcctccacatctaaaaatataatattttacttttaaaaaatacattaatactattataaatattttatttatttaattataaattatataactttatttattttaattttttattttaaaaaaataacatcaatataaatattattatatgacatcaatttaaattcttataataatgtacattcctcttcaatagtataacactctcatattttatcaactaaactgtctacctcaataaacattctctaaaatttaaccattgaagatacttttagtgcttctctgttcgtatataaaattttgaacaaatcttagtttttttttttaacatttttaatggagtgctaaaaatatatccatttttaatttatgttcatgaaattaaataatttagttaaaatttaacacaggctaaatattgtgctaaatttaacataaaatataacatgaattaaattaataccacaataaatatcactttttcatttactcgtttaccactcattaatgcaatcaataattttttatatttttatttatatatttaatataatttttatatactttcaataaaaatattgttgactttttttacatcttttattaaaataaatttttttttgcccataatgtattggagccaattttagtattatttaagctaaatataccattcattcatcttttttagccaaatttaatacaaaatttattcaaaatactattgaattctacttccatttacaaatataaggttcccttgaaaattctttcttatttgccaactttaactgttagacatttatatgtataatataaaatatatgtatgtgtacataacatgcggaataaataaacatatacactatatgaatataaggatcgaaatacctccagccattgattctttgagcagtaatcccacataagcttgatctgcaaaagaaaccgattgatgtgggta

SEQ ID NO: 381492 - DNA, 3721 bp, Cannabis indica
ttttgtttttttttttggatgtgactatatatattatgggtttttgttgttcaagaacaaaaattgttcatgtatttctcatgaatttaactttttatgttttcaaaatatttatttgttgttatcttcttccttggagaagaattgtttctcttctcttaaatgaaattaatgaggcatggagcaagaagatctgtatttaattttattgattaatatttatattaatcaataaaataataattctacaatatgtttatacatatatgaatgaaaatatgttataaaaataaaatggctgctctagtactagtacatgctccccttcttatattacaactaattaataattaagcataataataaaaagaaaatgaaagatgatgattaaagtgatccagttagatcagctggagaatattattattgaaacaaatgtattattaattaatttataattaggagaatgtttgctggatttgttgtgctagctcctccgcacttagttgacattcaatcccaatctaataataacaacaatgaaaaataccaagtcattagtctcattaattaatcaataatatatgtaatactaattaagataaatatatatatatatatatatatatatacttcaaagaattataatcaaataatgatttaacgtatatatatgacacccgtgtaccaacattattaacagttaatatttacagttacagactcagtaaatatacatgagaaattttcttttttactctatgtttggtaggaaataagtgcttaaaaaatgcaaataataagtgctcaattaattaaagaaaaacaaaaaaaaaattaataattaaaaaaactaaatataccttaatggtgaaggaataattaagcatggtgtcatcgagggtgttgatattgattttaagaatttgtagtgaaaggtcttcaagagcagcaattatcttcactgcttgtcctggaatcttaggagatacagtctttagaagaacattcgatccagaaaatttgacctccacgtcagcaagggcagatttggaattggcaaaaagatcattagtattaaaattggatgaagcagaggatgcagttggagagggttcattactaagataggaagtttgttgttgttgaagttggagccttggtggtatgtatgggctacttattgactgaggtgttcttgggctatttggtaagctcattagtcgagggcttagtggtggttttgggctaagaatcattggtgagcctcttggactatttgaaaccagtctagggctcaaaacttcactgtaaaatttcctttgttttttggcttctaatgactgtaacacttgttgcaactcggtgatgtaatccactactccaccaataattgatgcttggtctccctaataaaagaaaatatatatttaagtgtcatgaatgtatcctaaaatggttctcacaaaaacaaaaaaaatgtatcccaaaataacaaaacaatttatatatacgttggaaatttaaaatttcccaaaatatttgaaaactatttttaaacaagcaaaaaaactgatgcccacaattaacaaagctacttatatagttttagaccatctctaatatatatctttttatcatttttcattagaataactaaaaagttaagataaagagtcattgaactctcaatatcttaagagcttactatccattttctatcatagagagttaatttttgtttggtccaagctcatgtttttaagtctcactctattttagctaaaagtgtataatttaaagagtatggttgaaaatgtttggagatttttagttataaaaaattaattagtaataaaattgaaaaagtgggagaccatatataatataaactcactcgcttgacatagaaacaaggcatgagagaacgcaaaacagtcaaattctcattcatttgttttcttcggtttctctcaactgcaatgtgagatatcttattcccttgcccatctgaacggttaaccgtatcgtcctcggctgatgccgccgccgccaccgttgaaaccttcaaccttttgctcttaggcaaagtgtcagcctcagtttctgatatagcgctggacgacgtcgtttgagcttgaatgaaaccggccgcggtttcatccaacggaggaaaatgcaccacatcagcctctaagctgtcgaggatactgaataggtcgtccccagaagctaagttgaaaagatcatcatgattattatgatgatgattctgatcaaaaatgtctaaggcacataaactactagtactgctcattttggaagaggtagttatgttgtttggatagtaggaaaatgggttagttgggtaaagaaaatacagaaaattaatgaaaagaaaacaaaaaaaaaagtgtgtgtggagagatgaagagaaaaacaatgcatgcaactaaatattgagagtgaaataggtaaagatgaagatgaagatgacaagggaaagcagagtgaaagggactaaagcatcaacatcaaatatttgtttagatttgttttcttttacttaaagatatatgtttgggaagagtaatgtatttattgtctaaaaatatacaaaaatacaaagaaagaaaagagaagagagccgtttaaaactgagaaaaagacaagagatttagaggagagggggccatgaaagagtctctatatttatttatataaataaaacaagtatttaatagctttgttaataaatttgccccttcctcctgtcttctcttttactattattttatttagagctataccaatattttattcagtaaagaaagcagtgaaagaatcaatatgtacatattcatttatagatatgtggtagtggcatatgtctacaacttttcatttttaattctttcatccattaattattattccaattaaacgatgattttaataaccaatgtatatgaatgtttattttgaaagttgctataagaaagtatttgggtcatatgtttacaactttttattttaattttttcatccattaattattattcctatgttgtgactaagagattcgtggcaaaaattattagtcacaaaaattacaatttgttgtggctaaatgtatttttaagtattgtgactaaaactaaattagtgacaacttgtgtctaaagactatgttttagtcacaaacattttgttgtgactaaaagtcagatttagtcaaaaaaaattatgttgtgagtaaaaagttatcactaaaagtagcagttttttgtagtgacaagcaccacttcatcatctgtcttctagtaaacaatttatggactcaaagtccactccaagtggaaaatgggttaaaaaaaacaaggtcgtccaacaaaattggatcctaataaatattatacagaatgagcaagatacactactataaaaagtagtttttttttacagttttaaatagtcgggtaaccttttgccatctgttcttatgacccacacctttgccatcgacacaaaactagatggaatagacgttggctataaacagtcggctatgagcaattattttcaaccgacggcaaaagggggagactataggcgtcgattagaactgaaactaacaaaaaaaaaaatcaaatctggtccgacatgaaccactccatccgagctgaatcttaaataagaaatccataatattcaaatcaaa

SEQ ID NO: 381493 - DNA, 760 bp, Cannabis indica
cccccaagtgtgacttggcaatttattggggtatatggccctccgcatgagaaggataaggagaattctggaatgaaattggcgacttggctctatccaccaccagccctttacttctaattgggggtatgaatggaaccctccttgattttgaatgtattaactactccagacaaggtaattcagcaaggtatgccttcgactttcggcgtatggtggatcgagctggattgattgatctgggattcattggccctccttttccatggtcaaagagcaacaaacaatcttctgtagggatgagattgaagagagctagactcgaccgtaatttggcttccacggagtagagaatcctattccctgatgcgattctaaatcatctttcggcatccacttcagatcaccgacctaaactcctcaataccaatggaggatacaaaggaaagcgccatccatttagatatgaaaatatatgggcaagagaccaaagatgctactgggtggttaaggaagcttgggcaaagaggctccacaacaatcctatgataaacttccacagaaaagtgaagaatacccgccaaaagcttagccaatggaataagaagcaatttcggaagattaatgtccaagttcaggaggctacttcttatttgcaagatacagagcaatctaatcctgacgatctgaatgcaattgaagtggcacgacaacaattaagtgaagctctgcttcgggaagaaattgttggaaattattt

SEQ ID NO: 381494 - DNA, 1656 bp, Cannabis indica
gtttatatttcatttcaaaaaaactttattttatatctctgcatgtttattttttttatggtttctttttagttgattaccaaccaaatcattacttttgactagggtggtaaaatatcataatataattatatgttctattcgtattatattttatgtgacatgttttatgttttttttttaaatgtgttaatctcgtataattttttcaactctaatccgaccgtaaaaattgtatttataataataaaaattaaaaatgtttttaatttatattttaaaaaaattaaattttagtttttttaaattgaaatactaaatatatatttttacataaacatattattataaataattttttattttattttattttaaaaacactatgtcaaattcgtgttaaacaggttgtgttgtatttaacctgttttcgatccgcatctaatatttctgacccctaacccctaattcataaaattcataccgttaattttcgtattcatgtccgcgtcgaaactcgtttttatcaccccaactttttactagctcaaactaacaaacaagcttaaattattatcacccacgtttaattgaggaacattttttttatttggtctttttttcttctcaacataactaattaataattaattttggttacatttttaaaatatatagtttgttaaacatgtttagaggttaaaactaaaaagtgtcctgtccacactgtagtcttggcatttttaattggttgcttaaaaatttcttaaaagaatttagaagatatgatcttgtacgtacgtaatttattttctttggaatctttagaatggaaaactttgactttctgtgttgtgttttgacttttcattatcaatattccaaccgctccattccttgccaaacatctatatagatgcatacattacacatatgattaaataaagatttaataataataataataataaattagtggcataaatatttaagtttacttaatacataaattatatttttagaacccgatcattaaggtaatgtagcagttcttaattagtaattaaatttttattttttttaaattaatttaaatataccaataaaaaatgacacgtgataataaacttcacacttaaatatttatttgcaatcgaaaaataacttaaatatctacgctacaaattactctaataataataataataataaaaaaaaaaagaatagtcaaaatggcgtagataatgttatttgacaaacagatttagaaaataagtatgtataagaattgtttgtgtataacatggttattttaaaacctagaaaaaaaactaagttaattaatgatgattcacatttcttataaaataataataattgttatcttaaatgataagtacatatataataatactagatagatgttacgtgctaaattacgtatgttaattttattttagtttttagttttttttaatatcatagttttaaaattaataatatccaatgtagtgataatcattgaaagtaggttaaataaaaacaaaaattattattatactttgtaatagtaattaaaaaaaaattattatttgtcttaaatttattttcgaaattaataaaaatgatcatgtagttaaactatcaaaacattca

SEQ ID NO: 381495 - DNA, 2036 bp, Cannabis indica
tttttttctttttctttttccctatattgattatacaatatacgcattgccttataaagattatatatatgagtacatatatatctattatatatctatatataagaatattattggatatacatagtatataaccacttatatatattaagtccatccattggagtcggataatagggaaagagccaatacacatgaaacacatatatttaagaagaaagtggccaatttgagtgataaggataacattttaaaacatatataacgaaatgacaacttctcacatatttaacatatatttgtatatatatacgacacgatttcaaatttatgagctagctgtttcaaattacagaatatacatttatatatttcataccaagttgccatgtgtacgtaagggaagttgaattgatatatatgttaccaaattaattttgtagcaagaggtttggatagatatccatatgtacagatatgtactatgaaaatcgttgtcctttaatagaactggccgtacaatgctgtgaaaggctatcgattagttagatgcgcctttgactttgacccacacaagtatcaaaaaattgagacaaaactgtgtatatgcatataaattcattgatccatctctagctagcttttactaatatatatatatatatatatatatatattatatgcatatacaatacaaatatatgcagaagagaacccctgacaaaaaaggagaaatgataattaatgatcttgtttaattcatgttgtccaacttgtttttaaacaaatattagatttttttattgctaggtataaagaattatttgttagatcattataaatattgctgacaatacagaaatattaattgttgtattaacgttttataaataaataaatattataataaccatctaaagattacaaatttaattctgtcctggatcttaaaaaacatttatatgaaaagttaatgattttgacacagagagagagagacaacgtacataattcaggctagaaatcaatagggtttccttaaataaattgatctgttaattattataattatttttaattaatatgcaattgtaaatattgattatttgtgatttgtcttctccaatatattaatgtaagagtaaatagtgacataaatacttatagttttgagttaagctgcataaatttaataagttttttagtggtataagtacctaatatttgtaaaattgtaatttttttctattttcaatcagtaaagactctattttaaatttattaaaagaatatggaagtaactgatactacatgtttttatctagaccaatgatggccttatatgtataataacagaatctgtactaacaaaaattagagaaaaattatagttttacaaacttctgctaaaaataaatattagatttatgccgcttacaagctctaaactttaggtacctatgttgttatatctatagagaaatactaaaaggcacccaccagtggaagaccctcctatgtgtcattattgatattggtccaattaaatattgggtccatacagtttaatataattctctatttctacaagaaaactattgtggaagaaggaaagtaatgaatttcatgtattgtattaagttgaatcgatcgaataaaaatgtgcaggatatatatatacataacagaggactcaaacaaaccgactaaggcaaagacttaaactaactaactaaggcttgcagcgctaattgcaataggggtttttatacgatttttgttgtaatttaagttgcagcgctagttgcaataagggtttctatatagaattccgtaaaaatgcaaaaagaaaaaaaattattttgaagtgtaaaaataaaaaaaaaaatctctaattttattatttaattagtatttatatatatagttttaaattgcacccgaaacacaatttatttagtagtaaatatatctatttattctatatatatatatatactagcaaaaagttacgtgcgagacacgtatactaaatt

SEQ ID NO: 381496 - DNA, 3866 bp, Cannabis indica
atatatatatatatatatatatattcaaaatacaaaaccactaaagggttcctttgccaaaagaaaagtatgtacaatttttatataaatatacagagacccaaattagaacccctccacaccgaccccgtgaatcctatactaacggaagcctaagtgggcactgaccctcatactcatcattcatgtttcagtagggatgtaagggcggttgttaattgtaatgcaagacgcatgcatacaaaaacagaataaattaaattttttatccctgtggtaggaaaagaaaaccattcagtgactaaagaagcataccgagcagggaactttcatatcaggatctagtttaacgtccacgccaacagttctgtaatatttttttacagcatccaagttgctgaaaggcatgccagacgcaatctctttcacagcattcaagataacagtatcctttccaccatgtttattgaggaatgatttataagatggaggcaaactatcctgcttcagtatgtaagcagacctgagcaataaagttcgtttgtttcttcagacaaagtatgctataatgtgaaaagaaaagacagaagataacaaaccactaaaagagattatcaacagagacacacgcccataaagacaggggaacaagccaaactcgaaaattcaatacaatgcccataaaccaaatacattttgcgaatccccaattagaaagaatacaaaacgaaactaagagagaaataaaaacaaaacaaagttagatgtaggaaaacataacaatccaatttgaaaagatatacgtacagaatttgggaagaagagacacacataaggaaaatgtcgccatgagcccatgtgagtggcttacaatatctcccaaaccgtttgcttttaatcccacaacgcgacgctaaaaccgcagctcgcataagtatgtaaatagccaaactagtgtgctgcgtattaactccagtaagaagcatggaaggtccagctatagcccctgctaaaagagccctccattttgctgtcctgtactagagaaacatcatagatgtaccaaatcaaattggagaaagcaattacaacatttaattttataaacgtttaattagaattcgaattcgagttcaaatcaggaaacatgcctacgatgacctcccaaagagcctataatctcatcgaccgagacaaatgtaccagcgaaagtgccaagaaatagaccgtatcgcagtgtctccttcagagcagtaacgattgcctcactattcgttatcactccttccttcctgcaaaacccaaaaccgaacgcaaatcaatcgtaagaattgaactactccacttaaagtcactccaaaattcaaaatccaacactatagagagcaagttttcaacctgagagaagccgacgcctttcttcgtctcaaccgaactaaaatagagaaaagagcgagaccgcctttgagaccagctccaatactgaagcccttcgccgcagcaatcactatcctctgaagcttctcggagtccttcaatggcaatgaactgtaaactaccgaagaagaagaagaagaagaagaaaaggaagatgaagatgaacgatcggatctgttgcaatgcgcagcagtatcttgaccgggggaatcgcgatcaagagcggcggcgcaaccattgtcgccacagcaggcaggcgacatggtgaggaattcagtaactagtttctagggcttgggagaaagccaaaggagggcggaaatgaaagaattacagtagaagaaagatgaagggagaagaaagaagaagaaaaatggtgggaaatacatatatatataccggggtgggttttcgaagcttcgtggttatcgaatcacaaattacgattgcacacgtgtctatatcatacgtattcaattcaacggtttgtgtggtttagatttgtatgtattaattatgtaaccatttacattataaaattactaaaagatatttctgctcatcaagggtggtagtaggctcggaggactccataagtggatttggactaaagaactaccttactcaggtattggatcatgctactcccaacaacgtggttcccgttatgtgaaataaacggtagaattctaaaatcttagagcatcacaagattatttgatggagtatactttcgaaggccttgcccatccagtttgcttttgctagaatcatgcatattgagaaagtgtcttgccttatttgtggagagggatcagaaaccatggaagacctcttcttctattgaactttgtcttccatctctggaggtcttttccttgggatataatgccaatctttgattttggagtctcgatgtggaattagatcatattcttatggagcctgaaagttaaaggagtggatgtccaagagttatttatgtatgattctattgtaatggatatgatttgaaaaactcgcaacgtacacaataattatgtttgtaacattaagcactgtattaattctatctatgtattatgcagattatggttcttgtttatttctttcgccggtaacggttgactctcttatttggtctctcctgcgaaagattgggtcaagatcaattatgacgttagggttggtagtgactcaatgtgccagtggctttggccaaagaccacaatgagtcggttttgtgggtggctactaacatgctcaacttttctggcccacttattggagaagttgcggcatgtttgttagcaatggagtcaacggttcgttggaagcatttgtgtgtgatggttgaaagtgattctgagacgattatcaattctctgaagggatcttgctctgtttggggtattggtaggtaactatgtgatctaatgtaaacatctctcaaacattttcattggtgtaattttttgtttatttcaaggctgtgtaattttgtggattataatgtaataaagtgggcttttaccaataatataactaggatggtatatccttattgcatactattgcattttttatttaatgaccgtgaggtttaactctaatttggttctaatatatctacgtctttgtttttttttaaaaaaaaatatatatatattattattgcctagtactccttttcgtgtcattttgttattggagtatcgagttttatataacttaaaaaaataatttttaagaaatatcgttaaccaatcgtaaggtaacacccataaaaattattaaatatttttggtgtccaataacaatcatttttacattacatctcttttcccttttcacttgctacttggaactactagtgctaccttacctgttttgttttctgttctaaatgcaaattacaagtatatctccttttttttttattattatttgttttaataaattattacataaaaatttaaaatacatataaaagttagaaggtttttttttaaaaaaaaatgttatagaagttagaagttaaattgatattatttcttttggaaaaatacatattgtactgttaaaaatatattatttttgtgataagaggataaatttattattttaaataaattggtatgtgtgccaattattattggttttactttttttacaaggacaaaatatcagtaaacattatgtaatcgggctgtttacaattttttttttggttaaatgtagcacaattcttacaatttattcacaatattatcacttttttattagagtaatttgcggtaaaattccttcaactattaatttagttgcaaaaaatcatccaacctcatattttggtgggaaaaccctccaaagtattgttccgtttatatttttaaggtgtcgtacgtccaacctcgttaagtcttaat

SEQ ID NO: 381497 - DNA, 2101 bp, Cannabis indica
agttgtatgtgtacagtaagggataaatgattaaaacttaccatctatttgtggtcataatagtagtataatactttattttcgactacccctcccctaatatcaaacaaaatgataaaaatattactatctatttatgtgatattaattatacaccttatggtaataataataataattaattaattaattgatataaaatgagatagccacgtcagcataggtagggccgggacagagatggagcaggtccggcctttaccttattaatattaattcaaacttttaattagccttttgtctactagattctcccaagctccccctatataacccaccaaaccttttcccaactttctcactatatagaaagagcaacactaatatatatatatatatatatatatatatatagtcaaatatggtgtctgttcaagctccaaaatcaaaggaaagtgatcactccagaggctaagaataattcatcccagaataagagaataaggtgggaagatcatgatcctgatgatcagttgccttttaatttcgaaaaaaattacaataataaaagatccaaaaatgatctcttgatggcagctcatgacatagagctacaccttgagactccattaccttccgaatggcaaagatgtcttgatattcaggtaattaattagttattaactttaatttttgcattgctaattaattacatacatattatagctagtggaactgaataataattagtactgttatatataaatatatatatatatatatagtcaggaaagatacacttttacaatacaaagacagaaacaagaacttgtatggatccaagggaaagtactactcatcatgatgatcagccactttaaattcaatttcgagtaatgataatcatcatcatggtcatatgatcagcttagacctcgagctcaacctaacaacaacaagcgaatcatcacccataataacaaaaaaagatgaccaatatttcaccaatattaattcatcatcaaatactactacgactgatctggtttataataataataacgatctctcaaattcagcaatggaatattattccagcgatcgaaagatcaagaagactactaggaatactagtagtagtggtagttggccgtcgtggttggcgttcgaaacggcggccgatgagatggtggctaccgtttgcatgaggtgtcacatgttggttatgctatgccgatcctctccctcctgcccaaattgcaagttcatgcattcatcatccgaaaaaaatctactcaaactttaatatttaggttaattattaagctttaataaatttatatctatagctctgtattgagtaatttcttttcttttttttttcttgtttttatatgtaaattatctcttttaattttagtctggcaagcaaaataataatcttgcttgtagctaggccttttcctctatagctatacttaatgattaataattatgcattatatatagtttttctacttttaataccgatcgatggttaagaagagtagctaggtagactaaccttaaataatatatgtatgtaaatatataatattattatataatcatcctaattttgtcaggaaggcaagagtcttttatatcggatatgatgtagaaatcaaatatatatattcttgttttacctcatttttttttttctcatttatatgtttgttctgatgatatatatgctgtttcttgtatatatatataatatatagatgtgtgtgtatatttgagtaaatgagagcaacacgaactgggtgtagagacataaatttgttgaaatattattttttaattatttatccagttagtactgcttattattatgacacataattctgtcgtggaaagactgaaaaccaatctggagccacttttctttcggttggggaaagttaataaatctaaggtaataaagagacaaagagataaaaacaagggaaatacaaagggaaatttgattttctatacttagaaaatcaaaaaaaattttccctaaaccaaaaatttaaaacctaaaaaaactatccttttttttcaaaaccccaaa

SEQ ID NO: 381498 - DNA, 1115 bp, Cannabis indica
aaagaaatagttgctttatgggagaacttccacaggaaactcctaacgttgtgttttcttttgcaatgctccctttaacaaggtttggtcctgtcaacctgttttggagcactcgatatgacaaagcgatgacaacgtacgtgacctaccttaaggaatttgctgagtttgcctactcaaaggatcaagaaaacaacataccgcctgagaaatgtttcaaattgccatacaagtatgctctctttcttctttctctttctcctgataaaaccatgtgtaactttacccttgcaaattgatgcttaacatttatatacaagaatccgtacttgttttccatgatcttcaatgtttcccattgaaattgcaactatgcatagtagttctgagtggataataaggttttttttggcaatagcaatgccatcatcattgtttatccacatttaataaaatgattgctttccaggattgatggtgacaaagtggagagctactctatcacacaaagcttcaacaagccggaaacctggacgaaagctctgaagtacactctttgcaacttgaaatgggctctctattggtttgttggtaatacaaacttccagcctctttcagcaatggtgtcttctcatgctgaagtccctgcaggaggctctttgtacgcgaagcgtggaaccgactccaaatccatgtttcgtaggtagctctcaaaactcgtggtggatgtggacgaacagtggtacatagcaaaacatgtacatattactcttttgcttttgaagacaaattagatttgttagtataaatgatttgaagcatgtaaagtcccaataaattcaaattgttccttttacacaacagaaatcattgtctagtggtctgtagtatgctcataagagcagcctataacagttaatacctttagctcaagatgtgatttgatttacacttcagaactttgggtattcaaatcttatatttacttttttagacgtaagaatataaatgaggatgagaatgaaaatagaaatgaaattgaatccaatttaaagtatataaaaaaattgttaaaaaaaaattaataaattttctcatcattttatattgcaatg

SEQ ID NO: 381499 - DNA, 4543 bp, Cannabis indica
cgtatgcaggttgctgctttataaaatttggaacatcagaagaagctgacagggctattagagccttacataatcaacatactcttcctggggtaagtgatcttagtaattcttttaattcattttcctgtactatattaacttgttttcccattttttatgtttcctagggagtgggtcctattcaagttcgatatgctgatggcgaacgagagcgccttggtagtgactttttcttttctttatatcatttgacattttgttatctatattacatataaaatttaaaaaccaaggtcttttactaatggtcgggaaatttttatttaactcttatacacaaatagctgatgttaatcccttttttatgctaggcgcggtagaatacaaattgtttgtgggatctttggacaagcaagcgacaaaaaaggatgttgaggaagtaggtcatttacatttttttagtatagttaaaacttgagatttttgttttcttggcaaagatattgttcccgtgacatatctatgagagatgttcactaggctaaatgcactttttcttaattaaaatatgttatattatgtaaattttatatatgaagttatttttccttatgcccaagattatatggtttgaagtcttgaattatgcacagccaatactgtttccttttgcagatatttgcacaatatggtcgagttgaagatgtttatctcatgcgtgatgagttgaagcaaagtcgcggtatgtgctctttctcttgctgaatttaattttattctggtttctttttgctgtgttacaatctcacaaagtgatttcaatttgtcgtgtctccttattctttttacggtgataactaatttaattgttaatcataattggaaataatcgtttctataacaagtgtgtgcatttgacatcatattcggatgctctattcattgtttggcgtttcctttatgaataatgattctgaattgacttaagagtctattttcatttgtcatttgataaggttttagttgctcagatccttgtgtctgtattgttttcactcaatattatgtaacatctttttttaacatttgaaggatgtggattttgttaaagtctctcagagggagatggcattggcagctataaatgctcttaatggaacctatacaatgagagtaagtattcactggaaaaactttaatcatatcctgtttacaaattatgattgaaggtaagtaatgggtaaaaattttgtgttcatcccagggttgcgatcaaccattgactgttcggtttgctgatcctaaaaggcccaggcctggagattcaaggtttcttatcttcacttctttattttctttagctgttaaattcctttgtcagacactttaaactcttggatggatctggaagcttttccgtttttcacattctaacgaggacttttatcatcatctgaaccttataagaaccttgtgctttttacaccttggttttcttaaaatatgattgatctggcataatttttaaattgatacttcttctgcatgttgccaagtaatttctgtatgtctaattcttttacacttattagggttcctgcatttggaggcccaggttcagggcctcgatttcaaggtccggggcccaggtatttgtctgcctttaactttttcagccgagcttaccattatttattcttttttgtttgcttacatactcactttaacagaccagtaccaaatttcggtgaccctatgagggatcgaaatgcttgggacccaatgagtcccacaaacatgggtccatcatctaatgctaataattatggctttggaggccaggtgcatccaaggtctgctgacatggctttgcctgtgacggtaagaatcatatggtgctatttgtaacttcactttctgctaatactcgtttttttcacagtgcggcatgttcatggatttaggaataaagaaattatacttcatttaatttattttttctaagagagatttctcaaattgtaattcttttggatttcatttatttctcttctaaattctaagatacaaaatagtaaaccagtaaaattaacatatatacttctgataagaagctccaatttactaattatccatggtggtacagtggatatctgtaactcaaatgtttcagtcattgtttaacgatggcttaataattacttgacaatgctttattttttcttgcagaattttaaccagtctatgccacaagtagctccagttagtcaacaaatatctccatctcaaaaacctcttcaatcacctcagcaattgcctccttcctttcaactccattcgcagatgccagctccttattcacaagcacaaaccaccgttgcatcactgcagcagcagcacgttggtcagccacgtgcaccttattcttctgttcaaatgcccatgagtcaaccactgccatcccagcagttgcacggttcaaatggtctgcaatctattcctcaacctcagatccagcagagtgccaaccccggcactgtacagcaacaacaacaacttcctcaacctcttcaacaatcttcttcttcgcatttagctcagatgatgtcacaacaaaagcaagctcttcaagcaagctttcagtcttctcggcaggtagtctctcagctgcaacagctgatgcaaccaccaaatcaaggttcgatcttgcagcagactactcaggatatcaagcagcagcagcagcagcaggtaaattaatgagccttgtgtttatctagtaatagctttatacaatgacgtttcattttcttcctttcttcgctttcacgggttgttagtactctgatctttggttcaattcaataccaacttatttacattctgccaaatgttctgtgtttcttgtggttccagtggcctgggaatgttccgcaggcagcgaccagcatggttccagctacaatatctgtagatgtgccttcatccacatctgctgctactcctattcctccgacgaaccctgtaaaatgttcctggacagagcacacctctccagatggatacaaatactattacagtagtgtcactggtgaaagcaaggtgagaaactagcatcggttagtgggcttcttattaccaggttatgtggcttgacttgttttcttttctttgttactaaacctttagtgggagaaacccgaggagctgatattgttcgagcaacagcaacagcagcagcagcaaaagccattagctgtgcagcctcattcccagtcacttcctcaacttcaaacttcccaacaaatttcacaaacaccgcagatacagcatcaaacacagttccaaatgcagcctcaacagcagctgccacggccttctttatcttcgactgtcagttctttttctcttttgtttttaagtagcataagagatttaatagaattgtcattattaccgattactgaccattaaacgtaatattccagtatcaggcttcgggaatgatgggtcatcaaaacatgcaggtaaaaagagcccccaaatctttcattccttttcggttttttagtgtttagaattcgataccacaaattaattcttaatgtgtgtgatttcaggggcatcagcagcatgctcaggagtggatgtggaagaacaaaccggcaggttcttatcgattccccaccggtattctgattgcactttcagtattctcaactatatatctatttttttcccgagttctctatctaacatttaaatcctcaggttcaggagcttgaagagagtttgaggtggcacgagagcgaaaatggcatggcgggcataaagttttgagctcttttagctgttgaaattcgacatgtaacgataatgttacttagttcttctcactattgttgagctttttacagtgcaaaaattaacccctaccccttagtagtgccatttgtagtaacattaggtaatagaaaatacaagttatatcttttccaattcactttgtaacataaaaataatttggtcataaatattagatagttatttagttccaacatatttttatttatttattttttatttttcaagcaatttagttccaacaacattgaactatgaaatgtctttgattttcacctatttaaaagataatattcaaatttatttagtttttatttcttttaataattttcataccaaaaacaaaatcaatgaaaaagataaaataaaattgggaaattacttttcaaaaattagaggtggacattcaatcaaaaaagaaaaaaaaatatggatgaacatttttattttttacattttgtttctactaaagagtaacaacattaataattatagtgagttcttaggtttggattctagagtggtaacaagtaacaactatatagaattattgggataaaattacaatacatctctttatgaaagagatataagactttaatgtcttaaattaatatacttttgttcttatcgtatgggtgttttttattttctgtattttaattttttttttttt

SEQ ID NO: 381500 - DNA, 1100 bp, Cannabis indica
taattcataccaatattcatattgtcatcatatggaaatcttgactttccttatttgtaatttttgctctaacatatacataggttgattggaagaatattgtgtgaccatgtgtgatatttcataaacaggttgaagaagaggaagaaaaggcagtaataggattttggagtgcatttagttggttggttggtatgacagttatcatagccgtgttatctgaatatgttgtgggtactattgaggtaaatatattgaagcctttattttaagacttaattaataccatgtttattcattataaaattttgattgattatatatatataattgctcaattaggctgcatcaaattcctggggcatctctgttagctttatcagtatcattttgctacccattgttggaaatgcagcagaacacgctggctcaatcatttttgctctgaaaaacaagttggtacgtgacaaccacacattttagattttttttttcttttttaattttggctttaattatgtaatttggctttcataaacacaggatatatctttaggtgttgctttggggtctgcaactcaaatttctatgtttgtggtatgtttatatatacttatattaaagtcatttaatccaatcaaagatgttcattatagatcctatattatacttatctctataccaatttcaggttcctttgagtgtgattgttgcttggattatggacattcgtatggaccttgatttcaacatactcgaaactagctctctagcatttacaataatcataacagctttcactttacaggtttctttactttcttgaaactaataatatatgtagtgtaaacattaatttatatacatatatattaaaaaaaattaattaattttgtaggatggaacttcacattacatgaaaggagttattctcttcctatgctacataatcattgctgcatgcttttttgttcagaaaactcccttgagtaagtgcatatcttctatatgagtagtgatatatagaaacctatattacattatattattatgaaaaaaaactgatcacacattttggtgtatatggatttttcatgatc

SEQ ID NO: 381501 - DNA, 1519 bp, Cannabis indica
attatataaattatcaagtataatagtcctagctaatacacagggagaagcgcctaacgatctctctccaaggcattgccaatctatgtgattcaccttaattaatgttcagatcatgaagtagtacttaattcatatatatcttaatttcttcttcttcttccaattattataccttgatcaaagaggagtatatatatatatataatattcatatatttctatatagatataatatgccaaatcaagtagttgatcaatctatagaatccacgatggagatggaagctgaagaaaataactcaacggccatagtaaatgaagaggaagatttttctgcacaaaagggactgaaaggcaagaaaatttcatggcaaaggttaagaaggaacgactctttggacatcgaatctcgcagtgttggaggtcaccatgcatatgctcatgcctccaaggtttctatttctaatttaatttattgtatttgttattaataattaccaatttgtattattactattattatatttgtgagtgtttgattatgttggatatgtgagtgatattttatatgatatgaaagtgtgtgaatcaaaatttttgtgtagggttgtgatgattggtcagtgataattcaactagcattccaaagcattggaatagtttatggtgatataggtacatcacctttatatgtgtactcaagcacattcacaaatggaataaagcataacgatgacatcttgggggttctttctttgatcttctatactatcactttgattcctttgatcaagtatgtcttcattgttttacaagccaatgacaacggtgacggtaagatcactttaattcttcctcacatttattaatattgtgttattatttacacaatagctaataaattaatgagttagagtccatgttcaaagttgaagataatgtaaaataatattcaaaagaacgtacatggaaaaacttttttatttccagtaaaatattagtaactaataaataaataaatttgtgcatacacatgaatatatttatatgtatattttttttatatgttgtgtaaattattaattaaatataggagggacatttgcattgtactcgcttatttgccgatatgcaaaagtgggattaacaccaagtgaacaagctgaggatagagatgtttcaaatttccagcttgagttgcctagtaataaactaaagatggcatcaaaactcaagtctaagcttgagaattccaaatccacaaagtatttccttttgttcgctactatgctcggtacttcaatggttattggcgatggagtcctcacaccttgcatctcaggttttatttacaatatatatatatatatatatatatataataataatcactaatcagaattatttatgggtaattaataacattttatactttgtgttttgcaaaagttaccgattggattctctcttttgttaaattataaaataaaccctgtattttctgaaatggtaaaaa

SEQ ID NO: 381502 - DNA, 2785 bp, Cannabis indica
atgctatattttgtactaaatttagtacagctttaatatgttccaaatttagaccacattatatgtaacattggagtttaattttattaatatgaactaaaaaatatatatacaccacattgaatatttatattattctactagagatgttttaatcactaaggatctccctcaaagaagctaagtaacttttaaaagaaattgcggcagaataaatatttaagtttaacttccggttgtaaataaatacttaagtttaatttttgacagcaataatgcctaagttatatttttgaaactctgtaagtatttgaccgttaaatattaaatcatattccacgtgtcattttcttattggtatatttaaactaatttttttttaaaaaaataaaaatttaatgacttggactaatcaggaattactacgtgacaatttatataacacttaacagcccggtacctatataaattatagaattataactttggtattattactgccaaaaattaaatttaaatatttatttacaactaaaaaattaaacttaactatttatactacaaattactttaactttttataatatatactttttgcatccgtacattttatttgtctaataatcaaacttgaggagaaattattaatagcataaagttaagctcctaaacaataccaagggtagaaaaggttgtagtcatttgacattagtttgcttggtacactatttaataacttgcatttattacaatttcaattatttattattttcttttttttgtaaagtttacatttcaattattgtatacgtagtaaatgtcaactggcaattgctagctacaatatgtttgacaatattgaagaaggtgggatttttacattaaatataatatataatactacaatacaaatttttgaaattttttgggtgccagtattgttgaagatgctatttttttttttgaaatattctttttaaaatgtttgggtgccaccatttgcatctccaaagatgttacaaaaaaaatgtgccaaaatgaatctacaatcaataagaaccatttttttttaatagtatatttattgtattagcacttggcagttggcaccaatgtcacgttttggcaaatctatctatatataaaagtgacttgtgagattcatattatactcataactattaaaatttaatttcgataattaaataaatattatgtgtataacttaaatatattaaaattaattttctctcttttccacctcatctcacttggacctaaacactttttgtagcatcatgcattggtgtgatgctttcaagcatctctaatggtaacatctaaaaaaaaatatgataatagccctattgttatattatttataaataatatattaataaattaaatatgtgtaagaaattaataagtgtgtatgataatctatatttgttatcatcattttataatttataagatatggtaaagttacttattactataaataacttttacaattattactaatattaaatgtgtaagaaagtattacacatcttaatttaaaatttttaaaagctataagagttattttaattagagaatgagtaattttatacttatttattgagtccataagctcaataggaatagttatgagttagaattttatatggtgatatcctacactatataaagaggtccaatgtactcatattgtgacaaccaagtttctatcaacaaagcactttgctagaaattttaaaatgtttgataattctaaaagctattttctagtaaattttcttagtgcttagagatagggaaaataagattttagacaaaagtgatcaaaatagtttgtttaagtcatggtgtatcctactaatctacactcaaaattgtgactgagtgtttatgtatatatatcttcttcttcatattgtattatatatattatattatattacatgtgttgtgttgtaattcatctcttctattttttttatatatataatatataatatatatatgtattatatatatctgttataatatatatgtaatttattcttattttaattgtattattttataattaagttataatttaacttaatttattttcgattgatatataaaatctctaacacctactatcaataacagccaattaaaaaatttatatatatttgtcctgcttagctttggcatcaatttaacaatagtgacaatttctttttactcacttcatctcatttgagtttatgataagcacttcttatgacatcatgcatatgtgtgttcaaataaaaataaataattattttaacgcataaaaaaaaagatatatataacaaactatttagtaattaccttaatttaagaattataaattattcaaattaaaaaaaattatctatgtataattataattatattcacgattatcgtgtagtttaacgtgtgccttctattactcatatgttctttgctaatgatatttacgtattttgccaagcaactaggggtgctattgatagtatccttactttacttcagctctttgaaaatgcttttggtcaaaaggtaaataactctaaattatcgatcttcgtcagtcccaacattcactacaagaaatataagttttagctactacgaagttggtagcaaataatctatatttggtagctaatactttttttgctaccaaatttttttgtagcaaattggtagttgtatctcggtcgctgaaagtattttgctaccaaatatttggtagttg

SEQ ID NO: 381503 - DNA, 4311 bp, Cannabis indica
attttttttttctttcttattggctgatttgaagaaaaaatatacataaagtggggccaaaagacataaagtgggcccaaacgatgtttaagtgtgcagggcgtttgagattagagttggtagaattccaacacgtagttagtagtttcgtacctatctttataaagaacaatcctaattttgaatctccaatccctataaaaataaaataaaataatactcatatgatatgatactccaatttgaaatcggaaacaacattttggttcaaattttttattaataaaatttgttaattgaacttagaaaccatttggagaggtaggtatgatgataatatatgttttgtagtaatatggtgacctctagtctctaatcactatctgattttcatttttcaagatacaaagaagatgtatatgatcgaatatggcagccctttaatttcccagatcgaaaagttttaagcacatcgttggcaatagactctaagtatacccaacagtctttcaacccaccatcaagtgtcatggcaaccgccatgtctcctgaaaatgtgacaagtccttatttttcattctacttgaagcctgagaatccaaccgcacaatactatgtgtacatgtactttgctgagctgcaaaagctgcaaccaaatgagtccagagaattctacatttatcaaaatggggagtattttaatggtgatgttatgcctacgtctcttaactacttgtatactactactgtatatagtcagtctcctatcagtggagacaaaatcgagtacgatctcgaacaaaccaagacatccactcaccagcctatcctcaatgccttagaggtttatattgttcagaatttttcagagtcacaaacacatgaccaagatggtatgtatataaatgaatatatatgggttgtgcaatgctagttatacttttcattctttctcactttcatttttattattatgttttatgtacaaaataatagttggtgctatgatgaatatcaagtcaaagtatggagtgagtaaaaactggcaaggggacccatgtgctccaaaaacttacacatgggatggtcttaattgcagctataatggcaaagatccgttagaatcatatccttgtaagttaaatttcttcacctaatgaattagctagtataattatttcaaatcagatataaattttaaagcttttcaattgatcattcaaattaattacttaataggaacttatcttcaagtggattgactgggaagataccttcttatataacagatcttactatgatacagttcctgtaagtccatatctaactctgctctgtctttaatcattataatgtcaatattggtttcaatttaagactccttattactaaaaatgtacatggttgatcatttcagggatttatcaaacaatagtttaactggaaccgtacctgattttctttccaaattacaatccttaagctttttgtaagcttttctagctttacattatcacataatgacctttgcagtgaccactctccttgctagtactatttattttaacttatagtttcttatatgattcagagacttgagaggaaacaatctgacaggttcagttccagtcaacctcattgaaagatccaataatggttcactattactaaggtaaaaaaatgacacgaatacattatacaattatgttataaattattattatttttcatcccaactcaattttgatatggatttgtggtgaactgtgttttattcaagtgttactggaaacccacatctctgttccatagtttcatgctataaacaagagaagcataaaaactataatgttgctattatagtatcagtcgcatctctgtttgttcttctagttgcaatctttatcggatggagactgcttaaaagaagaaaaataaggaaaaatcttatatcattctatatgtataatgcaaccatgtaatattgaacttaattcttcaacttatatataaatataaaaattattggaacagacaagtacaaagcaatgaacaacattgggtcagaattggagcgcaaaaaacatcaatttacttattctgagatcacaactataacaaacaactttgagaaagtcattggaaaaggaggattcggacctgtttattacggctacttaaatgacaatcaagtggctatcaagatgctctctgatgtatcagaacaaggctacaaggagtttcgatcagaggtataattaaaacaagaattcaaaacatacacaactacttaattggtttggatttggtactttaatttagttaactccaatgtgacaatttttcttggtcaatctactaaattaagaggaaccattacacacactttgtttactcgtatagttatctagaactgatcagtgctagttcaaatcaaaatcctagtacttttctttaacagcattcatatgttctcacaccttttagacaggtttttattaatcgaatgacctatatggttttaacttattttagatttgtgtgttatttggtggtgaatttacggagttcaatttacaggttttacttctaatgagagttcatcacagaaacctgactagtctcattggatattgcattgaagacaactgtatggggcttatctacgagtacatggctaatggaaacctgaaacaacatctctcaggttcacatttttttcatactgcactaaagtgcactctcatattgctatttcaaatcaacaataaaagacattccttttcaagtccattaaaaaacaagtgaagggatcaaactatatattttaaatattttggtttgcagaaaaaaacacttgtattttaagttgggaggatagactaaaaatcgcagtggatgcagcacaaggttagttgtgtatataaatagtacgtaatgtgtgtatatataaattttgttgaaattaattgtgtggttgagtttggtgaaaatgacaggcttagagtatctgcaccatggttgtaagcccccaatcatccacagggatgtgaaaactcccaacatcttgttgaatgaaaaattcgaagcaaaacttgctgattttggactctcaagagcttttccaattgaaggtggaactcatgtgtcaactgtagttgctggcactcctggttatcttgatcctgagtaagttctttttgcatgtgaacacataatacttacacttgtgtattagtaattctcatgtatctttaacttatcaatttggtttttgctttttcatgtaaaataggtacttccaatcaaattggttaaacgaaaagagtgatattttcagttttggagtagttctgttagagatcattacaagtcggcctgttcttgcaagagacagtgataatgagaacattcatgtatcacaatgggttgaatttatggttggaaagggagaaattgagagcattgttgatccaaggctacaaggagagttccaagtcaactctgcatggaaatatgtggaaatagctacagcttgtgtaagtctaaattccagtgaaaggccaacaatgactcaagttgtaatggaattgaacgagtgtttgtcattagcaatcgacaaggatgaccctttaccaaaaacaatgaatagtctcaacgtggatactgatataaacccttcgccaagataggctttagtgtggagtaactatatatgtatgggtgtgagtcaaattagttttcatttctttgcgcataatttttatttataaggcgaggtaattatgtataattttttgttattatatttggaaaaaacattagtaattacatagtaaaatagtattatgtagtaattactatttttaacaacactttttagtaagtacattataattatggagattttataaaaatactaattttttttagtcatttttatatttttattgtaatatttttttttttttacatttttaccgtactaaatttttaaaaatattgtattaaagttttaaagttacaaagatactatgttttagtaaaatataaaaaaacaacttaaaaataactctaaaacaacttaacaaaacaacataaaaataaatataaaacaacaaaaagataactagaaaacaacaaaaaaataacaaaataataacctaattaattgcaacatactaaacaatatcaactcatcaatacgtttttgtattgcaaattttttctacttagttttgacaacctgatttatctttttatactactacattattttttttttcatgaaatttgttgttacgacttcat

SEQ ID NO: 381504 - DNA, 1881 bp, Cannabis indica
aaatatttgattataggacatatatctgctttaaattttatgatgttgtatataaatggcatattaaacaatcataaataacatagtaatagaatatatgaaaatgttcatttgaattcataaaaatataaagaaatttaatatctactaattaattaatatatttcattaatgaattattattttatgtgtttatgtataattaacattaaataaaaatataaaaaaattattttaatttatttaaaataatatataaaatttatgtactcaatcaaacaatataattcaattagtgagaatatgattagatattaccctatacagctaaactaacacagtttacatgtttccctacaatcatattctctttcataatatgtcctataatcaaatattttgaacacctcgaaccaaacgcctttttaatttttaaattattgtatattattttaattgtattaattataatttgtataaaactctcttctaataaaaggtgggtcgcaattttgagaggagatagacataatagaatcctagaaatacaagaaaaagaaacttagaacgagtttggatgatttgtgatagtttccaactagtttcctattcttcccttgttttcttataaatttaattgtgtctagtttaatcatagatttgtgtttagagattatgagttaaattctcaatttatagatttgatggatattgtctgatattgtttcatgagttaatattagttaatggttctttcttccgttattaagtgatctattcatatttgtgcttatttgacaaccaactaacttctacagcttaattagttatgttagttatcactgttttgtaactaactctgtcaaactaattttgttgtaattcttgttgcttctctctgttagtttgttacaattttctgtactcactctccataaataaaggctttctcctctaaggtcttaacctttacaagccttagagaccttcgcttcaattatttctagatagtgttttatcgataggttcatacatggtattaggaagccattgacgcaagtctcataaggatcctcaaattctcaaaaatccacctcgttctgctactcaaaactcaggggcaaagctctggctatgctcctcctcaacaggcctggaatccatttcagaattctctcaattctttactaacagtgaagctcgatcgctctaacttcctggcctagaaatctcaagttgttcccagcgtcattgggcatgaccttgatgatcttttgtttgccggagttgctcccccagaaagactagtcaatggtgctactaatccagagttcacaacctggaaatgaaaggattagctatttcttagctggcttcgatcatcaatgattgaatcgattcttggattgcttgtgaatcatcttttgtcttatacaatctggagagctctagatcagagattctcttctcaatctaaagctcagttacttcagatcaaatcccaactctcggcgattcagaaaagcaacctgtcgattgctgattacttcgacaaggtcaaggttcttagtgattctttaatcatagatggccatcccatagacgagagtgatctcatcatgcacctactcaatggtctaggatcagaatacgacccagtggttgttcatgttactagtcttgttgacgatctttcatttgaatccatacagtctctacttctcactcatgaaagtagtttggagagacacttgactattggcgatcacacatctaagccctcagccaatctctcagccagttcttcaagatttgttactagttcaataaatagcaattacaatgccaaaggtggtggctcaactgttgggttttatgccc

SEQ ID NO: 381505 - DNA, 2525 bp, Cannabis indica
attcatctcaggtaggaaaaagagttccgtcagaagaaggccactactaaaagggtaagataagcactccaaaaacaagacgcaacactgccagacttggagaagataaagaataacaatgatcgtctaacaactagacgcgtggcaaaatagggagagcagagagaaaggacacgcttcaagaagagaatagatcagaatataggccagccatgcaatcatagaacgtactacataaacaagaaaaagactacgtaaaagaggaggattaggaactaaaaaagagaggactcacataatcaaattacgactgttcatggctaaaacaccaactctaaaagtaatcctattttggttcgagtctacagtgccccactaataatagtgggcactgtagacaacagcgtttttacttttattctttttttttgtactttttaataattaaataatccttttaaaaaaatcattatataataatatagtttattaatcaaataatataataataaagaatatactttttaatgtaatttttagtattgtggttggaatcggaaaaaaatttagtgttgaaatagtattcttttggtgttgatttaacactaaatttgggtttctctattagagttgtcctgagtgatgatgattgaggaagatagttggtaaattgtaaattgtaaaaatgattttttttggagggattagagatttagagtcttgagaagagagagaacttttagagaaagagagaagggttggtgggaatggatgagatattgtgattgacttgaggaagagaagacaagagaaagactgccttttcaatttcttcttacccacgtcttggaatttgaatcacctaactttttaaattttaatgggccaactaggaataggcaggcctaactttttttttttttttggaaatttacattgtatactaacttttgtcatttttttacaaaaatactgtcaggcggtattttttacttttttattgtattttttataagtttcatactacagtatactgtgttaagttttcactgttattttattggtgttttttaaggtgttctactgttgttttgagttgttctgctttgtgttttactggtattttataaaaacacagtaaatttgaaaatatttcggtgtgacagtatttttgtaaaagttaacctaaattctaatatttttgtaagtttcttatttttttcacttgtattaagactttagcttcagtcctgtagctcggtttgttttctgttaatatcggttacttacaattaatttttttgtcccctttgtctctaactgtattaactgattctttagcatcgttttagttaagtttgtttgtaatgtcagctggagttagttaagtttgtttggatgatgttagtaatgttatgtagtataaatactctattcccctctgtaattttattcattcagttctaataaaatcttttcattctttctcaattccccaatatggtatcagagcgggaaaggaatgctttcccttgatctgttctttcttccttctcgccatgcttcttctccggcgacgttacaccgctgagctctgttatgctctgtctggttgtttctttcgattctcaaatccgttgttcttccaactgatcttgcttcgactcttcaatggctactgataatcaaagctccgctcatgatgtagacaatgacggaatacctgccatgattggcgatccctctaattcgacgttacagactcacctgaatcaacaggttgttcaacaaagaacccatcttgaagattcttcacacctgtactacttgcaccatggagacaatcctggtaatgttctcgtttctcaacttcttactggtcaagacaattacatgtcttggagtagagctatgatcttggccatctcagtcaaaaataaactcggttttttggacggtaccattcccaaacctccctcctctgaaactcttatgtacaatacttggtttaggaacaataacattgtgatttcttggattttaaattctgtgtctaaagaaatttcctctagcattttatatgatgaatcagctactgctatatggtccgatctcaaggtccgatttcattaaagaaatggtcctcatatatacaatttgaggaagagtttgatgaacttgaagcaagagaaccagactgtgagtatgcattacacaaagttaaaaacaatatgggaactgttgtcgaactatagacctacttgtgtatgcaacggttgcacctgtggtggtgtcaagaagcttcaagaacaccaccacatggaacatatcatgtcatttctcatggggctttccgattctttctctcaagttcgtggaagcatattgattattgatcccttaccataaatcaacagggtttttcaccttgttacccaagaagaaaaccacaaaggaaactcaatcaccacttctgatcctaatccaggagttgcttttgtgtaacaccctaactatcttaggcg

SEQ ID NO: 381506 - DNA, 1295 bp, Cannabis indica
aaaaaaaaaaaaactaaaaaggtttattttcttttcttttcttaattttatttttctttgaaaaaaaccttttgtacgtatattttcgattattattattattatttccaaatttaatatcagaaaattaacattttaaaatatatagtatatatttataaaaggggtatacttggaaatgcgctcctagaaggcgtgagacgtttttcttagttggcatgtgaaatctcatatgatatagagatggtagacacatgtcaccactactatgaaagaaataaagttcagttacgttaaatagattccaaaattaacggcaatgacaagaaaatagttggaatgatttcttctaactaaatataattattatccaacactaaagtttatttaattaaactatgcgtaacttaatttaaatttcacaaatattaaaaaaataagataattaatttttaacattaagtattaaatcttgaaaagataaggaacttgatgttaaaccataaagagagtttacaagaatcaaagaatctgtttccaccaaatccacatcaatattcatttgtcttgcccattctaatccatgaaacaaagtcttaagctttcgtatgtttcctactattttttttttcttgaaagagcagacaacacatgctcttgagagtctcgaatgacagtctattctgtttaggaatgtcagtcgggccgggcccggcccggcccgccacaaacccggcccggcccgacatcactttggcccggcccggcccggcccgactccttcttttggcctagcgggtcaagcccggcccgagataattgggccgggttaggcccgacccggtttttttttttttttttttaagaatacttattattttgttttgtttcatttgggtatttaattttggtggttgttgagacaattcattatagacaccttttttatatattatgttattttagagagagaaaatttgatgagaaaatagataatgcatcaaaacccaccattgattattattattatttgccctctttttttttattttctttctaaaaattattattattattaggaagtggttagttataactattatactattacaatatgacatgccttattaaaagggatttcttttttctttggttttgtcttgttttgagtcatgggtaatgggagaactattatattgtttgattatgttttaaaatcaatattataataattatgtaagtcaatttatttttaatgaagagaattataagggtgtgatggtaattcttttttt

SEQ ID NO: 381507 - DNA, 1987 bp, Cannabis indica
aaacctcggtcaacataaggtatcaaagtaccaaatatgttttttgtataaaaggagggtactaaacaagtatattccctttattaaaagatgaaatagatcatgtgtttaacaatttttaatataaccaacttgaagataattactaatgcgaacaaattcaaaaaaatgcaagcaattttattttgacgaaaaatccgctcaggtttttatttgtaccatcttagaaaatacatgttctattttttttcatttaacaaaacataatgtctaatcggtaacttttgcaaaatacacagtccaagatgatatttactctttaaaaaatactcattttattttctttatcgtaccaaaagaatatctacaaattacataaataataaaaaaaaaagttagtaacaaaattttaagaaagctataaaatttttacacataaataatgaaataattttaagaaaaaaatccaattaaaacttatctaatgagaattcttggatccttgagtaaagtaaaaatatctctagaaaataaatatataaaatttaaataccacactacttacttcataatattaaattaaaataaagattttaatgtcaatgttgacaaaatattctaaattattatttttatgaagaaaattttatatttgatatcactggaccggaaggtgtcactgctgcctcacaccattcttaagataaatattaacttaataaatatttaatattctattcaaagcatgaggggcatccaagagtacaagcctagctctaaaagaacactgaagttagagtcaaacgtcgccctccgaaaagatgcaagtctctcaaatcatatagcgtccgagaattgcccatttgttcaacaagattcccaatgcaaaaaacactataggtgactgcttcaacgtaggtggaaaagtaaacataccttccagatggagatatcattcaaacttaactcataatgttctgacattacgttttcctattaatactaattgatggctaatctttgtgttgtcacatcagccgcatacgtgacaaattctgtctcactaaactcctacttcagagcgttccatatgtacatatagtaaatactatttcctacacctatcaaaaaagtcatgtagggcttagaggtaaaggaaagatgtgcccatcctccaaagaatatcttattttctcattctataaatacaaaggaaaggggaattcgaaaaaaaaggaatagaggagaaaaagaactttgaaattgtaagagagaatatactctcaagtaataataatattatttattaataaaagtgactcgtggactacggttaattaacacatgaaccacgtaaaaatactattctctactcataattaatttcttagccaaagatttaggagttgccaaaaatcttagtcaatattttagtgctttaattgagagttgtaggaagcttttatgggaaatgtcaaagtgtattagtacactaaggatgggaggaacagcgtggtctaaccagaagggaccctctagtgggcttaagggaaaaaattaatgcaaatcaatggaacctaaggactcgcattaaatcctgaaaggatgatcctgtgccccataaggatattttgagcgaaggtatattagctgaacttgctatcctatagaaagacatagaaaaggtatctagaagacaaaagggtgacgattctgagtctaactatgaggactgagagccatgcgcaaataacatattagaagttgaattccctgaggattttaagatgccaaagatgtatctagtacactagagatattgatcccaatgaccatcgatctgaaataattcaacagggtcatgacattattaagagttaacaacgatgctaaatgcttatgttttccactaaccttgggaggatccactgaagattggttaaaaaaacctagagcccgacttcgtgatgttggaattattttacca

SEQ ID NO: 381508 - DNA, 1816 bp, Cannabis indica
ttcgtcgctcttgaggtcgagtgacctctgtcactcctgaggttgagtgacttcatcaccctggcgctgagtgacttctatcactcttgaggctgagtaaattctatcactcttgaggccgagtgactttgccacccttaaggctgagtgactttgccacccttaaggtcgagtgactttgtcactcttgatgccgccagtggcttctgcaaagaggagtgtgtttcctttgtccatcaagggtagctaacccttgctgaactagaaattttctttctctcctacttccttgcccctaagtgtataatgttatttatggtgttgtacacttgaattccttctctacttctaacaagaaaaagaaaattgatctggagaagcaattaggcatgattaaactattccaatattcattcatgtgagtccaaaagtcttctaagtgacctctcaaaatattacatttggaatctttagggaactgaaaacaacataaacaattataatagagttgcccgaaaatgcccctccttgattcttactgatgcaaacaactaaaggatattaccactttctttcacatggatggtatttcttccaagacttttcccatgtcctctcccctacttggtaacttgtctcccctgcggcctttccaccctgattgggccttccatgcatcgtcgtagccacgagttccttagccttggtggccatccgcagtaagatgttataacattccctttcctctttttgctctccttttagggttgcaacccttcatggggtcgaaaacttcatgaccaaatgatataccaatgtaatttcctttagccatttgagtgaagatctttgtattagcgcgttgaaggctgtcgggcaatccactaccaagaaggttgtcatcactatggagtatctaggttgttctccaatggtgagggccaggtcttgttccaaggggttggactgaatcgctggtgaacccatatattggtatcgcacaaggcttctgatctttgattcctaattccatctttttttgtgaggaaagtgcacacccctgcgtcctcctccgggaaggtgatcaaatcgttttcacctttgaaattctttggtggcctcagctctaggctcaagacttaggcttcacgcatggctttacgggcatacttctctctccccttataggtgtctcctcctaccccgggtcctccgatgaacgttcttatgtctctcagcacttcaggggcatcctcaagcttatcttgctagtgtcctccatccagcctttggttctcttttttgtatcctctaggtactcccattgtatcaactcgtcgatcttgacctttaggtacttacactcttctatgagatgtccaacatccttgtggaactggcaatacttacttggatctcttttggccctttctttcctcaatggagggggcttcttgaagggcactcgatgttcatttgccaaaaagatatgccctctcaagtgaattaactccgtacaatgggagtacacgcggggtattagctccacctttatcttgacattcttgcttcatccatcatctctatgcctagacccccttttccttcgcgattcctgattgtgccccttcttgggtaggtggctccttcccacgcccaagttcttgtgcccatcttctactagaatatatatcagttggccctctcgtagaagtccttcagatcatctaattttctcttcaacattgtagaaaataatgaatcgaactgtgtatatatttcatagaatagtacatatttatatacaaagctagga

SEQ ID NO: 381509 - DNA, 3100 bp, Cannabis indica
aacttttaaaatctcatagtaaaattttctcttgtttctatttaatagatttttcttaacgttgtcattattactaaacattttttttaataaaaaaagttacatttcttatgaagaaaattgggaataaaatccttgccccactccttagtagcatagacagtcccgtcccgaggaccaagtgagactgagagctatctttaaagaaaagttagtgttacagtgttacagtcatttctatcttttaaaaagaaaagatcagaaggtttacaatttataaaaagaaagagtttcttttggccaaatgaagaagaagaagaagagttttacacaaatataaaatatttctttgagaacttataattaatttaatttggtaaccaacttatattcctagctagcttgagtgtatgcttccctagtttcccaattaactagccaattaattaatccttaaaagttaacagtgtgtataaatattattttttacatatgaaaacaattcataactaaacaaaaaaaaaacagaacagtagtattatgtacaatatttttatttctattttcatttgcagagagtcacaccttactctcacagtcataaaatcaaacacatgaagcccaaacctacaaattatatctatactatatacatacatatattgcagcgtgtgaattaaaatgaaaaccaaatctttctgaaaatccatgcctcttctctttcttcttatatgtatatagtttacaaattaattgggataagtaggtagttggtggggtagcctaaaccggagctgagaagccggcgattgtacggctacgccgtgccagcagattccacccttgcaaatctcatgaacatgatgatgaggatgatgatgagtggagaaagcgtaggtggccgctttgcgtgacatatcccaagtaagcgttcctattagaatcaatatcactaacactgtggatacaatcagaacaatcacaccactgaagctccgccccagtattataccataaccctttattaacgcgataactatcacgtaaatcgtcgtcaagttcgccaccaccgcatcagaaaccgccatatataatcaatcactgcagagcagagtaaatatgtagtactaattaattaattaacttaatttgtctttggcaataagtaaataggtccgtggtaggggtatttaaggaaaacgaaaaagaaaggtttggtttggttaaaatttaagcaaacgaagagtacaatactagtagtagtagtgcgtgttattgccgcaaattataagtcattatatcttcttcttttcttggaaatggtttctggtataagtatgggaccttaaattaccaaaatgggggtattaatttctcttatccttacctttatcacaactcaacttatccaaattttgggtcttggtccaaacgataagcattaagctgcagcacagcagtggatggattcgtgtaccaattaaaattgagaaatactaatattctcctaaatttcatatgttaattactataactaagtatccatttttataattgtatttatataatataataagtttcataaatataataactaactaatgataaaaggtgatgtctaaatattgtatcctcatcatcactattttttattgtctcacaaccttcggtttctctcaattaaattatgccacgtgttttcattttatgtgatatatgagatatttattttcgtttagacggtgacttaccctacacttacatgcaacaggtatgaggaaaaaaaattaataagattaaatgtaaataaagttatttaaatttttactcacaacattaataataatttaataaaaaaataataaaggagaagcattattaactaattttagttaaaggtgtataaatggagcaattcgatccgtatttacaaaattgttttcaaaatagaagcacccgtttagtaatataggccatactactaccacttgtgaacattttcttttttaaagaaagtatcattttattaacgaaccaaataactgttacaatagcattaataaatttaggacaaatatcaactcaaacaataactgttatcaagctagtaatagattttattagtgtgtgagccacgccatctatattacacgaaataacttgacacgaactaccactaatagtagttaaaaaaaaaacaatttcattaataatatatttgaaagcaaaattagaacttagataattcacctaattacaaacacataaagaatctatttcagcttttgaaatcttaaaccccaactcaaatagccaacgaaggcccagacggagagccaaaagttctgcaaccacaacactaaaattaccatcaccccaagccacccaaacaacccctgcactgtcacgaatcacgctaccaaacccaacaaagtctcatcccggagtaaccgcgatatgtctgagtgtcaagatctcacaataaaataacttagcaaatggtaaactatgccaattataagggagcaaaagtttgaggcactcactcactattattattattattattattattattattattgtacttttttaatttttttttccttctttattaattgtaattacgattttgttggagtgacatgtaagagcatctccaatgattatattgtggaggatgtttgataaaatataaaaatactataacattagagataaaagaatgttattcttaaaatttatattgatgttacataatgatattgatgttatatttttttaaataaaaaaattaaaagtaaaatatatacaataatttaataaagaattttttttatatataataatgtgtgagattgtaattatagtattagtgaaaggtgctacactattgtagtatttttaaaagtaagcgtgtcaaaaataatttgaaagaaaaataaaataaaatattatatgtttaactgatgtagaaatatttagtacttctaaagaatgatactatttaggggtgttcataaaatagccgatccaatccaatccgcacgatccaatccaatccaatccacaaagtgcgaattggattggattggaaaat

SEQ ID NO: 381510 - DNA, 2016 bp, Cannabis indica
gtttatgctagttttatcaagtatataattcttccataatgtcttttttttttctttttctttcccttagttgcgtacatctgtctcccttgaaaattgaggtaaatttatgctgcttttcattaatgtagtccccttttacttgatattgtgtacataatagttactagttaggtcacatcttgaaatgaaagccaactacatatataatatttttttttgggacaaaactaatgcctaacaaaaacaagcaaccaagagattacagcttgaccacatgaggttcgctttgggagacacatggcggctaataagggctgcgccactttatacttttggatcctatacttttatctttttatgattgagagtttctagggttggatgtattagaaataatatatagtaatgtttagagaatcaatgaatatgtaaatattataacatataatattattctaaacacagaatctgtagatgtatctattcactactatatattaataatagtgtgtttactatacaaacaaaaagaaagtgttgatgattagctctcttgttttctcgttgaaaatctccatgttaagtaccttaattatgtttcttgtcttattgaaaatctctcaaatctaatatttttgctttctaatagataggagtgggaaaatttgttcttaattggtaatggcaagtacattgttctccattggggcagtttactaaaattagatataatccaaattcagcaaaactattttatctgacagaaacgaacaataataaatgttacatatataataataattaaccaaagtgtaaaaagacattaatactggcgttttgatatatatgttactgttacctgtttctatacatcgatttggcaagtatggcaagtatacctaagaaagaagaacaaagaaacgtacgagtaaaacctattttgctgcaattagatttcttttcttccacaccttgatataataattgacttgttaaaaaaactataaaatattataataataataattgactctcgaacatactaaatcactaaaaacagtttttttttctttttattgtaaataatttggttagtcttgtagagcgttatcttaatgtaataaatattgtccaaatttacctatcaatgtatccgttttctcagtcaaataacaatttggcccatgaacctaatacccaataaaaaaaaaaaattaaaggttcgaatttattaaaagtcatgtcacagtagtggaagagaaaattttagaggtagaaaaagaaagtttcaaggttaagattaaaatgatttaactaaaagtaccattatttactttccattttataaaacataaaatggttgaatttgacctttaataaaatagaaggactctactaattggaaaattttaaaaacacaaaatctagctaaaatgttatttacagtatatttatatatttcaagtttttataataataataataatatatatctttttgaagaagcatgtatagcttattacaagctcactaagaatattaaattcatttttgcaaaatatatattaaatttataaaaaaattctttcttgtattaactttattagattgagaaaaaaagaaaacatgccccatttagcacgaatatataattagtcctgcatttaaatgataattttttggccatacttttattaaaataaattaattttatatttttgctattttttttatatatataattaaatctaaaggtatggctagatctatatccaaagttatggttagggaaattgagctaggggattatcaatttattgaagaattaattgtttgatcaaagtaaaacttatatatgatattaatttgaattcaaaacatagtgatataaatttttacaatttaacaaaatacaaaagctaaatcgcatattcaccttaaattaacacaaaagaaaaaattagtattgtattagctttcaactaggaataattacataaggcatcatttttt

SEQ ID NO: 381511 - DNA, 925 bp, Cannabis indica
aaatattttttatataaatattgtagttaaaaaaaggtattttttaatattttctttaattaagtagctaaattaagcataaaaatttaaatttctcttttattatttgctatcggaccaaaatctaatagtttaatatttatagttaaatttgtttagtattcatcaacgagtaataccccttaagaggtgttccatatattagcaaaattaataagaaatggccatgccatcaccaaatgctacaatatattattttaaattgaatccaaccatccagatataaaaatattttattatttttataatggtagaaataattaaatatgagtagtgttatcctaataccacatctatgtgttactttataattggttagcaaatatttatatatcgaaaatacattaataatattagtagtatgttacgtcttgtgatacttgataccttaataatgacaggacatgtgtcttccaattttttttaaaaaaatttaaagtttatatgtgaaaaattataaaaaaagaaattataattttagctctattaaattttgggctacaaaaccttaggtaattcgaagtaataattaatttggatttccctatgagctccataaaaaaaatattattgtcctataacaattgatttcatatcaatggccgacaaataagtgggggatattacaaatatatttttttttttggttatttttgcatttttactctcattcattattttatattttttatatgccaagttttcgaaaattgtattatagtttcaaaattataaaaataccgtgtttcaataataaaaaaaaacttaaaaataattctaaaacaacttaacaaacaacatgaacacaactataaaacaacaaaaaaaaactacaaaataataaaaaaaaataacaaaacaatga

SEQ ID NO: 381512 - DNA, 2741 bp, Cannabis indica
aaagaagaaaagtaaaaataaaaatggtttctttttgcttctatgccgttcttgaaagcgaggttggggagaaggtgacgtcacctagacacgtggacactacaccctctctacttactattaacttctttttttattatttcttattttattattataaatattaaagtaatttgtggcgtaactatctaagtttaactctggttgtagattatttatgagattttgataaactaataaaatatatgtgaaagttagagaaatagataaataataaaaaagtaacaccaaagcttctacgtggttacaacattaacaagtcttagttcaggaatcaatattattacaataagattggaatttgcctaagcaattgaggaatgagatttcaatcctttgcttgaatgagttttcttgtatttatagtgttagggttcctatttgtttatccttattttcactgatgggtaaatatatataatatactgactttaagtctttttgacgaagcccgacccattaggcgatgattgtatgctgatgtggatgtcatatcatattgatagttgtcaaaattgtgtcttatttttatggataataaagatatgttaaatgtttgatcctcaattactatctttttatattttggaagttatgatcatttgagaaaatcttgggagttaagttttgatattgcgggatctggtaattaatgaatacgattttgagctgggtgtttggatgcttgctgactacttctctggatgctctggctgagatctttcagatacgcacagtgctgaggattatctcacttgattgagtcatttatccaacatccgaaagataagactttactactagatttaatctattatcttagttgagcctattgttttttgggcttaaagtaattgagttgtaccacttttagaattatacatgccccatttggaaatacagataacaaaaataaatacttaagtttaatatataacggtaataatacctaagttatatttctagaactttcgtatgtacctgacaattaagtgtcaagtcaatatctatgtgtcattctcttattggtatatttaaatgaatttttaataaaaattaaatgacttggaccaatcagggactgtcatgtggctattaacttaacacttaacggtcatgtacctacagaagttccataaatataacttaggtattattaccgttaaaaattaaacttatgtatttattcgtaaccaggagttaaacttaggtatttatatcgcaaattattctaaaaattatacaataattagcattttctctactgaactttttacaatatcaagttgtgcctcttatagtatacgacttgttaataatatctcttgaaatataattttttgcagtaatatggtcctttgagcatattgtatttaattttatcatgacatgagtgatgcgagaaatggtggttgataaacatatgcaaattaaatatcaaaaagactgaatttctataaatgtaaaaaattagggggaaatattaacaagtcgtatattttaagaggcacgatctggtagtgccataaatttaggaggtaaaaatactaattattcttaatcaaactattaataaagtggtaagtcctcgttgaactcaccagtctgaggcgtggttgcccttaaccagataggggtcaaggctttgcctcgatgattcgccaaattttatgaatgagcattactagtgggcaccagcagtgcctagcacattctagacgtgtctttttgcgattggttaatgatactcctaaaaaataaattattatattaaattatatgggacccaatatttaattgtaccaatagtgatatgacaccgatgagagtattagacatcactaataccttttagcatttctctgtaggaatattcgtgacagatccacaacattaagtacttatattttaagttataaaaaatactttttgttatcttaaattttgcacatctgacatgacacctacgcgtggcataattcagccaacccttaacatgacaagagacttctaggcagaagtgtgcatggcagggcccgtatgaggatgatatccatgaactaaagattgacttttatgaagcatccagtcaggctatcaatatatcggccagataagaaaagattgacacacttcatgagtcttcccataaaaaggacaagtttcaagaagggcttggttggattgtcaacacaccaactagggtgaacgatactacgaatgttggacaaagctacagaagccttaatttcttccttaaacaacttccataaatatctctaactgtatcctataaatgtggatttgactgatctacctgagattgtaggagcttcaacaggtcataattgaatcctataatatatggatatttactttttggttactctttttacgaagctaattgtaacaatctctccctataaatagtgaatgaattcacagaaggaagggacctaaaatcataatctcaattgaaaagcactttgctgaattctttgtaaacatcttgagaactgtagctagaattcactctatcttccttagtgatctacacggtattatctcgtaatcaatacaactaaaaaggaagtaggtcattacttgtaacgtcctcgcttcaagcctccattggatccttacacccacggaatgaatggctcttatacacgagtacgtca

SEQ ID NO: 381513 - DNA, 3534 bp, Cannabis indica
ctaaactgcattaatggtatctatctagcatttgtactcagactttctgccattaaaaatcatgttttttctacatgattgaaagtcaagttttggacacataattttatatataaaaatatagatacatatacacacggcactcgcctcgccacatatgaatttggtagccggtgagtcggtgcccatcttgtcctcaaatcctccgaagagttattcttattcttattggaggaatgttacataaactctcttatataatatatgtacttctttattattttgatgtactactattactttaacatgtgtattttcatataaataagatcaaagtgtttaagagttgtaagaaagtggatttaatgagttagctaattatcaattctgtatgagaatactgaaaaccaaagcccagaacctaattattgcatataatatgtcattgttgtgatgatgtaataacatcacgaggaaatcgttacacaagaaaatgttgttttagatcatactcggattattgttatttatttatttaaaaatgaaagtttgaatgccaaaagagatataataccaaccatgtactttaaaaacaataaatactccattatttcactaatttttgtataacatttgtggtcaaaggcttcccaagtcttaatctaagtaattaggtagagaaacctcaattgtttgcatatattgtccataagtaaactcccttaatcagaaaccaaggtccgctaatccatcattatatcaatcagtagcaatcactcaccaaacccaaaccaaaatcagcatctttactttgaaaccaagctccctatagctcttaggacgtttcatttttcccaaattgcttttttccaacacttccaattgcttgtagtttcaataacaatttttactgtcaagtgtctgtctccttctcaagaaacctacctatcttgagacccaattacagaaaaatgaccataaaacattatggtgttggtataacatttcacaagcaaatggggtattttatatcaagggaaagaaaagaaaaaaaactaagaggacaagaaaaataaataaaaagaataattagttgatatatcctcatcaactgaaagaaattaaccaacagatgaatttgttatattaaagcagcaaaaccaagagaacaataatgagacacataaatttcagtgaggagaaaagaaaggcagacaaatataatgttttggcaactactcctaccagaatacccaactgggcaaccagaatgggtcctggaagatatcaagttaatgttctacaaatgtgtcagatggcaatttgaagaaacaatggatccaatcagctgcccatatcactacttctgtgatagtacctatcctggtaactattcacctgttgtggatattctacttcttatattcactactttttcatactttgcaactcttttcatcatggtaatggacataacaggaaaaggccaaactagtattacaatgttaaagagattttttttaccttctgggccaatttcactcccactaatcctcttggccttagccaatggacaccgaatcaacactttgtttcctctgtccttagctggccctgcaattctccaactggttcatatctctgctctcagtttcgagagcggaactggtaaagacatgaagtatgttttctttgaggcatcaacaatttcaggcattttacatgcaagtttgtacctggactctgttgttttaccatactacacaggttttgatgccttaaacatgtcgacattttcaggtgagtgtccatcttgtgtgtgccgaaatgagagtttgattgtgggtggaaagatagtgtcttacaggggttggtcactgaccacatttttggttgtgggtgctttgtgtttgagaataattttcagagtgtgtggggaaacaaaaggaaatatcttattagttagaaccttcttggagggtttagcttggatcctcatagctgtagattgtatatatctaaccataaattctccaccagagagagtaattttgaaagcttctctatttgggggcatctttctcttgatttgccttcatggcctcaagaaggtatgctctcatatcaaacgacttgtttaataaatgtacaaagaccattattctgtaaatatatgagtgacactgagaagagagaaaaagaattaaatgatgttttattttattttttctactcttccatacacaattttacaaaccagtcatgacaatgaaagaaatataagtatagcttacaaggaaacatattcttctggctggagttacttatattcacaataaaagggtcattattgtattgaggcatatataaaagggttccatctataaaaatcaattaataagaatagagtaacttatatttttattttttaatatccctttcaaaatagtgctattttgtggattaaaaatttaccaaaaatatggttttgataccatatctagaattatggttccatctcaaaattaattaataaaactaattggtaatgaaagaagtaacacatgtttactcattacttttacatttaattcatatagaacaacgttctctaatattatcgaatgaaatttttgagaaatcgcgtactaagccattctctttaagacatttgcagctcaaaaatatgcaagcagtcggaaattgcctatcgtaacagcccacttaaaataatgtattattttaatttttctactgttccataaacaactttacaaaccagtcatgacaatgcaagaaatataaatatagcttacacggtagcatattcttctggttgggtcggaaaaaaaaattaaagtcctgctgattgtgaaaagtgacgactaaagttgatcacgaaaaattacgctcttgtgagaaaattgattgaagcaatctgaattgtttagaaagataaaggttggtgatcatttataaaatcttaaatttagataagagcttaatatggtagactttttgaggttttttctcattgagaaacattctttgcctatataatctatgctttcattgtttagatatttcatatttttattttataattagttagataatttaataattttgttatgattaaaaataaaaagagtttaacagatttaagttatcattagtatattctgaaacaaatagacaaaaagaacaaaaactcaatcatctgagggaagtagatgtgtaccgtatggccatttattttggttggactatactaaacacagtgaaaggacagtactttgattggtgatttttttggagactcagggactgtcctcaccctccaaatgattctcttcaactctattttaacacattttaaattggagatgaataaatagcctcatgttgtacaagtatattttttaatgttatatataatttatatatgttttaaccataagaagtatagtgaatatcattttgttttttgtatattactattttaatatcttctttatttattttggtgggaat

SEQ ID NO: 381514 - DNA, 3868 bp, Cannabis indica
ttgggaaacaatgaatctgcttttgagagtgctctgagacagttctgggtagttgatgccaatgtgagtataatttccaactctctagaattatcattaactgcagtttctaaagatggtgcttcaaatcacaaattctattagtgaaaaggagataattatatttgctgttttgtgtttccagggcctgatcacagatgaacgtgaaaatgttgatcctgatgcgcttccttttgcaaggaagatcaaagaaattcatcgccaggggttaaaggaaggtgcaagtcttgcagaagtggtatgttagcttttcacctttgtttggggttttctaaacgactctttatagcttaaaatgtttgtgagtacaataaaactttgaaaataagactgagaaatttgtttcacttcaactcccaatgttcaaactactaagagaacaaagaattgagaattcttcttggaggtttggaccaaaatatacacataggggattactgcagcttctttaggcgtgagaagttgtaactttggaaaactccattcaaaggaactaaatgcattaattatcataccaatgtaagaatactggtgtaaaattaggcttggctattgaatctttaaagtttttgaggatgttatctcttagcatccttggattgtattcagatttgtgagctatgccagcaccaaagaaatattaaaagggatcctagtactgtcaaattttacgatccgtcctgtctttgattttttcttagaactgtccagtacttgatttgtcttctcattaacagtcaccacttgctaatcttgattcttaactaaccaggtgaaacaaataaagcctgatgtgcttcttggattatctgcagttgggggtttgttctcaaaagaggtatggtttagtttcctatattctttaaggataatgtcaatatgaaattttcacgattttacatgtatgccacagcatatgagaagctcaagaaaaagcaaacatatgaagactagttaaatcataaatcatgatagcaaattatggaacagatagatttttcttttcctttattatcttgcattcatctgatttcaccatttgggtatacatcaatattatcatttgatcaagagatcatttgtcaaatttcatggcttgtttttctttgggagaatgtcagaattatgctaactcatattttgttgtaaattgatgttatgcaataggtactagaggcacttaaaggttcaacttcaacaaggcctgccatctttgccatgtcaaatcctactaaaaacggtatttttacgcctttgagtgtgatgcctacaattgtatgaatacagccttttccagagatttacctgcactttttttttttggtgatttagctgaatgtactcctgacgacgcattctccattgtgggagacaatattgtatttgcaagtggaagtccattcaaggatgtcgatctgggtatgtatttaaacaaatttaagttgcttttgttttttacgtatattccatttttctgtgaagaaatacagcaagaattccaaacccaacaggaatcctgattttttttcctaattatttattattatcttttcttatgtgtgcggtcatacgtacttgcttgcatacattaaataatatatatcttcatcttttagtcaagtagaaaccgggcttattccctgggagattaaatttctattatgaatcagcttaatttatcttctgtagtaaaaaacagttctggaataattttgctttttgtgaaaatactgactatattctatttttcaggaaatggtcatattggtcactgcaaccagggtaacaacatgtacctttttccagggtaagttttgtccactaatgccttttaaaagatgaagatagataacataaaaagtgttaccgttttagttttaatcttatgtatgtatattgttcaacacgcagaattgggcttggtactcttctgtctggatccaggatcatctctgatggcatgctacaagcagcggctgaatggtatttccatatacccttaagaagttattttagtggatgtacattacaagactgcaacttgaacatacttttacaaccctaggatcagaaatttggatagaaaaaaaaaaaagaatttagagcgttttctagactgtgatttatctaaaagttttggtagattagattaaaatgtaaagaattaaaaatcaatctaatgggattagtttgagatctttgcaacttccttacaataaatatttctgatttctcattattatcaatttatgacaactgacaaggtgttcaatttgcttatatattttctgacatttattctgtctacagcctagctgcatatatgtcggaagaggatgttctaaatggggttatatacccatctatatcaaggtacatatatcgacagacttccattctctcattatatgcatttccaagaatgtagcacattagatttagagtaaaatttttgacttctttgaattttcgcagcattcgtgatataacaaaagaagtagctgcagctgttataaaggaagctatagaagaggatctagctgaaggataccgtgaaatggatgcacgcgaacttagtaaacttacacaggtttgtaattttggtcaatttttacaaattgtagttttactatataaagttaggatcatacttgaatgccaccgacactaactcaagtacgttaagtaatggaactaagggattgttcggaacattcctgaaaaatacccacctaaaagaacaatagagtagattacagagggggagagatgttaatacatgaatggagtgaagatcaagtaatagccataaagtgatcacaaaataaattagacaaagatgagtgttcttgggatctagacccaaccgatgcaatctaattatttattggatgttagattttgtcaactaatcaaatccaatcgagttgacttaaccgatccgatctgatcaactggaaacattgaataggattggttctaaccatttgatgcattaattggttatctattgaattaaatcggatccattcaatcttattaactattatttaggctaaattcattaaaaagaaaagataaaataagcacaatttaaacttgtttctacagtgataaaacacaaattcaatatatatataaacattagtctaacttagttattatgatcacatactcaaaatatgacaatataatacaaatttaatccatcataatccataaacgtgttagtatatacacattataattaagaataaaattaataaatattctttaaaaatatatataattataattggatgataattatattagttcggtaggttgttcattagatcgggtgttccatttgacaactgatccgctcaaattggatttttaaaatttatatccaatccgatctaattataattgaatatttaattttattggatcggttgtgattggatccgttgattttgattgaatcggatgactttttgaacaccctcaataccttcgatgaaggactatagatatcagtgaaagagatgaagagacttaagtattgattttatcagcattattaaaagggtcagttggctaaatatgccacgctcaccctagttttggtggatgctctatggctatcaagacataatgtgctcgtttggaatgacgtattaagtcgtattgtattgtattttatgtaatatttttatataaaactatatgtggttttaatttttatagacacctaaatctataatattttaatataaattaaagtttagcatagtattatataaaatatgatatataatctaat

SEQ ID NO: 381515 - DNA, 1817 bp, Cannabis indica
aaataaataaataaataagagcaaatagtttttaagtagtttaagattctgcatttgaagtagtatatacctgccggttttagtttgaagtggccaagaactatcatcataaccctgtgtaagaaccttattaagttgaaccctgaaaacaaaatacagcacaaaatcatatatagtaagttgatgatggaaaaacaaccaaaagggtctaagaaaaaagttaaaaattagggcattaaaagacaaaaaaaaaaaggtaagaaatttaattactttccgctcccaatgaaatcatcgttactgatggtattgctgttccaaactacaacattcaattctctaaggccttcaatcaatgtaaatacaaatttttcttgaaatgtgggatttttaccaccatctgcatacccacaagcaaattctttaacaagtattctaaagagtatctaaaaatctctcaaatcaaaaaaaaaaaaaaaacaaagtaacaaaaaaaagggttttgcagcaaactcagatccgaacgttatacgcacacagtaaaaaaaaaaaaaaaaacacaaaacctgtgcaagttcttgtgcgatatttggagcttgcatattcaacacagacgtagggatcctgccttgagaaccattctgtgtccttcaatttgttacacgcaacaactaaagatgaagcccaaaaaaattgtcaacgagaagaaaaggggttttgattagagaaaaaaaaaaaagaataaaaaaagatacgaagatgaattaccagtaacttcgagagtaagtccttgtataccagaaaccgacatggaagaggaagacgatgaagaaagcttggttattatgataattatgcaaaaaaatgaataataggtttagattcgattcgagactttgactcaagaaatctaaaaagccaatctcctttttttatacccacacttttaaacctttcaagtttcaaccgcgttattttttctcttcttttctagagaagcgcttttatttaagagacgcgcctaagacattattaatgtccaccaaattaattttatttagacaaagttaaaatgattgttctgatatttgcccctcaaatttaaaataaaaatgtactaaattatgttctttgaattttcattcatgttaaattttttttattaaaattagacaaaagtccttaaatataagaatttcaatagtttatggagaatttttatcaatcaaaaaaatttagagagcataatttagtacatgtcaaagttcagagaagaaaatcctaattagccaaaattaaataataatttcattttaattttatgagaaaatcttaaactttaaacatgaaattctctctcaatactcaataaaattaagaatttaatatatcaatagattacttataataagaggaataaaagccctatagtttcaggatcaatacataaaaaattaaacataaaataatattgaaataaatatgtaatttgaaaaaattaacatatatatatatatatcaattgttacacaaattataagtcctaaatcatatataattggtaatctgataccacatgttagcaaaatcaaataaaccagaatacaaaatttgtataaaatttaaaacacaataataatagataataattaggtatgcgtaccagattgatccataacaattacttcaagttgatagtgcaatattatcaagtcttcctcccctagatatctaaattagaatcagttttatttatctatcaaaagtatcaattgtgatgagacaatatgtatttatagagttagggaggggactta

SEQ ID NO: 381516 - DNA, 2484 bp, Cannabis indica
aaaaaaaaaaaaaacactcaaaataatattggagaatgtgtgaagttcaaaattgtaacaaaaaaataaagtatggggtgctattaatagtttcaaattctaattatagtcacgtctaaggtaactcaacaataactaaatttagcattttaaatataatatgctaaatcttcttagaataataatctagctatagcttattctatatcactcagtcaaacttgtttaaaaatgagaaaactctctcgtatataagctaaatcaagacctttgctcggtcaaatagcttattttttgagttccaacttaatcttcccaatagcttcaggatgtgtctccaagcaactaaccccaacttagatgatttatggttcaacaattaatacatattttgaattattctccccttctatagtttataacttatcatcataatgatcactacttctcaaaaaaaaaatgtcacacatattaataatatccatttattctaatcaaataggacttataatctatgcatagtcttggacgaattatctacatggctcaaaacttggatcattataccacttactaatatatattttaaacaataaaaatactatagtctaatttctccaatacataactatatttatctttaaaaataagataataataattataatactcattcctgtcaagacttatacaaattttgtataattcttaaaattaatactttgctcaagaagttaatttattctatgtaattactatttgcacatccatattttcagactagcataatgaaaaataataacggaatattttaattatttcaaagtaataatcctaactcacataattctattaattcatttacctgacacattattacataattatgacaatacatatttagaataatgactctatttcacaatatttaatcttagagtaataaccttagtccacaataaacatatttagagtaacaaccctaattcacaacttatttacttaggatggtaaccctaattcacaatttctcaataacaattcaaataatatataattgtgtcaccacattatactctatgtgcttagttcattggcttacctgatttccaatgtatgaggaaaaatctcaatccacgggtgatcttgaccaagtgtcgatattcatagtcgtaatttctcaggttttacacaatgagattaatctcaaatcatattttataaatatttacaattaagactccaatactagatcgaataatagaggtcgaaacaaacttttcaatgatatatagaacgtccaaaacaagttcggagtgaaaagttatgcacaaaaaatagtaaaaaaattaaactgtcattgctatctggtcgcgaccagattaaagcccatcgcgaccagagcctgaactggggctaaccctttctggttttgagcctaatcgcggccaccataatctggtcgcgacgaatgggcttaaatacccagaaatatcaactttttggatttttgaattctgaaaacccaattcaataccaaatctaccaaaacttggcaattgcttcccaaaccaattaacttaaagtgtttctcaagtatttcatacaacaaataacatgtttaaactcacaaacacctcacaaagctcaaattgcaaaaattcatgctttataaactcaaaacaatcacaagttgattttcatgcttaacaaactcagttcaaagctaaaattatcatagacaatcaagaaagcgacaacaactcactaaaaatcaaacctaaaatccagattcaaaactaaacaacaataatctaaggtttcttagcttttgaacacaagaacactataaaaaatctaaacaagattataactccataatcaacatgcaactacacaatttgaacatcaaatttccaaaattaatttagaattaaatataataaaaactaggttgctacctcaaatgctcttttctcaaagtcctaacaccaaaaccaccaaaattccttcaatttctttaagattcaacaaagattggtatagtgattgagggagaaagggggtcgattttgagggataaaaccataaatgaaagcttttgttttctaatttaacaacaaaatatttaatccaattttaataaaataggtcaaatgaccaatttgtctttatggcataaaagtccacataaaaatattcaagagcatttctatcattttaaaatgtcacatataaaatcatttattctcatgcatatcataatttatcgcaaccacataatctattaattttggatcccgaactcggttcgagccaaaatacttaattgtgactatttgtgccaacttgtcaaaaattacctgcaataagacaatatgaacatactatataataatatagtcaattagcataacatataattgttagaaatattttaccagtatctagatttactaccatgtatgtttcattaacatccta

SEQ ID NO: 381517 - DNA, 961 bp, Cannabis indica
aaacagtcacttaatattattagtgacggtcctctaaaaaattcatttttgaaatcatctcgaattttgacttagtaatgtgtgttccttattgtaaatcctctattttacaaattggattactttgatcaatatttgcttgtgtagattttgttggtttacgatgttcttaaatctgttgacatacatcacctcaatatatgtgtataaaataaaaattcagaaaataaaacataacaagaattactgttaattatcctctccatatatatggtgctttaatgttggtggttatacagatacaaacaaatacagtttattacatatcttatttttttaagtaacaaatatatttatagcgagagatattatagttaataagtacagtgaattattttttcagcaatatgtccagtgtttaaattaataattcttgcccagaaataactgttattcttcaatagttgcctattattacactggcatgcatgctacggtggcgccgtttatgagcagtgaaatttctactatttcttctgaaaagtctgaatcatatactaatattattaactgatcgccctcttcggcttaactaataactaacctaatcactccctatatatataatatatcaatcactatttgtcaagtacgtattccagatctaattaatacttctcgattattgcattgcatatatatatacagaaaatttatggtagaggctactgtctttacctcaggagaagaaattaaaacaatcacaagttaaagaaaatgaagtatacaaaatatccattacagtatgtgtatgagatttatttccttactctatttaattattttttcctttttttttcttagaatgatctaattactttatttagttgagcactggacatagacgggctaggactgtgcttaggcccacctagtttatgggctcaaaaattattttttc

SEQ ID NO: 381518 - DNA, 1738 bp, Cannabis indica
acctcaccaatcacccttctataattttactattggagatgtgaccgctagccaatactattgtggaaaagctaaaaaaaagaacagcacaataaataaataaattaatagtagtactaatagtacatatctcatttattgtatgattaattggggagtatataataccctgttattaacttccccacgaagttaccaaaccttctgcaataaattacgaatgagacctaactaaccataccataccttcttgtcgtctatttcttaatatattcatgtttttctaaaaatattacaatagtaaaaatattcattattattattattattattattattaatatttacctgttaatggttgcttgcaagttggaaaccagtaaacaaagattaagagagagatagagagggcctatagttaggtacccgtttgagagagggccccatattctgcatttcaaaatattgtgtttctgtatttgaaatttatatagagggacgataaagttcattttcatagtcctttgactatagaaattagaaacaaacaacaactacttcactctctctctctcaccatgttaaataaataataaatcttttttatttcttttcttgaaaccagaagagaagaggggtcttttctgtctcagcttaaattcttgggcctttggcttatattgtatactatctcttctgttctccctccaccttacatagttttcttcttacaccacgtccacaacaccctctttttctttttctcttccttcttttcccaaactttttctttcttttatgcccaactttaaagattcaaacatatacgttgatatatagaagtgtacttaaataaagagttactgtttaagcaagttgtgtgagtagagatgatgagtgcttcgaagtttattaaatgtgtgaccgttggagatggagctgttggcaagacctgtatgctcatttgttacacaagcaacaagttccccactgtaagtctttcaaccccatttcaacaaaaatccatttttcttttctctttaggaaaatttctaacaagttctctcatttgaggatgtttcaacagattttatttctgggatctttgaaactcatctaacccaagtttgttcatttttcattcctttctttgccatctttgccccttttctttggcattaggagtatgaacagttgaatgtatgtttgtatttcacttatttaagtctcaaaatttgtccttttttttgtgggggacaggattatataccgaccgtgttcgacaattttagtgccaatgtatctgtggatgggagcattgtcaacttgggattatgggacactgcaggttggaatagcccttcagaccttgaagcctaaaactttctttttcctgtccttgaggggtgttgtggtctcttctctttagggtttgggttttgttcttgatgttctaaacagacttgttgtttctcttttgaattaaaggtcaagaagactatagcaggttgagaccactgagttacagaggtgcagatgtttttgtactggctttctctttgattagcagagcaagctatgagaatgtacttaaaaaggtattcattttttttatttactattcttattgcttcttctctctctctctttctagttttggctatgctgaaaaaaaaggggcaagtcatttctatttctgttaaaagccaaacttattagtctttctctttgcactttt

SEQ ID NO: 381519 - DNA, 1502 bp, Cannabis indica
tactaaacaccctatatgaataaaaaactaacatataagtgttacgggtttcatttggttcctgcttaatgtttgtcagcgagttgacttccgtatcaaagtctcttctggccatgaactattttttgaacatggactaaagttgttgccaattttctactgatctaggcttcagtcgtttccaccacttttcaatgaatttggatagggtaagtgaaaacataagaactttccatcatcatttgcattttccacttttattagccaattgaactgagacaaatgatccctcagatccgtctttccttcatagtcgactacgaaaggtaacctaaaacactctggtaggaatacatccaatatatgtctaacacattgctttgaatcttcaccttctaagtcagacccgactccattttgcttatgaaccaagccatccatgaccttatgtaatgtggctatttatttctttagttgttgagttttgtccaacatcacgaccccaaatttggtcattgatgttgcttctcaagttgcctccatgagattgtattctctcacgacatacctttcctctacacgcgttcaagttttcctagaggtcaacggttgaggcactatccttgaaactgagttcttcatatgtgtctgccttgttcatagaagcgatgaggtggtgtttccttccctgggctttaggtcttgaagcctgatcttgaatcctattgccctgaaggatccacccttgtggattggttgggtgaccctaccttggagcttggtctacccactttttattgcgaatgatagtaagatacaccctggttatgggaattggaggacttgaaagatttggccttgtcagattttccatcttttagggatcgctagctatgactttccctttgtcacttgcaggttgtgagggtacaactccaagatgattaaattttcctaaagggggtctcatgttggtttaagtttagactccaacggctggggtttgattgacgccaatggggcctctggattaagacctcttgatgcaatgagggcttgaagctggatcaatctctcttgcatttggtgtggcctcttttttttcaaccatcttcgcttcttggtctaagactttctgtcttagttgcattacttcaggatcttttggaaggtcctcctccatattttcttgatcatcttggtcgtttggattaaccgtgtcttcctcctccacgtcgtaaccacctccccgtccgtcctcatagtacccgtcatggttatcttcattgttggggttttctttattattttcctcaaggggttcttctggttggttgaggttgtcaaggtgaccaccacctacaacaaaggcttcctctcttcctttggctgcttggacattggtttgaggaagggggttttgggtttttttcaccattgcttcttgctacttggccaggtagccttgtagcttggtttctgataactctaagaattagagt

SEQ ID NO: 381520 - DNA, 1670 bp, Cannabis indica
aaattatttttcaaagcataagttatcaagaattttacctcaaaggccaaacaatgcaagttctatcaaattcaaattatcataccaccaaccccagtcaagcatatataatgaaatctaaaatatatagcaattgtgaaacatattaaaaatttcctacaaaacttttctattgaagtctaaaacaattgaactaagtacacggttattagcaattttcttttcaccaataaaacaatgcaatataaacaaaaataatggcttacaactacttagaaaaaaataaacactaacacaaataaacaaacaaacaacaaaaataactaactaaaaattataagtctatcccccaaacctaaagattcacattgtcaatgtgaatcttaacaaaataagactcaaagctttaccgaagatttttccaatgctgatgcattctttgataagccgcgacattctaagtgaacttttttttcagccttaaattttttaacgtatttcacgattcaagaaatacaataacaacagaaataactttcaaaaataaaattaaaataaaaacaaaaattaaaaggaatccaacaaacaataaaaaataaataaagtcatactaaaaaaaataaaattgggttgccttctaaaagtgctaactttaacgtctttagctagacgctcactcagtcactcctttttccagctcaactctggtcaagtccatcacacacatccttaagagccataatgtcaataggaagaagctcacttgtaccattggaaacttttaaattatctccaatgtcataaaagccttcaagttttccacagaacaacgatttcaatcgacgccaaacaaaatggactcgtttcttagtctttttctttcttctttttaatctcagaccatcatccaccacatgaactctacaacaagtggacatactagttacttcaaaaatattaaattttacctttttattttgtactcgcagcttcaaaactgctccaaacccaggaagaaatcacgaacaaaaaagaaggaacaatgaagacccttccggatgagctattgaaatacttccaaaatggcattctaacgggcatcaaggaaggttatatgctgaagtgacgattctctaacaccaaatcctacaatttcagggccttttcccctaagttagatagtaagagtgcccacaccaccaaggggaacataccttttgtctgacgaccactactctgacagctacagtttgcagaggcaacacaatgccacctatcgacatcaagtggtccataccgtacggaagatcatagccctacgagttaggcctcaatccgtgggtcctaagtcaacataatatatgtatttactccatcagtgggtcatgttacacgcaaaccctagtgggtcccggatgtatccatattcagaccttagcctataaatactacatgttccattttcaagcaaagagtgagaaattcattactaatactccatagaaaaacatagagattcttgagctttttcaagaatatttgtgtaatatttcaaggctatttaacccaatacagatgacttgtagactaggtgtaaagaccgcatatgattaataccttgaattattaaataattagggtttatgtatgagattttattattattaata

SEQ ID NO: 381521 - DNA, 1476 bp, Cannabis indica
gagtgatgatgtggaggaagttcatccaatatcagatgacaaaagtggaagtctctcaataaatgatctccaggcacgactgaatgactaaaagggaaaaggcaagaaacaagaaagccaggcctcatggagataatttaagaaatcaaatcaatgactgaatccgcagaagagagtctaaagagtgggggtcctaggaccaaaatgggaagggccgtatgaaattcaagaaaaagtatgtgatggaacgtatcgtttaaaacgaatggatggataacaaattccaagagcatagaacaaggaccacctgcggcgatattattagtgaactgggggtggtcgtttccttttgtttttctttacttccatgtatgcctcaaggcgggaaatattaaataagaacagaaagtatttccatttcaattttcactctatcataatttttagtcttgcaacaagtttctaagagtccagactcttaatcacttagaaggtaacatattttgtatttctctaaaaaaattatgttgtaaaccaaattaacattaaatattagagtataaagtgtagcccaaaatcagagcctcagggaactggaagtaagcaactatcataccatattttcaaagttaataagtttactaagttaattcaggttgactaatagaagtacaggcttcaaaaatgattaactctagtcaatcaaaacaaaagaagttcaagcttcaaatataataaattcaggttaattagacatgcattgtaaaaaaacaagtctttgaaaccagaaatttaaggatctggaagtaagtaatacttactaaaaatgatttttcaaaaattgattatatatttaaattctaaggtctaggtcattgaaaccatgtttcaaggaatttaggaaaaattatttgttaaagaaaaactaaagtttaagcataaagttgaaatcctaaggttcaagtcataggaaccagaacctcaagggatccgaaatcaagactaacttagcaatttaaattcatccaaacgatcaacaaatacttggtgaatataaacattaagtatgtaaagcttaaaattgtcataatatttacatacaaaagctctgcgacaagggcacaaatattgtcttcactaaaataaaaaggaggatcctcgtcccccaacaatgaaattataatattgcaaagagataagtttatagttgagctagatcagcagtttgtagagctgtacacgggtcgggttttcaggtagtcgggttcgagtttttagatttcgggtgttggaaatgcacaaccaaacccgattttcgggtggtcgggtatggcaggttttgggtcgggtatatcggatttcacgtggttaggtttaggtattatttgaataaattctcgttttcctctcgataacacaaaaaaatatgtatattatataatacatatatatggttatagttaattaatatatata

SEQ ID NO: 381522 - DNA, 2395 bp, Cannabis indica
taatatatatttaattatatataatgtcttattttattttataatttttttttttttatttttttgctagaaaagtagaaattattcatatttatttatttatttatttattattatatattttcattttaatttaaatatttttaaaaaggaaataaataaaatagtcgagtctaaaatacaggattactttcagcataatccaatcttgtccagttcaattcagtccaatccaatctaatctaattctttctagtccaattctgaattctaaacagacccttataaaatatatagaatgccaaccagttccctaaaatcctgttggcgaacactttagaagatccactagaacaacaaaatcaactattcatagtgagtactaagtattgtgtatatataagaatttgattatacaatattggagtcaaaaaagatccaaaaatatttttatgagctataaatagcaaagaataaaaaaatatggtacaatgtcatgaatgagaaaatgaattccgtgctgtgcaacaaagtttgggatcttgttgaattgcttaatgaggcgaggactattggctaaaaagattcattaggcagcattaagagacacaaagtgagataaattgttaagagattcacccaaaaagaagggattgactagacgaagagcttttctctgtatctaagaaagatttcctcagaattatctttgcattagttgctaattttagtttagagttgcaacagatggatgtgaagctgctttctcgaatggtaatttggagaagatgtaaacatgaaacaattgaaaggattcctcttctagtgatagtgagcatttggtatggaagcttaagaaatccatatacatgggttaaaacaaacagtctactaatggtatttaaaatttcacgatatcatctttttctttaaatatattcaaagagaatgttgtggaacagtgtatatactgatcagtacgtaggaggaagatttattttcttgcatccaatggtaagagtttgctatatatgaattgaaacaatatcttttaaagtatatttaatttgagatgaagaatatggatgatgcatcttatgtcattagtattaagatatatatcgagacaaatactaagatatcttaagtttatctcaacaagttttagaaagattttggttaaatattctgctcacctattattgaggtgatagattaaatttgagtcaatacaaagtatagttttgaaaaagaggaatgaagaatgtatttgtttggaagcttaatatatgctcgtgtattttaaaaatttttacttactttttttttttaattttatttacagaaaatacagtctttttatgttgtactcttgttagtttgttgttgattttttgttatctgtatatttttttgttgttgttgttttgatgttatatttggatactattttcatgttatttttatgtagttttcgtgaagtttttatgaaaactgtaaaaatataaaaatgtaattttttcacaaaaaatagtaccttattttaattatccctttttttttttttttttttttgtcggaatattaggaaaatttcaaaataataagacaaaagtcatccagtgtactatgtatttaaaatcagtataaaatgttacattattcatgagggtatgtcatttgggatttcaaaattatttgtgatcaaatttgaattgaaggtatcatcattttattaatacaaattcaaaagtaccttatgattattatttaaaatatatatatacatgataataaagttatatattgttaaaatactacatatcaaatgagtacattcccaaagaacaaacctttaaatgtttggttttattgctctccctacattctctctcagccgatttagaggctaatctatgggtatgttactaaatgctttgcattcttttcaatgcagaggaagttgagaattcaattcaactttcatcaatggagtataaataaatttatgtcacacaactgtttgatttacgtttacagtataattataattataattatatatatttgtaaatacactttaatgcaatatttttaatgatatatgtctatctacgtatacttattactatatcaaatgtaatcattattataatatttttaaacaagattgaatttatctagctggctggcaggacaggactagtctaatagaactaagataaaattaaatgttagagcctatataaatattttaattattaccaaaagtttaattgagaattgatctaatctctttgtttaaaatcacatttttttatcattatactaaatactattttgttatatttttttattattaaatattttatttatatgctgataattttttttt

SEQ ID NO: 381523 - DNA, 1371 bp, Cannabis indica
aaattttgatgatgtatttaaaaaataagatagaaaaattaataattaccagttaaaaaattgttgacctctgactaatatttcatctttagtctctctaatatcaggcttccacaatatatcttcatcactttctacctaaaaaaagttgattaaatagtaagttatggttttaattattagagaaaattacaacaaaaatgtctatgcaatcatgtttgtaatttgttaataatgtctatgtaattacataaacattcaaattgaaaagaaaaacatatttcataagaattttctccctaattattataattattatattgatgtctactcataataataaatattggagaggaatgaaaaatcaattaggacttacttacgagtgaaaaatcaatagtaggaaaaagagattgatactcactaacacttcttcttttctcatgtaacttaactccctgtccacataataataaagggattaacatcattgcattcattttctttagaacccatattgtaatatatattagtataattaatttttaaaaatatgagcatggatattatatatatatatatttatagaaatggttttttaaagacctactaaaagttctcggcaaagctctacagcaataaatggtggcctattttgattttcaattgtagaccaatcacctgatccgaacactcccattgctgtttgcatagtcctacaaattattattacataaacaaacatgcatggtatattcacatggtaaataattaatctttacttggataattttactccaagccatgaatatcttttgtgtttttgaattgaatagaatgtactacaaatatataagaaaattagattgatgaagtatttagtacgatgtgttcaaaatatatatatatataatttaattaattagaataataaattagagaatgttattgtttgaaaacttataactgtatttaattggttatgcatagtactattaattgaattatattgttttatttaattaaatgtagaaagttgataaattgttataaaaagttatgtaaaaatattaatccattaaatttatggcattaaaattcaaaatatttgaaacccaccttatttctatctcgtactaaacatgaaaaatgtaaaagattttcacattatctcacataccaaacaacaagtagattattagtagtagtacctcatcaaaggagaagtgaccactaattgaattttcttgaaagtccgctcttttcaatatcgtttcgcaaattttcaacctataacaacacgtattttttatgtttacatttagttaaaaaaaaattctaaacaaataataactaatatttgtaagatat

SEQ ID NO: 381524 - DNA, 1111 bp, Cannabis indica
tatgttgttgatgttgtttcactttggaatggctcagacatgaatcatgaatactttacttgaaaaagagtttgcctttaattatggtttaatgaactttttcaagtgttttggaatatgattattatagatgcaatttattgaatttcgttgctattttgttgtttgtatagagttatacttgaatatgtatgtctctacttttattgaggaaaaagggaaaaaataggactagattttttaaaattctgttgttcaaacaagtctcataataacaatgctgatattttagtaaaaataagaactgtacttggttcgaattcaattgagtctactctacgagggaacaagcactaatgagtctttttctttattgtttttgagaatgtggttacaaataactaagattatacaagaatttcttaagattcagttcataacagtatatcaaaacctctcaactctctgagaaaacccgaaactcacatggagaaacaaccaaaaactcgaagacaaactcaaactcacatggagaaacactagactttctttgagaggctcacatagagaaacactcaactcatatggtgatcacaaagtattgaaaacacttaaaatattgctttttctctcatttattcacactatctcattccctcatctcatattcttttctttgtcttaagttaaaatgacttgagttggcctatatataaaagtttcttctcaactaactttaactaaacattttttttatatatatattttgatagccactaatataagtagcttcaatcacacccaacatttagtttggcaaaaattaatttaaagatttttcattaatatcaacaaactttgataatttctacaaatattttatattagacaaaatagtggtgggagttgaaaacttaccatttatctaaactatatataatataaatacctatttattttgttactattcattagttacattaaaaatataattataatggctataacaaattattaacagcaaaaagttttatttttaaaatcaaaataattataatttattatatacttaaaataaattaattttttaattaaaatatttaataaaaaa

SEQ ID NO: 381525 - DNA, 3450 bp, Cannabis indica
aaaaattattatatctgagtatttgattattttattgcaccaataataatatatataactaccaagaaaatattaaacaccactagttactttttattatctctctttcataatatatatgagtaatcctatttaatcatttaaggtagctaatattatattaatgtaatagttaatatttttttatattattattatttatcaaaataaaatatgtgggatgagaaacgtacccattcattgtcttatgggactatagctcccacagagtctatgcggtctgagaagcaatcgtgcgaggcgagtttcagtgaccaaaatccctctgccgaagttaatggtgcaagatgagttctattgtttccaaactgatgcatcagtgtttcaattcttacatgctatcctgcttgctcttcgaaaagcaaaggataggaacatttcaaggctccacatccaatcggactcgaaggtggcagtgtaagcccttaggacaggttttcttccttttgcttggggtactttttccatttttgatgcttatttaaatatgtgtaatgttgtaatcttttctcatatttctcgttctgaaaattgttttgcggatgctttagtgggttggactagatgtgcaaaagtgcaatctgtgggttgtttaagagatgtcgccccctttgtggtttactactttactgtagtctgttttcaattaatcaataaaaaaaaatcaaaatattacacttaaaaaattaaatatactttaatttgatatatacactaaaatagtaaaaaaattcccacaaaataaataatatctaagaataattataatgtaagcacatatatatttttttttataataataaacccccacaaaataaatattttgagcaggtcattgcgtgggacacaatattaaaatgtaccataatgtagattgttacttctttattgtgttgacacctaattaattagatatccttttaacattattgctcatttattatatgatgacaaaagttgcttaagtacatatttagttgataatataacttgataaaatagaaatttagtgcaatactcatgaatttttgaaatattaaataattaatatctagatgtagatagatttatgtccaaattcaaacacttatgtaactatagtgaaaatccacgtatactaaaataaataaaaaaattattaaggtactcattgttgttaattacttttctattactactaaaatttttatttttactcataataaaatttataattaaaaataaaaaaattatgcctaattataaattactatttttatattatcaccgaaaattctgtaagtaaagatatattagtcataaaagtcgcattttgttgtgactaagataaaattagtaagaatttgtatctaaataatatattttatttgcaagtaattttagttgcgactaataaaagacatttaattattaaaaaaattatattctaattaagaaagttatcatttttatatatacgtatagaaagtgtataatctaattaaagttaatttccacataatttcataaagttctaaataatttagaaatgcaaattaaaattaggattaactcgatgcagtactataattattttgatatttgtattagcgtgtaataaataattcaaaattatatgatattttataaaaaaaattgttagatcagtgattgaacaatcattgaactagaatcaaatatataccaaacttcaaatcctacatattaatgaaatgtaccgatcgatcgatcgaaaaatcatacacaaagtactatcaagtaattttcaaagaacaatgtaaaactaaaaattttcatttagtactcatcggatcttattcatggaaatgaagttgttttattaaaatttatttatttaatattattgtaaataaataagagatattgaagaccaagtatgatcctgtttgaattaatcccagaaaaataaactagcacttgataaaatatatatgtgtatataaatgatatataaattgtacgtagtatatatatatatgttaaatattcaaacctgatcgatatatgtgggtatcccagaaatttgtatgtgtggtatcagaagtactctctgcccagcatgtactaccaaatccatttggagtaacaaatggaaattttctgaattctcttctcttcatattattaaaattcaaagggctacacatgtcatcttttgtatatatgtattcttttaatttatatctacgacattaagttacatcattttcccttgcaacttcatgcttttaatttttcatttgttttatgcttacataaataatatctaattattagttaggtaattattcccaatgttggactatatatataaatataatgtagaataattcggttgaccacaattatttatgttcttataaatgtattgtatacacccaaaacttgtataaaaattgtgtaattaatgaatgcactatgaacaacaaaagatgctactaacatataaatatatatctttatatattaaaagtatctatctaacggcatttcttggtttaacagaatataccttaaaaataaaagaatattctgttaaattcaacgatgttaataggtttgattctcccgtttaacaaataaactcaataattaaaccaaaaaattaaacaattttttttttaaatttgatgatttttttttaaatattttctattcaaaaatatcttctgtgtaatctacttcagaagaaaagaaaagaaaaaatatttataaccacttatatcgtataatgtaaaaatagttaatttatcgtatcaaagaaccatttacgaaaaaaaaaaatcatggaaaaacgattgaaggaaccacctggcatctgctcctttcgatttgggtggaattgggtttgtgttgatttgattattgattcatgggcttctatcgattttgggtcgaacaatttggcttaattgtctagcgacttagtttgtttatggtggagggttgcattcagaattgtagttcacgatctatcagaatggcagcgattgattacttgaaaggtaaattaagtgaagtcccttcaagtcttaagatttttattattattgtttttcttttttaccatttttttcctttcgatttttaaaggatttgaaggtaatttttaaaatttttaagattgaaatgggcagaccctactttcgtcgcaattcattgtctgacaatacttgcactctttgcctctattttgtagaaatatgatattcttttaatgcttatgggtatggtttagttttgtgtgatattttcttctgcattttttctcaataatgaattattctttttaaaaataaatatgtttatataaatttaaatttaaaatctatataaaataatacattttttttttttcttaaaaacata

SEQ ID NO: 381526 - DNA, 2094 bp, Cannabis indica
gttattcattatcagtggtagctaatatttttcaagctgtcattttagaccattagttaataatattccttaaaaattattacaaaattttatgtacatgagacttgatacaattaatagcaatattatagcataagagaatactaacccgtacacattatttttattaattaatttaacatgatattgttgggacttgagattatggggggagacttgggtcaaaactcgatagattgattatcaagatctatagactattgactttttttgctttctttctatcgataaaatgttaatcatctcaacttcaaatcgtgaattttcacaattatatataaagatttagaagaggcaaacatagggttttgatctttttttcttggtaatgttaattaattagtaaaaccgtatatgtttatatatgtatataatatatctacatatactcaataaaatacattcacacaaaatgagcaattcatttctatgttagccaaaagacagaatgaaactaatattgatctcatctccctaccataactgtacaaatataaactctaatattacaatcaacaatggctaagacaacatgtatgcattaattatacctaaatatatacatgcatgatcattacatttcaaaaataaaaaataaaaaaattcatcatcatgatttcgattgtgcaggatatgcaggcagtcgatggcgatgattataatgagttagcagtttagtacaatgtatcatctttctttcacttatacacaactgatcatatccatttcttgaagatgttgacacatgaaggtaaatattatatgtacgacatttttaaaaaaatcagtcgaatatatatatatatattattcatatctatatatacataccaaattatttactatcaaatttaattaaaagaaaatattagtttgtgtaataaagagattaatattagtaccctattagaaattttttattaaatggccaactgacaaagaaataggcatggagagatgcaataatgttgcccccatgtgttgggcgacacagtggaacagtcacgtcacaccaattggcttaaattatataacaattgctcaaccaatatatatatatatacatatgtgtgtgcaaatgccagctaataatccagaaatttagctgctctagcttcaagtggattgttacaaagctaattatttggacaacaatttgagtatctctaaattctataagacatgatatgtaaattatgatgaaaaattcaaagttaattctgtttcatatatttgtcgagtatagtagtaatttcagtatacgatagtgcttataaatgatggaaggacaaacaaatactatagctgatataaattgaattggtccacaaacaattgcatagtaaacctaacatttttttctgattgatcgtcaaagtagagttttcacatatagataaatatttattatgcaacatactcctcaaagaatgtaaaattatttcacatttcaaaatgcacacactgtaagacttattggtaatagcactaactgttgtccccttctccagaaaagacgacaagaaaaagataacaatattcccggagagaaaaatggatttatcaatgttgtttaagcagtaagccaaaacagtaccgacaaagacaaatttatccatattctcttagatagctagttattattagaacattttctatagtttcaatacattaattaatttatagatttattggtatagctggtcctcgattatatagattttgacaagttgttctctgatttatttttgataaatttgtcccaaatatgtgtgttttgttaagtttgttagggaacatttatgttttagtaaattggtccttaaactcttagatatcgtttagttggaggtaatataaaatgaaatagaatagaatttttgttcgattatattttaaagtattgaaatatcattcccataaaatatcttttctatcattttggtaaaataattattatattttgaattagaaggaaaaatcatacgaatataacatgagaaaaaatttaataactttttatcaatttttttt

SEQ ID NO: 381527 - DNA, 3692 bp, Cannabis indica
ttaaaaaaaattaactaaacaaaacaacaagttatggtgagtgttggaaactgatatctaaagcttgtgaagaatcaagtgtagcacatgtactgtcatgtcactaaaattgatccaatcaaaacttttattcttttagtttatttaactctgttttgattttatgttgtaggatagtaaaatgttgagattatgaatgagaactaaaactaataattattataattatatatgaacacaaacaaagttacagtacaatagtagagtacagagtagatgataataataataatagacaaaagcttcttaattaagtctaccatggaataacaagagaaaaaaaccagctaaccatggtggagatttacatcactattgacaataatataataataagaagaagaagaagaagaaacccaattgaaatatggctctgcaactgttcaaaaattcattgcagtagccatttgactcccaaccctaaaagaaaaaagaaagaaatctaccctgaaactaaatactaaaagagattacatcaaagaaagacacataaaaatactatttttaagaatcaagataaatagatgcccaatcaatctctgaaggatatttctccagcatatgattctccggaacactgtactcccatggcgactccatctgatctgggaacgtcaaatccgataaaggagaagatccagctgacccatcactctcggtcggcgccggcgatgaggaactgatctctgctttcaaacaaatttccgattcctgataaacaaccggtgccgggggaggcgatgatttcttcgccgccgctgcggcagccgatctcttggaggcagccgtcgtagttgttgacttgtctgccttctttttattaccctgctgcgtctgcgattcggccaggttttgacaaatggcctgaagctttgcatcgacggaggagtgaagaggcttgaaatcaccgaactcggcggagccctggtggcggaggtgtgggaaattaagcctagcgaaatcacctctgagcttgtaggcggcacggtcataggccaaggcggcttcctccgctgtatcgaaggtgccaagccaaagcctagtccgattcttagggagacggatctcagcgacccatttcccccaatgtcgttgcctaacccctctgtaaagctttgtgggtttcggtggagaacccacttgcttcatcgggataggtttcggtcccaaaaagctgaggccatggtggctaggctggaaacccatatgggattgtggttgttggtggttttggaactggatttgtgcttggatctggtggatttgagaaggggttaggctgttgagtccaattaagccaagttgctgttgttgttgttgctgctcgaaaccgaggtggttctggttctggttcgaaaacccatttgaaaacacttgggtattcgaagtagagcaacaatcttggaagaaaccgggctgtgtttggaccgagggagagaaagaaaggtaagaagaagaagaagaagaagtagaaggaagatatagtgaagaagaagaagtagaaggaagatatagtgaagaagaagaagaagaaaattcaggtgattggatagttggggaaccacttttcataaaaggttcaagtgcttccattagctcaccccttaagggatctgactgaataggtctactactgtagaaatccattgcagctgccatactaaattaaaatattagaataataataataataataataataataataataataataataataataataggaaaaaaaaaatcaaatcaagataaaatcgacctggttcttaaccaaaattaaagaacaggtactgggttttcagaaaaattaaaaatttctctgaataaagaggtttataatactcaacctcgtcttctacacaaagatcctaaaagaaaaataacaaccttgagggaaaccaaaaaaagaaccctcttagccaatttgaaaagaaagaaaaagaaactagaatttaccaaaagaaaagggtataatccagaagttacaattaaaaacaataaacctggatctcgattctgaaaacacctggctttcttgaaatcttttcaaagtttgcttctttttttttcttagttgaattgaaaaagaaaaaaaaaataaccaaaacaaacccaaaaatcagaacttggaaagacagatgattaacagaaagggattcagagaagcgggatgttacagagaggggggaataattgaaatacgaaaaaaatatatatcaacaattaaaaaaacttctgatctcacaaactctcgactcacttttcctttttctctctggttttctgtggtgtttaactctcaacctcactctgtgtttttttttttttcttcaccagcttctttgcccattatataagagttccaaaccactctcacctaaactaatctcatcgttaatcttgattatctcattctaacccacttgctcattttttattattattttaagctattattctctcactctctaaccggctctattatgacgtatgactacatcaattaatggtaaataaccaatcaatttgtgacacgtaagcatcctctattaatgttactgacagctgttcgtggtaaccgtcaggtgtcggtgaatctccatttgtcacatagctttgttttgtcttatgcctgttgaccatatttgttatgcgttcacactgcctagctctattcaaattggatgcctagttcattctctctctctaaaaagtaaaataaaatatagtggaaaattgttaataaagtgattttcatattccttttctcccctttctttaatttagaggataacttaaatttagtaaaaaaaaaattaagataaggtgaaattggtaggggtgtaaatcaatttttgtaaatcgcttaaattaaacaatccgtccaacctaaattgagataatttgacaaaaaatacaaattaaaaaaaccagacgaaaatataactcgtccaatctttatatttgaaaataataacaacccactcaatcaacctgaactaactcgactaacccgattaagaggattttatatatatatcatataatttacacggaaatttgataattcatgcttaaaaattgtccatagtcttttagtataccacattaaaatgcacagaaatttaatactctaaaattaattaaatcctaaaatactatcttcataccttccctctttctctcggccctctctctaactctcaccaaacccaatcgatacccacaaccacagaaccagaccaaacccacgaccaccgcaccacctccgacaaaacccactccaaagacaaaacgtaggacaaaatcgaggaggatatcgcgaaaccacaaagaaaaatcgtgaaatccaaagcctcaaaatctatgagctcaaccaccccgaaatcttcaaaatccctacccatcgttggagttctcaactagcttattttatggtttttgacgatgtcggaaaacatcgctaaatgtcgcaaaacatcgcgaaaatcacaaaacatcacaaaatgtctctaattcacgacattactaaacacatcgctaaatgtcgcgaaattgtactcaagttttcatgataattagcgatgtgctatgcattttttagtctcatatcacaaatacatcgctaa

SEQ ID NO: 381528 - DNA, 1794 bp, Cannabis indica
aaccaaaaaaaaaaaaaactaaccgaattgtgaagcataattaaaacccattttttgagtcagattgatatcaaaattagtaaatatggacacacacacacaaagttcccacagattaattatacaataaaaagttagggataatagctgcaaagaaaaattacagaaatgtgatccctatcttttggtctggccaaatatgatcgatatgttaatggttaacaaaggattcatagcataatatatatcgattgtttcatcataagactgcattgtcagaattcacaaatttaacagcacattttaatattcttcgatttgcagtaaactgatgaactacaaaataaaattaaaatctgtagtaggtacatatatcatatcatatacatagacaatctacaaatgaaaattaaaaaaaaataacaaataatatcagagcacaaaaatgtgtataatatatgataaatgtatattaattattgtttgttcaacaagtttctcagagagaaatttacagactcagtttgtcatactggccgcctccaatgcgatcaaacactaaaaagaaaaattgagatggaggcggacagaatgccaaactggatctgcaacaaggcctctgagaaaccctagagtgaaagagagagagagactgagctagatgacataatattgatgaatgaggtatgtatattcatgtttatatttataacaatattaggactttaaattaacacaacaccggtttgaagaagaaaagggcatatattgtagtatttgggaataagtacataatggcttttgaaataagattgctggcttttgtggaaagcgggtgcatgagcgtgcatgctgttgtacgacttgtggggttgtatatttatatggttgacacttatatattataaaaatataaatatatatatttaaatacatacatgaaatgaaagcatgaaaagtattggacaatatttcatgtgaatcaaatgtaaaactatcgagtgatatataagaatgtgggttactccacttattattaattagttttgagatgcaaacctatgaatctaaatataatatcagagtgatatctctaataggttttcaattcacacctatcaaatacttagtccctatcttctatcttgaagagaatattagataatattattccacatatattacaaaatatgtataaatattgagttatatataagaacgtagccattccactctttatcaagttgtacctttgaacactatattaccctagagtacaaccctgtgaagcttcagtaaacatttgcataaatgttctttttgaaaatccgttattgaattaattattataataattataagagctagactgcagagtttgactatatatatagaatagaagtcatgtgaatctgttttgtgctctcaaattgctttttgacttgttgaaaaaggagtatatgcagaatgggctgtctatgtctcccactcaatcgaaacggctttgtcaacaaatattaatacacctatttctttaatttgtgttcaaattattaactttcaacactaatcatgtttttcatgcatactcttctcaagtttgttactattaattgaattttcatgctaatctttcaaaagaaaaaacactaccctgataagttggaaatggaaattttcccacattaacaaaacgcgtactataagaattatttttgaaaatatatatatggaagagatttcaatggttatatttttattgtaaccatcatggttacatttttttaagccatt

SEQ ID NO: 381529 - DNA, 744 bp, Cannabis indica
tatcctatccactaagtttaaagcctccaatatcacatttcaatttcataaccttcaaacttggacataaatccaccacttcagcaaatctatttttagctaaaatgcaaatagctctaagtttgatctttttgtgtgagttatttaataataattaaatatttaaatttgtaaaataaaaataaattataaaaattaaacaataaagacatgattaattgataaattaaagtgactttgtaatttaacatagtttttcttagccaacatagagagaaacgtccaagtgtgtccatttacattaatccatccatctaaataaatagttaattatgatttaaattcgaggtttaaagaaaaatattttgtggattaaattatttagatctaatattaatattggatttataattagagtttgagcaatttttttttagaatatctatttgttattaaaagacttggcatgtttatgttcatcatctcttttcactattagactaaaacatagaaaataaatctcatgagtgtcacaccatattattaaatgaataatttcactgtaaagcatagctaattagaaactactataaaaatggccattagaagatgttttttcgatcctttaaatacgattttgaaaaaattagtatcttttgctgttctaagaattgctaaaccaaacaaagaataagtctaaaaaagcaataatggcaagtaaaaattcaatacaatgaaaacaaa

SEQ ID NO: 381530 - DNA, 1838 bp, Cannabis indica
aatactgtaaattatttaaaattgtttgaaaatctacaaataattttaaaaacacattaaaaaaaataactctaaaaatcaaaacacataagaaatatatcaaagatagcttttttaaaaggtgtaatacaaagatggtcgtttactcgtttgcacatttaaaatatacattttaatgtgccattgtatttcaaatcatacataataaataatcaacatatggattttgaatgtataaattaagagtgtatctttaattttttttttaataaaaatacaagtgcccttatgtttttgacagcaaagcaaattcctcagttaacataatgacacgaatcatataaaaaaaaaataacatcactaaaattactataatgccttgacagtccgctagtatcttcattatttctaacatattatcatgaataccccttggggaaaaaaaattagaggataagcagttgacatgaaataaattaaaactactgatattattataaatattgtacatgtttttgtgataataataattaaaagtaaaatagagacagcagaaaaagtaccagataaaacagaagcttcactctctgtaagcatggcagagaatcctctgatagcatgattgtaattgtggacaattgatattctctctctttcactttcactttcttggctaccaaaattatataaatatttagttatatagcagtcaagacagagaaagataactaatttaattggtaataatttaatatggaccttggattaataatggaggacaataattgtagataagcagattcagaaacttgatcatttccttcattttcattcaattttggatctgaagctcccatataaacaacataatgctgatgatcaaatcaaaattatttatcagtttaatcagagcataatgtaatgaggcgtataacaattttctattcaattcaatgattccaatcttgtaattgctctagatatagctctcactttccatgagtatgaatcttttaactgattttctaggcaaccaaacaagaaaatgaggttgaatcagcggaatttgaagaataccctttagagaatttaccttaggagtctctgaaattgaagcagaggctctagaaatgttgatgagaagccatgggagtgagagacaagtgagtagtagaataagtttagtcatctatggaagagagagagagagatgggcaagggtccaagggattttaatttgaggtaataatataataattaatatgtaagtaaagaggaagaagatatagaatttatagattgctctgttttggcaagtgaaagttataaattgactttaacgaacatgaaccacgcgataactagctagagaatgacacttaattattcttcgcttctttattaatatttatatatatttgttgtaaatactttatgatctctcatctctatgactaattatcacttattattgtacaaatggctataattgtttaatggtagtattaggtctatagtgatcgctctttacaaatgctacagctaattcaaatcactacacaatgattactactactagctaagctaatagataataaatgtgtattgcttttccatattccagtacatatattattcatgtatgatgtaatgtattgttttatgctaattcgaattttgctccagaaatttgatacatattaaaggcttagcatgttacaaatagttaaacatttttttttagaattaaatattcaacaagacttcttttaacaattaatatttataaataattttttaatttatatttaaattcttaatctaattattttaacaat

SEQ ID NO: 381531 - DNA, 3714 bp, Cannabis indica
atatatatatatatatatatatatatatatggcctcttcaactcgcatgacaaaatctcatagtctacagaggtatctcataagccacccctcacgtatgtgtgcacaaggaggagcagagaaaagggccaagtcagcaacagagattcaggtgaggggaatgttgcagcagagttagttatatgggctgagtgtttgtgtacctagggtgcagctagtatggtaaggtctactgtaagaataaatagaatagtagagtctttttagggtgtggagaaaatagtggattataatcctttgggagagaaccaagctctcgaattattggttaaatcaataccacagattattccttccatatttccctaattgtgactgtttcattgaaatttataaatctatcagtatctcgctacaaaacaatggctaccgctacattggataaactaaagagtgatccgattattgaaactaagaaacataccagggtccacctggtaggcgtaaaccttgacgttgaccaattgtataaaaccagaaaccccgatgctttccaagaaaatcacctgtttcagcttctaatatgacaccttcctcctcccctatgtgtctggcgacaaattcactaaactttatctaaaaaaatagaaaagagagaaaaagttaacattgcatcaacccccattgatgtagggatgtttatataatacgcaatttgtggttccaaaccccaaccaatccagaccaaaccaaacgaatccggtgtgaatgactcgatcaattcggaccatttgaaatctctggttcagtcacagttttagaaatctcggtagtagtataattattttgtatatacttaatttatatttttttttggatgaaatgttgatatttgggaacaaatttaggtaggctattgatattgaattaatattgttatgataataattttttattgttatttatgtattacaaacttattaaaagtaaaaaaaattaccaaaaaaatgaacaattattgtaaaaaagttttagatcaactacgaaatacaaactatggttttgaaccaaaccaattcgttttttagtggattggtttggtttggtttgatcatttaattggtctggtttggatgaaaatccggaccaaaccaatccgtaaacaccctgattgatgttcacccaaaaaatttagcttggcacacgagagagaccaagtgagtaaaatatcattctaaaatataatttccagtctttgccatcatctaaaccagaattgcacaccatacctttccaagaaagcatattccttgtgaatcttttctgtctttattaggcagatcaaattgtgtggcaagcttccgaacttcttcctgtaaatgaaatttacatggaggaaacagaaaaggaagttaaagatcaatgcaggactcccacaatgaaaattaaaagcacagaagttggcacagagcaagtgtactttcttgaaagttgaatctcaattgaacattatattttttcttgcatatacagctaatgatacccttttattaaaatgcaagaaaatcaagagatgttgctaatttgaatttgatagcaatgccatacatataaaactagctcctaacctttgagatacaaccaagtgggaaaattagtcgcttaagctgcacctgagaaagatgtgaaaggaagtatgtctgatctttcacctaaagtttagaagttaaggacatcaagagttagtgatctttttttttaagaaaatgtggtgtgtacctaaaacaaatcaaaataactagaaatatgtcaaaattatcatcacaaaatgtaaattctgaaaattgaaacagattccttctttaaccatgagcaagaagagattccataaatgcatctagcataacaaaaggtgactgccataagcaaggaacagatacacagaagttagaattcagcaattatgttattcataagtaccatatcctgtgatagctctaaaatagaatcatcatccacttgatttgtacatgagtggacaacattcgcataatgtccagaagcaacataatcaaagtccatacttttgatggcatccatgaatgcacctgagaataacttaggttcaaacaatgttttgagtcataaacaatataacatcttaaacctctatttaacgcgtaccaaactttattcttgtattgcatagaacatctggattaggggtacggccacaacgatactcgtcaataatgtaggagacctagagcataaaaatgacaaaatttgtaattaattttcaaggcaaggaaacttttatagtttaagttaagattattatgaactaatacccaaaatggaacaccaaccttcgtgttatacagtaatattttatgtaggaagaagtccataaaggatgaagtgttgaaacaaaatattgttctttcaaaagacaagaaggagagacattacatgcatggataagatcatatgattctataatatctatatatatatatatgtttattatgtattatattcatatataaacatacataaatatattgtatgcagatagagaggatgaagaagctataaaacttaagtataaaaagattggtgagttggtcgtaccacattcttccaatattcatcagtcagatgcacaacttctagtggcacttcaatctgaaaaagaaaatgccagtttccataataatttatatgttctgcatggctcgtaagtaaaaaagcaacaaaaccaaggtcccaatgattcatacataaagttacagattaaagaaacaaacccgattacaaacagcttttgcatacttcaaatcctcttcccatgggcattccgaccaaaagttgtcaaaatcttcctacaaaagaccacccattaggctattcaagctcagaacaactcatcaataaacatggtttatttacataatctaatgaaatttcccgaaattctgttgccccagataaattatttacatttttagattaaaacaagcccaagtatatttatacccaagagagagagagagagagagagagatttatcatggtaaaatggcaaaagtaacgtacctggaaccaaattttaaggtagaaggcggtacaggaatgtccggcggcgtggaggaggcgaagagcaacgctgctatcgacaccaccgctgagcagaacggcgactttgaggtgtttatgaggcatggtgcagcgcaggtatggttgaatatcaccatcaaaactcttgaaacaatttgcggtttgaggctgtgcggcagaggcagaaacagacaaggctctggcgaagatgatgggaaaatggagtttagaaggaaagtgaggtcgagagatggagacgaagtgatgaggttgaattggagaacaagaaggtattgccatgattctcccaaatgttagtctcaccatttttgttaaaagagagattgtcaaaaactcattgtcaaatctcgtaaaatatggtagctgtggctgggagcctgggacaagccatagcttccatttctcaatgtgaaaaccattcttaaatgatacccttacaacaaaagattattgagtgtgcaaaaattcattcaattcaataccaacggatggatctaatagaatcagatatccaattataattggatcgaatgggatgcaatttaaaatctaattggatcggattgaatgttg

SEQ ID NO: 381532 - DNA, 3971 bp, Cannabis indica
aacaactatttaatcaattacacatgaacaatcttaatgaggttttgaacaattacaagggtaatttcaaactaaaaatcaatccaagattggccaaaatttaactattgagaagagattatcatgaactggtttatagaaagattttcctaaatatgaaaaacaaaagaatgaacacacttgacatatatagatttgtgttactatgatatgttatatatggagacaagtgaaaattgattacaaaatgggagtcggaatcgtttcgttggcacgcctgcagtcgcatgagcagatgcttcgggactccttgaccagacgttgtgatcttcgagtatgaagcttgatattcaccaacttaccagccatctgttcattcattcagtaaatcatagtgtttccaagagtgaatacgaatacaatcagttccgaaattaacacgaagaaaaacgtaccattctccacaccaagtcttcggggcctaagggttgagctgggttggagtatacgaaatgcctcgagtactgaaatgaaacaaaattgttataacaaagttaactctaaacaattttgaaacatagccggaccagcgtatgaagaatggaggaatcacaaaccttggcaagatttcgtctcatttcactaatttgagaacgagtaatacttttgagaaaatttaaaagccaaccgggttgtacagcatcaccggaagaaacaaatactgctatctgcattaagtttagaagaccggagttgacatttgcaaaaataaaagaaggtcgaaagagatgatgtgtaattgtagttgctcaaccgaaaatgcaaggccgtaaggacagactatctaattacatgattatcaaatgattcagctggaattttacattctctaacaccgaaaaattccccattacacagggatttagaatcaattaagtgaagggtataagctcattgtaattgatgcataccgatttctctataactatactaaaactaaaaacagatgctcaaattaagagaagcttttcccaactaacagaagcccttacgcatgtaacatcatactcaattaacatcattaatagaaacccctcactcaatatggctatcaattataagagaaaaaataaatacaagaattatttaacattacctttctatagtctagtattccttcaaaaggaagctcgagttcatcactgactataactggtatgcaaccactgacaatagcatcaaacagtctagcagatgatggagtatccccagctgggcttaaacagaatatagatctgataacagagaaagaaatttaataattatgacaaagaaacaaatcacatcatagaacatgagtgaaaatcaacacaactttacttgcgcattccattctgagcagctagttttcctccctctccagccgatccctcctctataactacaccctcggcaccactaagttctgatacaagttttgctcgtattttaccaccctgaaaacaaaaagttagaatgtaactacgaaaaatgaataaaatgaactaaaaataagaatgaggaatgaataaggagctatcgaaactgaaacaacaattccacccgtatgaatagagtaaatcaaaatcccatgtgcaagaaaatttctcataaaataaaaacagtcttacagcatttctcttaagtctcccgcggaagaaaataagggtggttcttttcagttcagttgcagctaaacatttagcatcgcataattcaacattaggaacataaggaagaattagatctttctccaggaaaacttgtcctggtttgtacctaaacacagttgagtaaaaaaattgttaaagtgcaagttctacagtgagtaaagatcacaaaaagcatagcagggagttgtatagtaaccagttcccagtagagtccatatcaggtagcagccaaattgccttcttgacaaatctgcgaacagacttgaacgaccatggatgatgaactggaagtatgtgatctcttccttcagattgtttccatgcaggttggtctgttatccatttcaaagcttcctacatccatagtaacagttcattaaaaactcaagaatgggttcatgtaaatccgtaaagatgacacaaatgctcaacttctacataaaaagaacaagttccatttattgaagaagttcaggtattgtactactgtttaaccatgtcatcaagctcttatcaatcaattaataagatggacatgaaatttcctatatatagagaaatcgttaattaaaatctcaagaactggctggcatcattcattcaatgatttttgttgaaaaacatcatgcagttcagtaagatgacaacgaatgagcagcttttcttctatagacaacaagttttatgaatagaagaagatattaaggtattgcagtacagtagagcatggcattaagctcatagctatccaataataagatggacaccaaaacttcctatatatagggaaatggttcaataacaactcaagaactggctgacatcattcattccataattttacttacaacatcatgcagttcagaaagatgacacaaatgcttaactttacttctatagggaacaagtttcatgaactgaagaagaaattcaggtattgcagtaatgtctaagcatgttataagctcttatcaatccattaataagatggacactaaaacttcctttatttaggagaacgcttcattaaaaactcaagaacagactgacatcattcattccatattttcagttaaaacatcatacatttcaataagatgacacaaatgctcaactttacttctttagagaacaagtttcgtgaattgaataagaaattaaggtattatactaatgtctcagcatggcattatctatatccattaataatgataataataataaaaagatggaagtgcactcacaccctgtaaagagctttgcattgttgtttctccattaagaagaaactaatggtggtgaagaaaggtatgtagaacaaatcagcttcttcctgcttatcaactctcacaacagttttcaaaagcctctctgattcaggggcaatcaaatcagcccaaagccagtaatcaatcgaatgctgcataaataaaaatccaatctttaaagtccaaacacacacaaaaaaaagcaacaatctttataatttttctcttcaccaatccgaattccccaaaaccctaatcaacaaattgaacaaacctgttcgataaggcggtggacagggctgccattggaggtgagattagaggtatccttataacttttcgcgaaaagcgataacagatcgtacgtaaacttattaggcatgtcgtaaacgtaaaccttgatcggaaaagcgactgggtaatggggatctccgtacaaccgttgtgtctgggaattgaacatgagtttgtccagctcctcttccttcttctcagatccggtggcgccattgctataaggagtgggatgagtgaggagaaagtggtcgagtgaggcgacaaatgaggtttgggggtttgaagaggaattaggattggggaattggtaagggtttggggatgagaagtggtagaagaagagaaaggaaaatgctaagagaggaagggttaagagaaggagaaatggagatttggatctctggttttgtttacctaaaagagccatttttacagttcttcactactcagaagaaagaagaagaagaagaggaagacgatgctaacggagcgggtatccgacccgaacctgaacccgattgattgtgtctagttttacgtgggccaactggataaggcccgtgaaacagagaaagcccagtagatgttagttaaaggcccgaaagtgggagtaattgaataaagggaaatttagataaagtagtatttttttggaagcttttatgttcaacaattttttttatctttgggtttc

SEQ ID NO: 381533 - DNA, 1423 bp, Cannabis indica
agaagaccaattttgctcaataaagtagagaagattacgttaaagatataattggaagaataaagatgtgttggtcttgtttataagatacattttccctttttttttttaaaaaaaaaaaaaaaatctataatgttgttaatctaatatgtttagcacaaaattatgcattatgttactttaatccctcacccatgtgcattttcattattttttatttcaatgattatgcttactgcctaaacggattaattgttgtgctgtgtcgtgttgcttttccaacaagatcatattatagatttggagtagttaccatcgcttaaaatcattgtcttccactatgttatcttgtagagcaatttttgagcttaagactttattattattgttgttgttattattattattcttatctcataagaatggagttctcccatgccaatatcattttagtatccaatctcaaaaatattatgtgcaatgttggtggcaagcacttctgaaaagcctactagaagaacccattttggtccatattttgtggagatttgtactatggaaattggagcttttttattttttatttttaatgaattttcatcacatggaagggttctcacaggacttcagatctctataatatgaaaacataatgaatgcttgtcaactatattttgtttttgatgaaatcttcattttcttattataagctcatacacatagatgccgtttttaaaactagtctttttcatgcctttgatatccactacattggttcaggacatgtgaaatttgtcaagcactagcgcgcaacattgctggagcgagtgagattgagttagccgaacaggctgccaacgaatccaataacgcttctgcagtaacaatgatgcctggaccagagcctcgaagcttctggcatggccatcgcttcttgaattttcttcttgcttgtatggtatttgcatttgttgtatcatggttgttccacttcaatgtgccttcttcataaattcctgaataaaagaagctctgctcggctaaagatctcaaaagaattccaaaaacaaaattgcataaaagaaaaattgtatgattagttaatgagttactctcaacttagatctttatatgctactccatacctgtagtttattgtatctataaggttactatcttcttatacctttatagctcattgaagcctttgcttttttatcaactggtttatcaaaaatgttatactatttaacgtataatttagttccaacatgttatttcatttagaactttcatggcttgatgggaatattgataactttctttataattagctaaaaattaaatcaattcctgagcaataacaattaacatcttgcttcgagaatatataatattttaagattcagagaaatattatata

SEQ ID NO: 381534 - DNA, 1581 bp, Cannabis indica
gaaaattccaatattctttagaacaactataataaagatgtatcaacaggggttgtagtgcttgtaaagatataatctacgtcaatcataggaaagttaaaatgagtatgtgtctgagtttttcttttccaatgtaaaaggttgtactaaatttcctttgcagtaagaaatcatcaggcaaattcacatgcaaagaaagggtgggaacaatttactgatgctgttattaaaacaatttcacaaaaaaaggaaggagttgtctttcttctatggggaaactctgcccaagagaaacggaggtacttacttgcatactcttttagacatgcattgataccaaatctagattagaaaacatatagaaaagatgagcacatagagaaagtcattgaatctctaatctctattataatttattgctgcgtctctgttgtcagagtgtggtcatattttattgtttgcttgctcaatgtttggcctaagtaatttttatttagttttaaaatgtgctaacttacctaagagggaaaattctaaggcatatcccaatggtagagcaagtggagcagaaagaaaataaattttcatacacatacactacctgaatgaaaacactaaaacattcattctcctataattgatgtatacaaggtcattcttttgccgtatcgagtttagtaggattattgatgtattgtgaaatttgtacacaggttaattgatgagtctaagcatcacattctgaaagcagcacatccatctggtttgtctgcacacagaggcttctttggttgcaggtgagtgtatcactagaagataatgatatatataatattaaaatggtatagcttttgaagaataattagaatgaagtggtatagcttttaaagaataattagagcaaattcctttagtatgtgcatcagataatcatgttcggtcaattccttgttttgtttagcctcttgtgaacaaaaaactttgttgcgtgttagatcagatagtagttgatacataattggtaacttgcattggcaagccaagccaagccaaccaataacgtaaagtaattgtatatttggtttggttttaaatgacttgaacaggcatttgtctcgcactaatcaactgctagagaagatgggaattgaccccattgattggcagctttgatataatagaagagcaagtgttgcggctggggcttctccttctttaatatggatatacagtcttgacttttgacagaagaaagaatatggcaaaacccttttgattagatcactaatcctctattttgttccaacagtaacctcctttttgaagtttatttatattgtaaggggaaaccatattgatatactagtaatatttgaagaacattacaaacattgtatgactatgaattgaatggtattatttgtaattaaatttgaagattgaagtttcttccagtgttatataataatgaatcatcatcactatctatctacttgtagatccattcattggctcgccctccagtttcgtccatgtctataaaaatgctgactgcctgcatctcaatatatatatatatat

SEQ ID NO: 381535 - DNA, 4081 bp, Cannabis indica
atttcggttcttaatgtcatttctataccgtagttgcaggctcacctttctacagattcgaccctctccaaggtgattcaacatttaaattccaggcgtgattgtggtggttattcgttggttcatgactgtctcaagttcaaaggcagctggttctccacagtcatctccttttatccctttgttgttgcgagaataccataacagtaatgttggtgggcactccagggtttttaaaacttttcagtgcgtggcggctgatctatattgaactggaatgagacgtgatattcagaagtatgtggctgagtgtgccgtttgacaacagtgcaagtatttagcccaatctccagcgggtttgcttcagcccctgcctattcccgagcaagtttgggaagatatttcacttgatttcattgaagggttgccattttcatatggttttgattcgatcttggttgtggttgatcgtttgagcaagtatggtctttcattcctctccgccatccttactcgctatcaccgtagctgctgtgtttgttagagaaattatcaagtttcatggcattcctcgctctattgtctctgatcgggacaagatttttctcagcctattttggaaggaattgttaaagttgcaaggtactgccttgaagacaattacaacatatcactgccagtttgatgggcaaaccgatgtggtcagtccttggaaacgtacctccgctgctttgttagttccaagcccaaccagtggtctaattggcttccatgagctgaatattggtacaacacgtcctaccacttagcggttggcatgactccatttcgagccttgttccatcgtgtgatccacctcctctcctctgctttgattctacccacacgctagtttccgcagtagtacaaactcttcagaatatggactctattctggatttgctgaagcaaaacctccaccgagcacgacagaaaatgaaggcttaagctgacaagaagcgtcgcgatgttcaattcgcagcgggtgacatgtatgtgaaattgagaccttatcgacagcgctctgttgccaaacgtcgtaatgaggaattagcacctcgttactttggtcttcctgttctagcttgggtaggtgctgctgcctaccgtcttcaactcccttcaaatgcaaatattcattctatgttccatgtttcacttctccgagctgctttcggtccacacaagcaggctactacactccctccgggacttactgcagaattggaatggcttttggaacctgaaacggtgctggatatccatcctggcacgcataaaaccgctccccaagctcttatcaagtgggccaacttgcctgaattcgaagtcacctgggaggattttcgtaccattcaagagcagttcccccacttccaccttgaggacaagttgcgtcttttggcgggtggtattaatagaccaccattgacttatgtgtacgcctgtaaaaggagcagggggtaaaaagggaatagcaacagcatagtggccttggttgtgcgtgtgaaagggttgttatatgagtttattttgtgtgtgggtgagaagcactgtaatcggctagtctttagaataaaagggacttgagtgttctattgtgtgtgaagtattttgtaaaggttttgtaatctgtttgggagagaacagggctctccaactccctggtattcaatatcagaccagtccaattttcctaatccttctctttaattcttctttctgctatagttatcaatttgacaggaaatacatatcagttttcattcgccaaaagggagggttttctataaataacgggtggggggcaagtctaagacaagtagcctccattctcttcttcttcacaaaaagtatattgtactaatgtgttagttaatttttccactatgaattataaatgtgattttctggagtctggaattttctaggacacaccaaaataaaaaatcagaagtagtctagatgtaatcagtaagcactaagaaaggtttaacctacttgtcattctttttggtggggtgggagaagagatgagtagagaataccattctagtactgtgtttaaaactagcttgggattagaataaaacaatcttcccacagaaataaaaccccaattagaggattatttaacagactgtatgagaccacaaaaccgaatataccaacgaagaagaggcccacttttaagttttcctttaaaagaaaaactttaatttagtattagcaataaatttgattaaactttctatacgtgcaaagtttgatgtttcaaaattttgtatatataattgtaaactgcaattgacattgataataagaaacaacaatatccaaactccaattcaaaccacacagtgattctcttaccaaaaaaatgaaaataaaatcacactgattggtagttggagagagagtactagtgtagtattagtgtgtagttgcattaatgtgtagttatttaaaatattgacgttttcaatttcatatataataacttgcaaaagaaataacgaagttatatatgtacacaaattttatatatatttaatcaaaatttggggtcttttataattgaaaatacttttcctaatcttaggtcggcatcaaaaaataggattatgaggatagttttaatcttatctctaattctacccaccaaatttataaggtagtgagtttggtgggtgggagaaaggatgaggttaggatatattagtcagtacttaatttggctgtgtcttggagttgattgtttttttaataggtgaagttagatagcaaaattctacttggagtaagtgcaataagagagctccagcatcgaaagctgtaaacaacttccaatattctctagttaatcttatttgatattgtctttctttgaagtaaaatatttaagtttctagtagagggggtgactcataggtgagaatctttccaaccacagaaagctaaaacgctggttatgtcattggagacttttgaaaccacagataaaagtgtaaactcacaagtgctttcatatgagaaacttccaaaatcactgttatagttgaaactaaatatcatatatatataactactgtactaatcagtattggaccccattcagtgtataagtagaatggttacaagtgatatattaatcagattttgtcgtgtagaaattgtttgctataactaatggcatatagatacataatattaccaaattattatcaatgcctcaattgatgctttttttcttcttctctttttccctttttcaatcaagtgacaaccttgtcaatggcttgtagatttgattgtgaaggaactcgtgtgcatacaacaaatgacctataatttgggtgaattccacctaatgatagatatcgatttgacgcctatatcattggtggtacatttcaaagatttattgtgcttcaaattcttatttgatttgtgggggcagggaatcaatttttttttatttactattaaagttttagcaatctagcttctatctcacctgtatatatttttgtgcttatgtggttctaatttaagtttttcttactttctagtgtgtatttattagcttatcaaacttacagtttacataaattattggaaaatttacctgacaatcaatttgcttgtgggtaccctaataataagtagggaattacctcctgaattagaatttcagatacagaaacatgcacccacgatgtaaatatagggtaggatatgagtatatgtatactcttccctaccctactgtatatacatatatatttttgctcattaaaattattttacatattaatctttattttcatatttaaacataattcattcattataaaattaaaaaataatcttatttttaactttaatgagtatttcaatattatattggagttttttcatttttacactttaaactagttttgtttgtatttttacaaaattctacatagaaactcctatcgcaactagcgctgcaatctaaattgcaacaaaaaatcgtatagaaacccctattgcaact

SEQ ID NO: 381536 - DNA, 1718 bp, Cannabis indica
  modified_base (21)..(21): a, c, t, g, unknown or other
ttcttcttggaattagactangtttttgagtcattgactccctccaaatacactccgtgttcaaagaaattctgcaccatttgaactacatcacgacaaccaatatgccaaaactattgataaaatttggaggcataccatcagggctaacagacttgttaggctgcatttgaaacagagattttcagaccgcaccctcatcaataggctctaacaaactcaaattttgggttgcaatcacagtgcatgcaataaaatcaacaaactcttgctaattaataggtgaagctggaaaaagatccataaaataattaaccataatggtttccaaaccgtgatctcaatccaccaaatttcttgcaatttctggatatagttcacacgtttctgagcactagcactagcataaaaatatttattattttgatcccttgcttttgcttagatcgtttttttccactacttcttctgttggtcaagtatatcatataagcctgaacagagccaacatcctgtcgtcaactccgcaacctttttatactatccttacatcgcttaattcgtcgaccaaaattaccactaatctccttttcccaaatagcaaccttctcactacgatcactaatatttattgaatgtaaagaaaaaacaccatcttttcagcactcttgcacaatctgatgacacatcgaatccttagcccaagcattttcaatacgaaaattcattcgtagaggatttgacaccttccgaactgggtctaaaaaaatagggcagtagtcagaactagaaccctccagattaaacaacttttcttgcagaaagtcatcaagctaaagattggtgtatcaagctaaagattggacaccaatgcacgatccaatcgaacctcagtctagtgcctcttccctttttccaagtaaattaatgacccgtgagaaagcacattattcgagttatcaccaaggaagagaggaatcatctttcagctaacgaattaaagtccaagaatgcatcctagctagcccccctatctggttcataatagaaactagttaaccgccaaggtatcatacccaccacagtactaacctccacatctatatgacttttcaagaagtttagtaactaagcttcatcttgttgtcgccacagtaatgccaaacccccactcctctcatgaacatcaaccacaaacatcccttcatgaccaatctgacaccgcacccaattcacagggttaactttaggggtggttaacttcaggatatcattgacatatattattctagttgtcgaattagtttctcaaaactctttttactaacttctccaaaacagtgagatgaaaaaaaaaaaaaaaaattcaaaacagtttttaacttaaaaagtaatttattatttttcatctttatagaaactaaaccatacaggtccataagttaaaatttatcagagtctattttgttcttaattattactttttttttttcaccatttcattttgatgtactcacttagtcactttgattattatcaatactcaattgttcaaaaaaaaaaaaattatacatatagactttgcgaaattaaaaagattagatggtgcattttataaatgacattatcaagtacataatttctcatctaatcagccaactaaaacttccgccactctaagataagtattgtacgaacatttcttcttcttcttcctc

SEQ ID NO: 381537 - DNA, 2411 bp, Cannabis indica
tttattttattaattaattagataaagattccctcatttactatttattataattatttaattaagaacatttaaactaaattatatgaaatatatatacgcgtgaagttgataattaggagtcggcatatacataagacacaacaaacaaagaggggaaaagtgtcaatatttataatatttaggatgcttacattaatattaattatacttcaattttggatcatgcatggagaataattaattataaagtttaagttttgtcgatattcagttataaatcaaactatacgttttggaagtgcaaggaagtgttgacaaaattataatttattagtttatacaaattaaatttttttctgaaattgatatgaaccttaatagcgtatgtaatttatacacaccagaaaccaccacgtatatttctggtttcatttaatcattagatagcaatgtcttttattaaataaaattatgaaacacaatgctagagatgtctttcaaactctgaacaaaagagaaattaaagccaaactagttacaaattgtaaaacaaagaaacaggctcaaagctaacatgttacttatttcatgaaaattccactagttattgttgtatttgtcttttttttttaattctataaatagagaaaaaaaaatcggaaaataaataaaaaagaaaaaatatataaaagtatttgtgagtaatacatgtgtgggagaatctgagggtcacatgggtgagagtgagagagccacgccaagagagaaaaaggccccgcgtttcccggcccaactaaaactccaaataaaaggtgatcacgtgagttttccttctttaccaccaacatcctccttctcttctctctctattttatctctttctctctcatcagcaccaataccaacacaaacacaaacatagcagtagtaataccaatattattaacttagataatcgggatctgtgccctaatcatcacctcttaatattaatctttgtcaatttttggataccaggtcaacgtctaactgctcctccgtcaactttcacttcaccctcacgtgactaactagtttttcttgtcctccgtaccatgactaaaattcacgtactccaaagtaaatattggtaaaattctctacctcatctcatcttttgagaaataataataataataataataaacttaattaggtattttttttttctcccaactttgacatgtaccaaattatgttttttaaattttttggccgtttaaaattttcccttagatttaagaatttttgtctaattttattactgtttcagtgattgtttatgtactacacgctccccaaactttgatatctaccaaattatgtctctcaaactatgatatatactaaatcatgcctctaaatttttatctatattagaatattttattaaaattagacaaaattccttaaatttaataatctcaataatttaagaaaattttgaatgaacttacaaaaatttaaaaaacataatttagtacatatcaaaatataataatatttatgagcattattatttcctctctctcaactcgtgcaaactaactctcaatacttttttctcttttctggaatttattaattagtatactattaattacattttggtaacttttttttaatgtaattatcactgtcaaatttagctatatattatataatacgattaggtatagagtacaaacgttagtactagaaaagaatctcattcaagtttagatacatatttgatatgaaatttttttataattaatttctagaatgaagtagaccaatgtggttagtggttgctgatagtggctcttggcttttggtcccaaactcccaatgcacgtgctgtagtcgtacaacacaaactctaagctatttcatagcatggagagacttactgtggctgctctctcatgtcgctttcagtttccataaccttacgatactatatgtgtaaatatatttttaaattttttccatttttttttttaaaaaagaaagtactccttgaatcaagttctctcattccccctttatatattataacccctgttggataaattaatgtattttaaaatgaaaaatttgcggtatataatttctataaatgtttaatttattgtaactaattcttaattttaaaactttaatggtaagattctttaaattcatgttctgttaacacttaactctttccatccatatatatttaggtgttaagtgacacgttggacaattcatatatacatactgtgttgtctacgtgaacactatatacacatggaacaattttattttccacgtaaataactatttaaaaaattaaaaataaataaataaatttaaaaataaaaaataacaaataaaaatttaaa

SEQ ID NO: 381538 - DNA, 1674 bp, Cannabis indica
ttcgcgagacagtatgaatgttctacaacacgagaaacataagagatatgatctacaactaagtttgcttaagggcttatatttattttttatctaaattaaaaattacttattttatattatagtgggttgaagttgtttcattagttagaaaaagaaattaaaaaatataatattacaacaaagaaaaaaaaaagaataaataaaaagtttaattaagtatctaaattaacatagaaaattaaaaaaaaaatcttttaatattcatcattgaatcaaaatctaaaaatttatatttctaaaattaatatttatagttaaaaaaattagtaatcatcaatgaaaatatccactgagaagtgtttcatatgtattataaaaatattatattacatgtgatagaataaagtttttttttttattatgagagtgataaaataaagctgatatcccaaaatttacatcgatgtcatgacgctcagcaaggtgacacgtgattgatataattgaacatggacggagtatatctcctgattattctgacgaggccaaggagatgaattattcaaagtctaaccatcaaaacaatcatttgagacaagccaagatctcgtaaaatgtcgagtggacctagcatgccgaataagtttgatggtcgaccagaggcacgcgttgagtgaagatcttccatagatctttttcttaattatttcctcaaatgtagctcaattaaattcttatttttgtggaactcttttcccaattttttttcctttaatatcgggaattatatcctataatttagcaacttatgtaatcttacttttcctataaatagtgaagtcatttcactatttaagaggaccttttttcgcattccaaaaaggcacactctgcaaaaatatttgtacgcttttcaagagctattgagaaactcacatgaccgaaccttgtgatctttatagttcttcataataatacaattaaaaggaaattagactattaccataatcagaggtcgaacctctataaatattgtgtatcgtttattgttcttattttattattaattactctacaaatattctgtattgttgactaaaagcgaggtcaataaaaatattttcaaattaatattttggatataaaagaaaataaatacaaattaaaatataacaatttctacaaaatatatttatgattgtaataagtcaaatcataacattattgttataattaaaattttaacaatttttaacactttaaaattttcaaatatttttttcttcaatttaattattttacctcacagtttaactacaattatactaaattggcccataatactaaaattaacatatataaaaagaaatacgtgcaacaaaatattaaattttttcgacacaatcatttttaattttttttagatgtaaagtaaccaacaagaaaagagcaataagattcgggttacaattacaataacttatttggaaatggataatttcaaataatctctctatataagcctaatgattttctagcaaggttatgcgcatgaatattatcattttttttaaatgtggtgaacagaatcattaggaaataaagagaaagagttttgcaccaattgaacaagatccgagaaagaaaatctattcaatggatggtagcttt

SEQ ID NO: 381539 - DNA, 2458 bp, Cannabis indica
acccttaaaatcattttccgaatgaggtaaagctagaatctcatcaatgcgtttcaatggagcttttatcatctcactgcatcaaaactaacacttcaaacaactagatataccaataaccttgaaacagagtataacatctctatagttcgctccctaaaagtaagacgaactaaataccatcacttctaatcaaaaattacttaccactgattaaaccaacgatggcacatcaaagttttgcaatacaaataaatcagaccaacatttttcaaatatggttaaaacatgaaactttaacatacaatttgctggaagagttacaaaatcaacaagtacctgacgttcgaagacaaataactgttcttaaactgttgctccgcattgtgcatcaacctcctgtactcttgggaccccggaagctgcccttcaaagtagccactcttctccaaactctccttgaacgcttcccaagtactccctttaccttcagacccctctcgaagccgctgctggtacatcatctcgaatccacaagcgattttcatccccaattcagcttcgagataagccgaagtttcagacctactgggcattggataacatttgggtgcttgaaacgtctgctgaaccagctgagcatacatggccctcgacatcttcaccgatacccgaacaagttcttcctccttacctttgctcaagaacttctccatttttgccgcgtacttcattgagtcgatatcccggtcgtagaaagcctcgaccgctagtgaaatcaagcaaggctcgtgcttcagcacttgagcaaccgaaactggaactaaaaccctaaccttatgggtattcaacctcgctctgtcgggatactccgatatccgattcttcacggcggtttggactggctccggcgcccgcgacacatccccagaatgattgataaacttcagcgaatcgtcgagagtagggctggggagacggtccttcggaacaatatggaggtcaccacggcggacgaagacccggttgaggctgttgtcagggttgagccaacgagggaggtggaaagcagcttcaatgagcaagaactcaccgtcggtatcccaaactcggattgagaggtccgggaaccttctagagatttcaaagaggagaaatacagtgaaccactcatcgtcgagattatccccgtagcggagcttaccgtggaggtgagaatggtggtcggagcagaggcaggtggaactggggtggggggaagcggagagagtaaagggctcgtgctgccatatatagtcggagacgaagggagagatggtttggaggatttggaggtggagggagttgagtgaggaggagagtgaagtggcggcggctgtaggatttagggagaagtcaggaaaaatagcgtagaaaacggtgtcgtctggaagcctggaggtttttttgggataatatggaggaggaaggaggaggacttgtcgccattgttgtgtctggtgtaggtgttttcctttcctgaatattcttcatgcttttacatcttcaccgccattgttataatgagcaccaatatcgggattcatgtaatccctcactttgattttgaggtgtgacaccccacacataggacaaagttctttcactatagctctagtggttaactttttggtttttaaggaaaagatttcaaccaccaaacaccaagaccaacaagccttctattaaggtagggacagaaaattattcaaaaatagcatatgttattaataagttctgaatacaaataggatttcctagccaccaaactgcactttttctagctgtcaaaacaagtttgaccaaagtatgggcaacgctatcaaaagatctataacaatgcacacaattaacatcttagagcctattaacaagatcaataatatcaactaaaactagactcaaagaagtaataataaaatcattgtttttcagttcaagcacaatattcaaacaatcagactcaacaattatgttttcatacccaaaggagactcattgaatcaacgtcttgcggatagccaaagatttagccacttcaggaacaagcagccatcagaatgtcaacttgctgaagctacaactattcctaattgattacgaagcaccatatctaagccattacaattgcccaaagaattgacaacgacatttgtatttactcggagataaccaatcggaggaggtttctattttgggaccacctgaagaggggctgtccgagataccatcccgccagtagggacgtcagccgccttctgacaggggaagctgccgccgaagcctatttgttataaaacgtccctaggtaatcacgggcccaatgcacagtaagcacaagagtcaactcaacgttgttatggactattttattacgtctgaaacaaatcctccacaaaattaccataaccaattcaat

SEQ ID NO: 381540 - DNA, 1426 bp, Cannabis indica
tgttattctctctattctcatacttttcaataaatggagcaattccaaatatatagagaggttgcaataaatgttctgaaatagaaagagaaatgctaaataatagcaccagtagtgccttacacagttacaccctttaatggtaaactgaaaaaaccatctttaagtactagaaaattgaaacacataccactaaaatactctattgattgtttgatatattaatgattagagatattaattgaaacaattaatattctaataacaacataaataatttttggtatgggataacttaatagttagtccctcgaaaaatttagaataattatcttattattattgacaaatgatcatttattttttctctttatcgttttaatctaatttaattatattcaatctcttccaaacattacgtaaaggtgataattgttattgaagcaaattaaaaattatcatgaaagtatcatttacgaagattactataatgtacatgttattatttctttctttgttatatggtgttattattattatttgaaaagtaaatgaaaatttttattaatgggtaaatcacacatagttcattacattatctctcatattaatatgtatcaacttatacttatatatcaatttttaataaaatttagatagagacaccattttccaaagtagaataaaagaaaatttatcaaatctatcgaaatctataaaacaaggggttaataacaatttaaaatttcttatcactcaaaataaaaactaggacattgattgattcaataaaagagtgagaaatcaccattattaaaagcataagacactactgaattatatcaattctcatatcatatcatcaattttttcttgataaatttatttttattatttatgatacgtcaaattaaagtagatgccttttctgaaaaataaaaataataagtagatccacatgtcattttgtacgaaaaacaaaatttttgaaagtgtattagtgttgtttaaaaataaaaggagctattattatggcaagatttttttttttgacaatgaacattcattgaaaataattttaattaaatacattaacatcggaaaaaaatgtgaaaatatctatccaaattgactcgtcatctactctgagtatatacacgaactgctaattcaagtatataatatgaataagaaatgcctcaaaaaaattaaataattaactaataaaatattttatttgataatttttatctttgtatcatatttttttgcatataattttctcaatcctagccggatatatataaaagtgaaaattacatgaaatatgggatttcataacaaagttagaaaaatatggcatttttaagtttgccactcttctatggcatttttttacatttaagattttttatggtatttgata

SEQ ID NO: 381541 - DNA, 1428 bp, Cannabis indica
cgtgttcgtgttttacaaatttttcgtattcacgaatttgttcggtctaggtttttaataaatttaagttactgaaagagtgagaaaaagataatccaccaagtgaatttttaggttttttttaaaaaaaataaaaaaaaaaaaaacttacaaagttattatataaactctcatagtgtgactatgtttgtgacccataatcgtatgaataaattatttaaaaattaagggacaaatttgcgaaggacttttatggtttggaataatttttgcaattaaacaaaattaagggacaaaatataagaatgtgctatttattcttaataggacctcgtttattacgtcgtcgtattacgtaataagaagagagaacacgttagccgtccgtgactttgtgggacccactcccatccctcttggcttggcttggctgctgagtcagctcatcatccacttgcaaacttaaacaatattttatttatatttatttatttatttcctaacaactaaactcactttaaactttaaagaaaatagttagcctataaattctcgaagtttcgagtttgttatacttaaactctttttttcagtattaatacttaaatgttttttttgttaaataataatgttcttacttttattcagttaaattttgattcactgaatacgtgttagttcgttatattcaaattattgttttctatttttttttaggaaattctttaaaaatagtttacataacattagttttttaaaaaaattctacaatatatttttttttggtaattatatacattatagttatttaagatattttataaaattttaaaaaaatcaaaaaaatataatatgctgaaacagattcaaacaacacgcgtaaatattttatttcatacaactgcgaaataaacggtttaaatatcgtcttttatgttgtaaattatttcaaaatttttaaaattttataaaatatcttaaataattataatgtaaaattagtagagagagcatctttttttaaggaaatacattgcagaaacactatatttttatatatattatagggtataatacacccttaaaatgaatgtactcatacatccatatctattttgggcatctaaaaaaaatttttactcaaaaaaaattcataatcgtgtatgtttcgaaataatttacaatatagaaagtaatgtttaaactatgggcgttcattggatcacatccaatgtttttaggcctatctagatccgatccaatcatatattggatgttagattttaccatccgatctgatccaatcaatttcaatcatccaatcgatccaacatccattggattggatcatttattggatgctggattgaatcagttttatccattggatgtattttcatatatatttattggtttaatttgagttta

SEQ ID NO: 381542 - DNA, 1279 bp, Cannabis indica
gaatgatatttataattagtcacaattttttcacttttagtcacaagttttgttgtgactaaaagtaagattttttgtagtgacaagtggtcatggtcaaagtagcaactatcattctaatcaaagcaactatcattcaaaaaaaaaaaattcaggtggtggtcgtggcaactattctcatggtggtggaagtaacaatggaagaagttgtggtggccaatttaatggatccaaaccaacttatcagatttgtggtcaatatgtttattcgacagctatttgttataacagatatgatgaatcttacttgggatctgatcccaaagttggtggtcaagccaatcaaaaaccaaatcagcaagcaatagcctatatcgcttcacttgaagttgttgacggtgtagcttggtttgtggatagtggtgcaagcaatcatatgattgtagatgagaacaacatggtggaaaaacatgagtatggtggtaaggaaatttttttataggtgatggtatgaattaaatatttctcatcttggtattagaaagtttcatactaataacatatctaaaccactgttggtaaatggtatattgttagttccgaaaatcacaaagaacttaattagtgtattaagtctgacatttaataatagtgtactttttgaatttcaccctgagtgttgttttgtgaaggaaaaaatcacaaaggaggtgttgctggaaggagtgcttagtgatggtctctatcaattcaactcataactcaacaactctgtcattagccaaaagcaatctcagtattaatctggtgtcttaagtttgtcaaaatcaagtgttgctcaggtagccagctttcaaatttctaagaaggatgtgtggcataggcatctaggcctactagagttcttaagcttgtctgcgttccaacaatgtaaaactttccaataatgaaaaagaaactttctgtgaagcttatcagtttggaaaattacatgcttaccttttaatttgtctacctataaagcttctaaggtacctgaattgattcatactgatttataaggacatgcccatattgcatctaacacaaacttcagattctacatacatttcattgatgactttagtagatgcacttggtgttagcccaagatatgttttcaagatgggagggtgaattgaaatttaaactagttttacaaatattcaaatatgttttaagataattcatgcaaatattcaagtttaatgcaataacaaagataatcacaagtataaac

SEQ ID NO: 381543 - DNA, 2773 bp, Cannabis indica
tctctctctctctctcttctttggttcaacttcaacttttggttaattggttttgatccctgcacagcaggtagaagagaggggcgacttttgattagaggaacaagagttgtgactggtggtaggagatttaaagagttgggatgagagagaaaattgaaataaataattaaataaataaataatataaaaatgaaagtggcagaggactacaggagtagagtagtattatatatagtactccatatgtgaagggagaaaatggtctagacactttcgaaaacgactttgatcccttttcataaaatctgtacaaagtttactactcagaatatgtattgatcccttttatatgaattgtgaagaatcccaattataacaaagagattagggagaaaaaaaggatgtaaaagtaaggttctttagtttcacatagattttttttgggtcatgagtttcacataagatttttattttgggataaaatttccacaaggatgcctttattattttggataaaactttcaaatagatttttagaatttaatttgtttgtttaataaagggaaggatataaactgtcaaaaagaaaacctatatgtgtaagatcagatcagagggaaaagacatagaaggctggctatatcatcaatttttttgttagaaaatcgcaccaaatataatatttagagatatctaattattaaattttatatttatttatttctgatgaataatttgtgatctttatatatgttggcaaacaatcagagtaaattaatatatatataaatatagaaaaactatatacggtatgctttgccttgtttgaccaacgaaacctttatattaaatgcaaaggtgtagatgccttggctttcctaattatggcatagcaggctttctcatcacatattgccaatgctttctaatacttgctaagatatgtaactcttatttttttaagcttttaatatttatagtgaaagttacaattaaaaaatgaaaatattcacttacacaaacatacaatattctgttttgaattaataataggagagaacttattctttaatcttttactgtacacgtgtagcaacaagatccatcggagctgggagcatgacctatcaaatggccaggggttgaagtcatgatctgggtggaggaagaagatagataagactatttatttaattaaattataattatgtataaatatctaataattttttaataagatattggaaatttgtgggccgtttgattggtgtgatggctccaagaaattgccgggagaatccaaattgcatgaggtagagtggagctatgtgagatttgggatcaatgttaaaggaaagagattttttttttttttttttatattatacaaacattaattaatatgtcattattaaaaacattaaaggaatggtttaatttgtaggatagaatttgaaagtgagtcaaatgggagctttttaagaacatacccaccatcctattctctcctaccctccactactagtagaactatggagagagagagagagagagtcaccgtctacactttgctagtggtacgaccacggacttctctcattataaagtacactagaacatgaaaatattcaaagctaactttagtcttttctaattctcctccaccggaatgtcttaaataaaatattatttaatgtgtaatttgtttaaccctaattgggtttttctgataatggtctgcatagttggtttcctacgtactaatatatatatataggatatgtataaaaactataaatatagatatcggtccagatggttgaattcattacgtattaaagatatataatatcatgagtaattaatcaaattacatcactcttatattaaattaataaacaactaacttgtgatgtccggttatattttatttgatgataattaaaacataaaaatatattaagttttaaaatttaatattttaacaatataagtaataatttagtaaactttatttttttaatcttaataataaaaaaaatatatattttacaaattattttaaacctaataaattataatatttaattaattaatttactattactatattagttagtttttaaaaatatatatcgttttaataaattaaattaaaattcaaaaagtatgtaaattataacagctagtaattttataaaaaatttaaaattatattgttatcaccaaatttgatgtagctgccactacagtcaaagttttattactgtatgttacttataatcgtcactatcatttccaatattattattgtatctcacttatagtattgtcactatcatttttgataagtttactctacatataaaataaattaattaaattattggttaagtactattcacttttatgcaaatattatagtaaaaaaaatattaaaaattgataaataatctcaaaaaactagagatataaaaaaagataattaataaaaataatttttttaaaaaaaaaaaccgttgtcatcatcgtatcttatttgtagtcattactatatatattcaaatagatgtcatcaccaaataaaggaaatataccaaaaattagggattatttcacaaatacacaaaaacatcaaaaacattacaaaattacggttttatggaattttaaatattttttacaatttttttgattttatttacagaaaatacagtatgtttatgttatactcttgttaattattcttgattttttgttatctgtatgt

SEQ ID NO: 381544 - DNA, 1411 bp, Cannabis indica
accataacaaagggattaaattactcatttatccaaaaactttccacctctaaaagtgcggaagttataatgttaagaagacaacttttaaagaaaacacattcattaacaagacgattattaaaaaattgtaagagactgattagagtaatatggcaataacaatgggtaagatacaatatttaatgatatatatagtgataacaatgagcgagatacaatgatacgtgagatacgatgagagacaacatgtgagatatggtgttgaacactctaatacagtgattacaacaggtgatatacggtgttgaatgatcagatataaaaataatgcattatatttatgggaaacacaaaattttttcctaaactatcctatttgcttatttttataataataatttttttttaaaaaaaaaaaaagaatttcaaaattttgtgtgtaatatatatattaatagtataaatttaaactttataatattaaataaattaaataataataatcaatattattgtgaaaaaaaaaaattttcctactttgtggagttttatttttttgataaataaaattattattaataatatgtaatagatgaaaatacaattttagtattattatatattagaataatttttaagtatattaaattaataaatatcttttttattataactcttaaaaaaaattaaattagaaattagtggcgaacaacaactatattgtctaatttctcatattatatattacctttgaagcaacggtatgtaactcggcgtgcaaattcttgattatggttaacacgtttttgtttaattattatttatatatatttatatttataaacacttcacaaagtttgacataaataatcattcaagtacacggacacgtgcgcatatttatatatataatgtgtttagtcagaactttttttcttatgggattaatacaataaatagttttaggaaccaaccgacaatattgaattaaaagcttctccctgtgttgaaaaacaatatttgtatagatatatttttaatttgtaaataaatgatatttaattaattttaaccatacaattattcaattatatttaatacaatctttatttaaaatatctataattgaaataaattacacataatatctttcgtttgtattatatataatatgtcggagaatttaaaaaatatctcatttgtaaggtatttaataatttattttaactcggtagtcttcaatgcaacatatttaaactaggattgattaaaatcttttgtcttattcaaaaaaaaaaaaataagagtgctaattacaacctcttaattagtcaacttttacgtctgaaattatatgccaaaatattttatctcaatttttttctcataacggtattcgttatagtta

SEQ ID NO: 381545 - DNA, 763 bp, Cannabis indica
ataaataaataacaaaaaagcatatcacctctgctcaattattagtaattaattatataaatgaatatatttattaatcttatcatactttatattatttatttatttattattaagtgagtgatttttgtgcgtggatgtgaggcatgcaagaaaagcaagccttttttgtgaacaagtttgtgtttgaagagggaaagaatgaggtgtgaggagggtccatactccatagggtccactttggttagctatgagttgatagccaacgtgacagaatcattgttggtttcaagtacctttatgccattcttccagccccattaaaaaaatatgcactgctcttgttttatatttttttttctcgaaaaaatattttgattggcattaattatttgattacgcaattaaaatcgaactttctttttttactttatatttggataatttagattcacaatctatatattttattttgcttttaccagcaatttttagttttattttaccatcatgtaacatgccagatacaaattcaaatacgtagacaacaatatgaaattataagtgagtcaacgagtgaaacaaattcgagaaatttgcaataattattatacagtgatgagattgtaagttgtttatatgagatattgtctcctttggtatttttctattttgaatgcccaagtaaaaaaaaaaaaaattaatatgtcgtttcctaataattttttttttaattttaaaattagaaaagtaaaaataattt

SEQ ID NO: 381546 - DNA, 2033 bp, Cannabis indica
tctctctctctctctctctagccgaatcaagatgcagaacgacgaaggagtgatcacagagctttacattccacgtaaatggtaaattccattacttcttcttcgatatatatatgtgatttgtaagattagggttttaatcgaattgttattaatattttggttctacagctcggccacaaacaggctcatcacctccaaggaccatgcgtccgtacaggtcaacattggacaccttgatgaaaatggtgtctacactggccagttcactacttatgctctctgtggcttcgtccgtgctcaggttcaactctttttcttttatatactaatgatttgtcatagtgaaattatatatctttgcaaatacagtgaattgggtattttttaggggagatgggattagtttgtttgaaagtttggacctttatatcttagaaacttaaaaggtgtgtatttgtttaagttgaattcatggagtgtcattataattttgtgtattcatatatatatatatatatagatacactctgttcaatgagttagcttctgaatgatctgaattcaatgtatttgcaatgaattatatgtttgctagtggccatgaatttattcaattgaaaatttgcaatattgggttttttaaggttgtttgagtatatatcatatcaggattgttaagtaccgtaaaaatcatatattgatgtatggttggatttgtctgcttgaaattttggacctttacaagctagaaaaacttgaaagaattcaatgtatttgcagtgaattatatatatatatgttttgtagtgaccataagcttattcaattgcaaatctgcaatatatggttttttatggttgtttgagtatatatattgtatttatgtatacttgtataacatgtatgatttgatttatttgttcaaaaagttttgaccttttaatctattgaattgcaaatttgcaaaattgggttttttaaactcatataataatgatacatgatgtgatttgtgttgtttgatctaagttaaatttcagagtgtcattattaattggtgaattcaactcatatattaatacaatataataattttggattttcccagattagaaaacacacttaaaagacatttgtgtttgttttgtttaagttaaaatttatgattgattgtatttgattgttgcagggtgatgctgacagtgcaattgataggctttggcaaaaaaagaagagtgaagtgaaacaacagtaataataataataatagaatgtaggaagaggattcaattgtctttgtgatgagtcttttttgtttagtcatatgaaaatctttctatgtttgtttttggatttatgtttggtattatttagaaacaccattgagttattgaaagcttactaagttttgattttatttaatttttcttcattttctaccacctttattatattattttatcagaaaaagaaaaggaaatcatacttatatgttattgcttgtttacatatttatatatctattatattgctgtataattttccaagcagaaaaacatagtaataacaacaaaatttcatcacaaaacaattttttacaagacttctttgtcacttgtataactctattcacaaataatctttaatttgttataaatttttgttttatttacaaaaatatacttgtaaagttacaatattacgaaagtatatttttctcagcaaaataactgaaaaataaaaataaaaaatcacaacaattattaactataaaataacgaaaaaataaaccaaaaaataaatttatgacaactataatataattataaaataattaaaataataacttattatttttactgaaaatatactttgtaaataaaaaaattcagtgtaaacataaaaaaaattccaacttaattttggtggcgtttggtaacatttttttaatcagttttttgtttttaaaagtagaaaagtgaaaacatgttctataaaactgtttttacttttcaattttataattagaa

SEQ ID NO: 381547 - DNA, 2983 bp, Cannabis indica
gtatatgtaaaataaaaatcttctaaaatttctataaatgtagagaatagagttgaatatctggatccaaaaatccacccacttggcaaatcctatcctacccaaaacccgaaaatgggttttaaaaattagagtctgaattcaggctcaattaatcaaaaactagaaaaaatcaagttacacctgaacccactcaaaattcgtacgtaattatataattttttttaaatttttatacattttttttaatgttaaacttaaaacaaaaagaaaaaaaaaaaaccctaattctaaagaattatatattattttcttcttttattttttcattttattatgaaaaaatagtataaaaaaatgtatattttcaaaataaaatgccagccttacccaaatccgaacaaacccacccggactcggttcaacctgaacctcgacccacctgcacctaaaacctgaaaactcagtcacactaacgggcgagttcaggttattaaattctatacacttgaactcgaagaccaaaatccagtaaacctacccaatgtgcacccttagtagagaagcatatgaggttcactatatattattttaatatatttaattttatcttttgtgctttctctttctctctcccattaattattttgttattatcttttttattcttttttcatttcttttgtactttaattaataatattgtatttaaaaaatataatatttaaataacgtaagaaaattatagaaaagttgatatatgatatattgtaaatattcgatataaaatagagaaaatagaattttaatgatatattttaaatataaaaaatagaaactgatgagagtggcctaaagcaaattgtttttgaagagattaacaatatatgtatatgtatgtaaatatatatatttagagaaaacataaatatattgtaatattccaaaaatttaatagtgattatttaaaatatattatgaaatatagagtaatatgtttattaaagaaataaataggtaaaattataatcttactttattaaatatgagaagtttaagtttattgtaggaaatgggcaaattaaatgtaatttattaattacagaaattttattggactatgtaggtaatttaaatgcgatatgtaaaataaaatatttttagatccaacaacattagaaacccaattaattggccaaaaatgtcacggccgtattagaatgtgtgattgtggtatatgaaacttttgttggtgatagaattaatggggatatacttgtttatgatcattttatccttaactttagaggttactttaaggtgaagtaaatggtattttagtcttttacttaaagctttatattagtaatattttttgtaagtgtattttctagaaacaagtttattgctgaatatgaagttgaattaagtttgaattgaggataaacactaaataaagaaaagtctctctctttgtggtcacccaaaaaccaaaggagcaaaagatttctttcattttcttgttgaattaaagtctcagaaggatagtttgaagttgtataagtatgtaagttattttaggttttagctttgagtttttaatggttttgaataatttaaaaaagaattttgaaagtttaggttatgtgcttaattttttggttagaatcaatataaagtcaacatttagctttgttttgagggttgtatatgggtgtggggctgctgtttttattttggagagtaagtttggagcttttgaactcaaagtttggctctcccatggtaaattttaatcttttgtgtacttttactttctggaaggtagaatatgtttagaactcatgtttaaacttttttggagtaatgatttgagtttggaataggtggggtaagttttgagtttggaaaactcgagtttttgtttcctagtacaaactggttagctgatttgggatcctgttacccggatggtcaagtatgcacctggaaatccagttaaccgtttcgagtctggttacctggatgaggccagttgcaggtgcctcagttttcatattttttgatatttagggtattgtcatgttatttatcgataggaaaactttcaattttgagtttaagtcttagactagattaaaaagagttatttactggtttacaactattgtgacataaggcccggatcgtcgagcgatttctacttaggttgaccagcacacttgaatttggacttgaggtgagaaagtataattgtaccacatagcatgtcaatatatgattcggtaattattgtttataagaaagagttattactctaatttgaaattatttttaggtttatatatattggttatctcattaggcaacaatataagagggggttattactttattttggaattattgttaggtttcttatatatcagttatctcattaaacaacagtattgacattggttatctcattagacaatggtagaaatattgtttcattaggcaaccatattataaaggttatcttattaggcaacagtattggaaaggttgtctcattaggcaacagtgaataatggttactttattaagtaacaacattagtttatcttattagataaatatttaatattaaagattatttttcattggatagtgtgattttctacttatggattaagcatgtaattatttggtaatgattaaatgtgtatctgtatttatctgtgtattgatatgaaatgtttaagctatttgttttcttgttgagtttttatgatttacgggtgctttgtggtgtaggtaagagaaagaacaagtaagggcaaccatgagttagaagtctttctcgacaaatgtacatatcgacttatttggctagcactatagagttgttgagattttgtgaatggagcttttgacttgtgtatattttgatgtaatactgtttagttatcttttgtaaaattttaaaggggatccccga

SEQ ID NO: 381548 - DNA, 2757 bp, Cannabis indica
agataagatgggtcattcttcaaatgatgaaatcgttgagatttgggggataacagagcagcttctgaagaaagtgttcagaagttgcttggtggaacttgttgaagaagtacaactacttcaagaagctcatgctattgactgcctcacttctttagcttgttgagattaatcttcctttaaagtttagaccaagttattgccttgaagagcaactcagttcaaatggaggagctggtgagaatggtggctttgatgaagattttcatgagtggaagcagtagctgaaattccattttgagagtggtttccagattaagtaaaaacattgtattatgcaaaaaatgctttaaacttatgtaaagatgattttgcttgattactcccttaaaattaaataatatttgctcataaattagaattaaaataaactttttcactctccaattgaccatatatatttttgatgcttaaatgttctcttactctagttttttatgtactcttaaaatgattgtgagtcttctgagtggctcaaatcaccaatagtctccgcatgaacaactcccattttcaaaacaatgaaaccgatttgaatctctaactattatttttctcttgacgatcttagaaataaatttaatggcagtatggcaatctacacaagttcttaggttcttgaaaaccttgattggtgttcctggtggagtagatatgataccaaatgccactgcaagcttctcactgtgataggagaggttttgctctttctgctcttcttctacatcatgtaacacaaaatttgtgttagggacatacccttcttcccttatcctctttgaaatctttttcaaaaactcacgtatttcattatactttggatgggactcatcccctactgtaaacacataagtttccctcttgatctcaatccagctcaaaccaggtttctttaccacccttcgttcgtccatgatttttctgactttcgccacttcgctccacatgccagcagtagcataaatgttagctagagtaacataggtagcaggattttcaggctctatcttaaacaatgcttcggctgctcttttagcaagctcgatgtttccatgaattctgcaaccaccgagtagagaagcccacaaatatttatcgggttttccaggcatgtcattgataattttctcagcttcttcaaaccggccagctcgggctaataaatcaactatacaagcatagtgatctgcagtatgttttaacttgtgttttgtttttattgagtggaaatatgcaagcccttcatcaactaatccagcatgagtgcaagcagaaaggacacctacaaaagtaacgtgatcaagctttatacctgattcgagtaacaactcaaaaatcttaagagcctccttgggctgaccatgctgagcgtacccaacaatcagtgaagtccatgatactatatctggtttaggcatcccattaaacaccctcttggcattctcaatgttcccacatttacagtacatatgtacaagtgcactggctgcaaatgagaacgggccaaatcccactcgagtcatgtatccatgaacctgcttaccgagttcctcagccacatgatcagcgcaggcattcaaaacaccagcaaacgtgaagtcattaggcctagtacctgaactcatcaacttcgaaaacaaagcaaatccctcttcccttgtcccatcctcaaagcatctatcaatcatagccgtccacgaaacaacatctcgatcctccatcttatcaaaaatgcacctagcatcctttatgctcccacatttcccatacatatctgttaaagcactccaaacaatctcatctgagtccaaccctgttcgcattatgtaaccatgaatctccttccccaaacgtaaacttggcatggccgctgaggcagccagagcactagacaccgtgaacttatttgatttcgaaatttgatttctttgcatcatcctatacaactccaaagcctccttaggccgatgctggcgaacataccccgacatcaatgaagaccaagaaaaattatctcgttcgggcatttcatcgaataatctcctagctccatcaagctgaccagccttagcatagccagaaagtattgtgttccaagaacacaaatccctatcaggcatttcatcaaacaccttctgcgcatcctgaagacagccacatttagcatacatatcaataaaacgattatacataaacagaccgggcacaaacccagaacctctgatgtgatcatgaacaagtcttccctcctcgagagctcgttgttgaagacaatgctgcaaaagggttgagtatattaaagcagaaggtcgttctatgtgggtgagtaactgaagtgcttcagttaaacgtttctggttgcaaagaatgtccatggcttccttgtatctcttgtccccgcacaatcggctaatgaggccatctttagcattgaatttgaagaaagtcttctgaggaagaggtctagtcatctgggtatttgatgagaatgagaaattggtcttaggaaataggagagagagccgcataatgggatgattttttgagtttgagaaatttcatagtgcgaaactatggcagttggtcgttggtgtaacaaggagtcgttccaatctcggttttttcatgttacagattcgaacacccatttgagttctaatttgttttttttgtttttaatgttagataaattaacaa

SEQ ID NO: 381549 - DNA, 781 bp, Cannabis indica
atgggagcacgcctctgtagcagggcctggctgcccaggcttcatactgtaaatcgcaggatcgggattggttggaacaccagggacggtcacaatctcatgcaggggtctgattggaatcactttttcaacgactccctccgccgtattctcaaaaggggtaatctcgcctatgcccagaagttcgactgccggaaagcgattcatgactacttcgccggcctccggtctatcctccactaccacttcaacttgccttcttttccccggtagttgtcgcttgagttccctccattcagaggcctcaaccctttgtattttcctctggagcaccatttgtttttggactgcagggtcctttaactctttttgttgagatatccaatcgttgaaccattttggtagtgggagatggaaaggcgattttcctttgcatcctcatccatccaagtgccatacattggaaaaaaaacaccattcgcatctttgatgacagttggggttttgaaacaataccgaaggtcgtgagctagagctccacatttaaagcatagtttcggtagtctttcatactggtattggatccacagatccttaattcccttcctcctcaagtagaaacctgagaacagcggtttatttacatcgaccgttgcccgaaatcgtaacgtccccatgccaaacgaacctctctcaaagtttttctcaatatatctaggtagctcataaactgaagtttttctcaaaataaaataattattcattaaagaaatatatttat

SEQ ID NO: 381550 - DNA, 3325 bp, Cannabis indica
gtagtatatcgatatcacttcatttgttctatttgttacttggccatcaatagaatttagtctgtacgttttctttttctaataatagaaaaaaaaaaaaaaaaaaaaaaaaaaaaaaaaagacagaatagatagcaagcaaaggtgacgcacaagaagttataaaagcacttataagcctctaacattaacactcaaaaggacagagaaaaaaacaagtttgtacaagtatttaatcagtagataaacaaacctctttcaattcagtcccaggaagtggctccccttctgaatcacatggttgataactcattgactcattccatttgccagtcatcaatatttttggttcctcgctagaattataaacatagccatcaacttcatagcgaccagcactggaaaacaaccacaaaggcatcagataaattgtgaaaatcaaaagagaagtcaaaataaatgttcatcaatacacatttagatagtatatcaaaaggccaaaagttaactataattcctatcattgggtttttttttgaaaaaagaaactataatcttttgtcattttttataaatccaggacatttatttttaaaatggcttgtgtgatcatatatcagcaagcttcaatacattacattatgtaaaagacaaaaagctacaaagagaaggccttcatacccaaaccatccacaaggctggaaatatagtacaactttgtctccagtagtcaaatttgtcagaaccatctcccctggtgcatcgatccaagtacgcccaaaaattaagttgttgactttagaaggaggaggtaccaattccaggactacaccatccctttttaagactagacgtgtcctgcaaccaatatattgcaaaatacgcaaataatttgagattcaacttgctcacggaaaataactatcaaaataaatttaaaaaactgcagctataatattttcatcttagcattatgtctttcaaatctgaattggttgtataaaacagatgtttggataaaataaaaagtttcattgactcgttaacattacaagcaaaaaccataaatatgccaagatgacaatcgagtaatacaagtatcgaagaagtctagatttgtcgaacaattgtccacaaactaagaagaggggataaaaaagcgaatgggccagagtatgaagtttgcaatgcgtacatgtactagttagtaagttcattggtaaaaatacaattcaaaacgtgaagctataaaaagaagaattgaaaacactgaaagtataaagtccattgataagaagtattatgtgataacataatggagcaagacctaaaaagattaacaatcacgttaccttccaactggatagacatcaattgaattcccaagaaacttggttttcacctttgaagttatgtcataagcgaaatgctcattttcggcatgtgcagcaccaattggagggtgatgactaacctgaagttatatagaaaaggcaatgaaatttaacaactgtaaccattttcggctcatgtgaaaaagagggcgagcttcctaaaaaacacacctgctctgcaatgaatgagatgccatgataattagcaagctcataagtctcgccaagaattggattaaatggcttccatgttcgattaaaggcagtataaacagatataaaccatgaagctgcacccaacaatcttaagttagccaccgtaaaatgcatgcaaaggcaagcagaaaaaggcacgtagacagagacattcttaccagaatacatcattctcatataaggatcctcacttttatccgctagttctaagagatgggcatactccataagctgtgacaaagttatttataagatcatatagaaatcacgttaccaaagtagttcaattacagaaaagcaataacactaacctcagacattttctgcagcatagacattggctcaaaaataagcaccggtagtgtaaccattgatgtgacatcagatcctatatacttctgcatcatcttccagtaactatctcgatcctaccaaaccaagtaataactcagttattaagtttaagtctgactaaaaccataacataataaagaacaaattgagtacaaaatcaacaaagtaatacaatagtattacctcttgcttccatcttcctttcgttgcttcctcttcaacatcctcggtccctccttctgggttaatcacttcaagcccttcataacccattaagctgggccataaacaaaaggaaaaaaagtgtcaacaaactagagcttaatcctaagtaattagaactacccaaacgaaaaggccatatcctttcgaatacattaccatagagatctccaaaatagaaagaaatgaattgaattgaattgaattaagaaaaaaaaacataaagatcataagctaattgttacaaacagatagaaagtgaattttaaatacccagtgactgatttcgacatagcgctaccaaagttggacagaccggaagcgatcgaggcgaagaagcccgcgctttgtttcggatcctttggtgccatggtcgatggatcgtgaagaagctgaaccagaatcagtgcgatcgagagaaggagatttcaaacttcaaagttcaaatcgagagaaatggagaatttaaaaaagaaagaaattggaattagggatttcaattttaattttatatattaattaaataaacataaagaagaaaaacagcgaatgagagtagtgggtttcgttggcggttcttggatttgaagtcaaatctatagctacgcgcagaaggaagcgcgtggtcatgaataataatattctaaagtggcggctcggctgctgttattagtgaacaatttgcttcgtgattggctaagccggccaagcctacactcgctctcacgcgtttttgcttttggaatctttaccgttggaaatatctgtttgtcaacgtggcatttggtgggagtttattcttaaaatacatttcttttgtgagtagagtcctcctaattagaggtgttggtggtgcggatggtgaggtttttgattattttttcaaaccaactcgcacatgcggtttttctaatttcccaaactgcactacaccgcgaaattaaaaacccacaaaaatcacaccgcaaaaaatagtgcagcgcagtgcgttttttatagtttatgtggtttggtctattactaaataattaaactatcacaaatacaacaaactttgagcaaaacttgtcaaaataccataagacttgaaaataaatataaaaaaaaaaaataaaataagtgtcaacaatacaataatt

SEQ ID NO: 381551 - DNA, 2010 bp, Cannabis indica
taaataaaataaataaaagaaaaactagtctttactaggaaaaaaaaaaaaaaaaaatggtcctcacaacttgtctgaaaatacatattaactggagaaacataacagaagtgaactttaacctgaagaagagtcaaaagtctattaaaaaataatcaaaaacaagcttttgctacagagagaaagggaaattaatttaaaataataattgcaatggaccaaaaaaacctccaactacatgcccaatgatttctttttcctttttctcaaatcatacttggaccttaacatgactcattttactccatcctcttactgatttatttaattaaccaaaaaataaaagggtagtaaataaatgaagaccacaaaaacataaatctaacatgaaatcattcttatgtttcttttgtcaaagaaatcaatcttataacgtaaaacgacataattaatttaccttttcaacttgtgaattgggtagtgcttgaataccctgacttccacaagctgctaacctgtaaaacagaaccaaggaaccaatgggagtgaaaatgtaaaagtataactacacttatttctccttctgatcatagtttgtaagaagtacaaaaggcaaaaaaaacttagaaagataaacctatgcatccaaacggaatagaaaaagaaaaaaaaaaaaaacagaatcaagctttacttagtccacacattcaaatgaatcagaaaaatgggcatttcttaaactaaactttctacaatccaccaaataatggactgagttattccggccacccaagccacaaacatatcatacaataccataccataccaaaccaagccaacaaaacaaacatttattaatcctataacatatcattgttttgagcaagaaagaaaacaaaagaatggtttttgagtgacaaagcaaaccttatagccatagggtcttggctctcgtttggtggtttttgtgttggcaaagagtaaagaaaattggaactgagaaacttcttttggtttaggaaattatcatgagcctcaacatgttgtgaccaattcacttttggaagctgtactttctccgacccttcttctccccagttgcttctactacacattttcagtaaacccgccaaaaaataagctcaaaataaatattataacaaaatcacattaaaatagaacaacaaatacatgcaatgcatatcagagagtcactgaatcatttttctgacctcatttggaatcctcaaaacatgtcataaggtcctccaaaattattattcccttcaatgaaattcacaaaaacaaagcaatggagaactattaaatcaaacaatcacaaatattgaaattcaagaactgaatgccgatgagaaaagaaatgaccgtggcccatacctctgataatagaggaaataatttcaactttcctttgaaaaatgattcaaaaacttcaaaaatggaaccctagaaatgaaacattcagggtaaataaatcagttttgcggagaggaagaagaagtgatggtttgtggacgttattgccctcctggtagcgagcactgtgggcagagagatatggagggagaagaattgaaaattggaaatggcgggacattttcgcctcggcattttttatgagcaaatttatatgataaactcaccgggagtggtagcatcatgtaacctctctcacgcacagtcaccacgcacgaacactgggttgcatattttatttgagtttttacataaatatacttatttttaccttattttttatattttttattcttcacttttttttttatacattttttacaaaaaaaaaaacaaacaaaaacaaacaaaaaaaaaaaaaaaaaaaaaaaaaggtaggaaagactttattgtagtgtcacaaatttagaaaagaccatgcatacaaatacaatatataatgttagggatatgattttgtcccgtcattgtacttttacggattgtagccgtcagatgagggagttatttgat

SEQ ID NO: 381552 - DNA, 3917 bp, Cannabis indica
gtactagacaccactggtgccctataactatctctaaattatattagaatgaatatttttatgaacacccgagcaaataaagctaatagagccataaacattagtttattaattataataaaaaggaagaactaagattgaaacaaaagatacagctagagacagatgtcattgctgaacacgatgagacattccaaccatgagattatctactttatcctttgaaatcgatatttacaaagaaaaggatgagatagagaaaaagaaagatagaaaccaatatgggcaccaccaaaccaattagaagagggtgatggtagccaccatattttaatgatgaaatgaattggacgtccacacgcaccaatttctcttctttaataatctttttcatacatttaaacagaggaaaggttttccacttattaatttttttttaatcacattccgctgaatcactctccctctccatgcaataataacacatacaactcccaagaatttcttgctgcctattacaaccttaaacagcttcttcagctgaactcaatgcaggacctgttgctggtgctgttgctggtgctggtggcgaagctgctgctggtcgtcctgacgctatagcaaactgcaaacccctacgttgtccagattgcaaaacaaatgcaacttgtgttgctgccaatgctgcagcttcctgtttagacaaattgtataaatatattaagacaactcagagttcaaataaaatttacatatgaatgaacatcaatctgaacatgctaagtgacaaaatctcacctgtctttgccttcggcgctgtaacatactgatggcccaagccatgatatagcagggtagaagaaagccagcagcccggagcaagaaaagctgcaaataatcaaatttatgagtaaatgtgaacttaaattgatttgatcttacaatgctttagaatgcctactaagtaaggagaaagtcaaatgcaatcccacttacagagaaaaaagcagaagtttcatcatctgcatcaggatctgtaatgcccaatgcatgtcgcaagagaagaagggccattaactgccaaaaagataacattaaactccagctagatctgtttaaggaaactgatatgaaaggaataataactttaaacatttagtgaatcactaaatgttttaaaagaaaaattaagaaaggcttacaattaaggcaactgagcggcagtaagcagctccactggcactagaagcagcataatcgtcatactcggcttccagaaagtgacgctctgcttctgcaattgccaataggcgaggatccaattccaaaggagtaccagatatggtccagcctccactgcaagaaatatgcacgagtcaaaaacatcatcctttctcatatttcaaacatcaaaacaagaaaatttcataccctatgtcaatggcagtttcatcagggttaggaggtggaggaggagcagtgtaaccaggttggtatggctgcatcaatgattgaagaaacccattataaaacattcaaaattttggaaaacgattgatacgaggtgtagagaaagaacatggaatatacctgatggcagatctcacaaattgtatctcctttctcattgcaccagtgctgaacacacttcctatgagcatactgaacaaaatatagtgcaatcagtgatattcttagtcaagatgacaaatgataatagattagaccttactgcaagtaaatgaacagaaatacaaggaaatgttaacaaagtcctttcaagacaatttgatggttctaacaaaatcctctaaattggaattttcaaaaagaggctccctcctataaactagaaagtttatttcacccaatacagaaaaaatctttagagaaaaacatgagtcaaagacaagaacatgacaggacaaaatgattcttaggaaacatcaccaaatgctagatgctatccacattcctgaagaatgctgaataggaaaatgaacttaattggtgatatgtaaatattaacaaaaaacactatgtggctacaaaaaacaaaaaattatcaatggcaaaagtcccttcttgagagattgctggtgtcgtcatactcaaagaatctaatcgatcaacttattcaatagatttttcaatgaacatataaacaaaaattcaatagatttttcaatgaacatataaacaaaaagagtaacgaatgccttgtgttattacgttctaaattaccataacctatataattgttttttcagagtacaatgtattctttaattttatttttacccccagctctgcgtcaagatcattaacatactatttccaatcccaactctctctattgtgtacaacgtagagtccactatcaccatcaatgcagcaagaacacagaaaaatggaacctttagaaacaaaatcacgcaaatccaacataagcctaacacctcaacacgtatatagatccaataacacattttagccatatatatttacacataaatatacatacatatgtactgtttttaggggggcctatagatgtatataccttaaggcttccgctacaagcacaaggcgtctccaaatccttgatgctatcctcctcctggcatatacgacattccgctgattgaatcagaggttcctcctcacccaaatcttcatcttgctccaacattttctcctccgtcacggaactagatggcgcagctgcgttcgagccaggtccgtcaacagcagcagcaccaccagccgacccagaaacaatctcagacgagtccagcgccaccggttgcaaagctccaggcctaatcagacggtcaacgaacagcaccaggtggtcgctcattgctttatgaaaccccgaaaatccctaaatcaccgcattgaacattcagaaacccaaaattgaccaaacaaaaacaaaaccctaaaatagaagacgagaaaggaaacaaaattccccaatttaagcccttgaaaatctggatcacgctggacagagcagcggatcagagatttcccgagaaaatcagagaagaaaatgaaaattaaatataaggcaacgtaaaacctgaccttgaaatcggctacgaaagcgcgtaaattactgagcgagcaaatcggagaacgaaagagagaaagttcgtcttctttttgtttgttgttttggctgtatatttagatttttcctttgattttaagacaaaaaagtgggttttgtgctatttatagcggtcgctgtttgaattcatctaattctaacttctaacttaacaaagactccaggcgaaggggtttggtggcttattcccaacggcattgagggtaatttcgtcaattcatttatagttatataatgccgcataaactgactgaattattttttttaaaaaaattcaattataaacggtcacctatatcctattataggtgacacttttaaactgtcggaaagtccacattaacgacagttttcaaccgtcgcctattttgaccgttttgcgacagttatataggcgacggttataaaaactgacggaaatactttaaacgtttgtttaaaaacgtcgggaaaaactatttttgtagtaccactactacaaaggtcagaattcgcgacagttctaaaaatactttttaggggggaacttcgctaaaaaaattaagtaactatttaaaaccatcgaaaaaaattagtattcccgacagtttataacagtaataacaggaataggcgaagattttaattggaattcaatttttaatgggcccttatgttgatttttatgccctaaataaaactccatttcaatgtaatccattttattcaacatcaataaagaaacagaagtatttttcattcatttgtgtatgttttggttcatcttatcaattgcttg

SEQ ID NO: 381553 - DNA, 753 bp, Cannabis indica
tattaatttaaagtcgactttgcatggttactaatcaactacaactaattttcacaattagaacaaattaataataatcatacgtacttaattaattaataattccagaattaaattatcgtatttttagcaggtttaagattctgttgtacggatcgggtttatattgggcctaatgtcgaccttacacatcaaatttcaaaaataccactttttgaattaaaatttaatatttaccattttttctttcaagtaaattaataaaccgaacaacttttaaatttttaaatcaaatctttctactaacaattaccaaagtaaaaacaaataaattcaattatgcaaaacaacgtcagattcattacatatccaaattatcaaaatacaatttcagactagtgtcttataccaaaatatatatttaatggtgaatagaatatagatctatttaattactcaaatgaggcattttctcatatacatgatatacatgaacaaattaattgggactataaactaaaagcatttgttgggttcatatttttgcaataaatgtgtagtaaatccactacaaagcgtggcacatatgtgagcctcaatttcatttctattgtcgttcatgattcaaattcctcttgcaaaatcaccatttaacctcttgagaaactagtgatactatcatattttggaaaatatatatatttcaattttaaaatattttgtaattattgattgaactttttgttttgttaa

SEQ ID NO: 381554 - DNA, 1871 bp, Cannabis indica
actcagactccgcaagacactgaaatttctttcaatgatcttcataaatgccatttgagtattcttctcctgcaagactagacgttccattggataaccgggacgtgcttggggttgaattcgaataggaagagtatgcagaagcagggctgtttcttgaatgccggctctgtgcagctgtgctgcttcttgtcaccttttgacgagcttttctaccctgttgaggtaaataagaaaaggaaacacatgttgatgaggagcttctaaagaaactcaaccaattgaaatgaaaaaccaaatgttggaccacatcaaaagatattggcattgtaggactatctaaccatacataaagaaaagattacctttcccatgcatttctctaaatgaggtgcaaatctcccagccatgattgatcgaccgcagttcatgcaatcaaatatttcactggctacaggagggtgggtttgtccaaaaatgtcgacaatgtactttccattggcttcattgctattacttggatcagcaacccttacccgtgcttgagctgataaccttatttcttcctcttcttcttctaaattgcgatcaagtcccaatcttgctattcgatgacactcagatgcaacgtcgacaataattgaatcaaggaaatcttcgaaaaaatgagatgaaagctacaataacaatccagcaaaacaaattagcaaaagacataacaaaaaggattgttctcttttggatcaagttcattataaccattcctgaagaacaagaaaatcaaggtcctctaacatagtagtcagtttactcccatgattttttttacatgatagtcaacaaaatcaaaatgatgttccaaatttctgagttactagtttcttcctcttacaaaagggtttgtttccttaatcaaaacacaacatttaatgttatagccagttcaatctgtaatgaactgtagaagaacaatagcagagacactatgataagacaaactgccaaactatagtgtaatgaaattcaataaattgatagaataacacactccattattaaaatgccacacaaccaaaacggcagagaccaaatagaagtagaactacaatgacaatttgaggcttgaacttttttttttttttttgaagctaaagttttcagtcaatatcatctcactgcattgcacatagctccaattgaaaataaataaatacaaagatacctggtcatgggaagactgattatcttcattggccattacacaagaatttatcctcggataaaaaattgaatgcgccaagaaggtgcgtagccctgaaacaagaaaaaactaaatagagaaaaatgagattctaacttaacttcacatactcgcatacaaagcttattgggggcaaaaaaaaaagaaataaaatttattaaaaattacaacgtttaacagccatgaaaattgaagaaaactaatataaagcatatactcacatcaaaattttagttttacagatccatcgtagttataattaagcattttcttgggtctgaaagagagaagagattgagaaatcaccgattgatgaaacgaccaagaacaaggtgatctggatctttatatattttctaaaaatcagaagaaaggagttaagagtaatagtgaggtttttcctaaagctctggtctatggcaacccggagaaggagatgattggaattcggaagtgggtagagaaagatccagtgcctttgcgcctattttctttttcgaacaaaaccatttatattttgacatgtgtcaattaagaattagaaatgaaaaaaaaaattccgttgccgggaatcgaacccgggtctcctgggtgaaagccagatatccta

SEQ ID NO: 381555 - DNA, 1263 bp, Cannabis indica
tatatatatatattttttgagtacattaagtataagtaggtaaaagaaaagtattaaataggaggagcttgagatgaaacgcatatataacaaaggggtgtcgagtcaagaacgaaccgcatgcatgtttgtgtatggaagaagaagatttctgttttagccaaaagtagttttttgtgttatttaaggatataacagcttgaagaatggtggttcgggtattgactcggtcgacccgcgaggtagtctcagctctttattttgttgaaaagaaagtgggacattggttggggttagtattgttttggtgttgttttctttgtatttcaatgtcaactactttttactgtttgcttgatttctcgaattttagtatgtttgaataaatatatattttattttcttcattttggtggggaattgactttagaccccactccagcatatgtacaagattttgtaccctttccaagcttgtaaaaacttcaaacccacacctcattcacccatgaacagaaacaaacttactttaatatgaaggtttaattctcttcttttgcttcaaggcaagaaagatgatcaaagctaagacttgaggagagcttcaaaggagtgaaaatggaacaaaatgagagtggagatctgagaagaggaatggtgttatgttgttatcgtgtttgcttgtaggagaagataaagaaaaggctttctggtttttgatgaaaagaaatgttggtttttctctatttttgaaccaaacaagaaactgaatggtctttcaaagaaccttcactcatgctcccactaaatgaccaaaatacccctacttgatttcccatttaaatgatgttcaaggcccactttagtaatgtcctcatttaaattatttaaataaagtttgtgacctaaaaaaatgtatcaatttaaataaatttccaatttgtcttttatggtcattttccaatttaagataaagttgcaatttcctcttttgacattttaatttataaaataactatcggatgaattatttatagtgaaaattagatgaaatatggattttgtaaaaaagttacaaaatatgatatttataggtttgtgattcttctatggtatttttttacattttagattttttatggtatttgatatgccatatttttgtaaacttattatccaaacccatatttcatatttttatttctaacttaattagttttatttttttttttaagtttattttacatttacattttaggattt

SEQ ID NO: 381556 - DNA, 5919 bp, Cannabis indica
aaaacgttcctaagcttagtgtccaaaagggttagctaaactgaatcttgttctttttggcctcgcaagcagatgtggttaaacctggaagggacttaagctcattatagttgtgtgattcatatttgacaaaactgttcaaaacaaattgaacatttgatttatatcatgtttccattccaatttacaacagaattgctcctaatcaacaagcatggatatgctgagaagcgtatagtgaaaaacgaataaaaccattcattttagtgctttcgattaaattaaacatcacttcaccaaaatggttaccactttcgacataatggccagtcattctgtttctgagacctcatcctcatcctcctctaatatgtagaccaacgcacgctttcttgcagcaaagacacaagccacacctcttgatgctgtgaaaacaatgagcagaaatgtcagaaaacttgcttctgtttttgtgttgacatgcaatcacaacaacctaatataactgactgacaaaagctaaggcggactactggctgctatctaaagatttgttgacactggcttgtttcagcacactagtttattaaggtctcgcaaagcattactatgcaaaagcaattatgcaatacctttttttctcctctaccaagaaactgtaaagaattttccatttaactctgcgtgtgtattttttatggggcaagtaagtttatcttcaatccagaagggcaacaaaaatgcacataagaaacatttcagcaatttaagttttattttaatgaagccaccggcgatggaccaaatgcaaagatactttgttgattgtgttcctgaaacgaaaaatcaaccaatttttttttgaacttacagctaactgccagaggagcaatcacagagtggggaatactccgaaccttctcatcctccatttgcaagtaaataatattgtcctgtacaaagaaatttagtattatacccaaaaagaacttcacctgaatatttttaaacgaagagaaacagaaaattcatcagaggaaattctgttctctcactaagatacctcgatgaaagacgaaaaattggacatgatacgataaatagcatgtgcaatttattgaagatgacatgctaacgaactaataaaatgggaaaaatagacagaaagagagagagaatctcaacagggaagaaaataatattcttttatgcgtttatagtaatatgtcaaagaaggcaaagataaagattacctttagttcatgcaacttccaaaaatctacacaagtgggtgttgagattgatgcaaatggaagatcagctgcttgcacaatcatcatacaagcatctccagagctttcagagctggtagttgtatcattcaacagcaatacaatttgactttcctgtttaattaaaagatgataatgctcaatataagacattaaagatttacatagtagatctagtctagatctctaccttatacaaggatatatccacacagcaatagccatcaggaatgtgcaacaacagagcttccaatgaagtataacccttcttcagagagcttgagtcatgagtaaaccccctgactatggctatacagtttgcaatattggagaaagactcttctggtatttggaaagatatgaaatccacaaaactgcctcgacaagtctgctgataagagacagcttgagaagaatcctgcgtaggaatcatttttcacagaaaaaaaaaagaatgagtacaaaatcatttatgcaaattacattgtacgatcatgcaagttaaaaactagaataaaatatcatagaaacaatgccaattactggtagcaggtacctcatagtaagatatggaagtaggaatgtttagagatactgaagaagggggaaggggggcaagcggcaataaatccacacaaagtatctttcttgaaattgaagtaaagggcatcagaaaagcctccttgaaactgaaattcaatcaacaggaaaagtatattccaaaataaaatcactgattgggagtatatacaataacaaaaccctgagacgtattttcatcagtcgaaaagctcattattctttctatatgaacaatgagagccttggtatggtgttccaggttcagaatattgatagttggctggcaaatttcaacacgttaaaattgggtaaaagaaggagaatttggagcagtgtacctagactccatctgatggaattgtttagctaatgccttcgcagataatcacaaatctgaaaatcccccaaagtgagacaattctttgactctctgcattgtttccctgaggaattagaaacatcgcattgtttaaagatctgacaggtattccaaacacacagtatatcaccgattgctgaggggcaggaaaaaagcacttacagatcaatatcaataatttgatcagcattggacgcttctaacaattgcttaacaggatcttgatcatatagaaacttcaggaatataacaacaagttcactgacaaaaacaaaaatctgtgacaaaacaaaattatatgccaacagctgattgaaacactaaggtagagccaagacaaacctattgtacggtagaagctgatcactaggttcttgcatcagtatcctaatgcatttcaaaagccagttgaagaaatttgagaactgaaaaaaattaaatgaaagatattatcatgaatccaaaacaagaaacaaaatttatgagagaaaataaattgcattcatatgaaattgttaatccacaactgactaatttctgaaaaaacaagcaggctgaaacaggacacattcattattaccccctctccttagttgtcttgtttttcgttaccgttatataaatggaaatacgattactatgtacacaacagaggggcagtagataaagtgatcaggtccattgtttgcggtatctaggagttaaattggtaaagtactctccctcttttaacaggactggtataaaaataaatgttaaacaggcttccttagttactggcagattcttgatcaaatatcattcagctaatataatgtctttaatttcttgcgtgataataaaagatgaatatgaaatgatggagcagaagacttcatatttaaaatgtctgaagtaaaatgaagcctgaacagaagtaaatcaatggctcatcctgaaacattattaattaggtggatccttagaagccatacctgctgcaccacagaagaaagcaacctcaaaaaccattcaacttgtacaattatcattccaactttttctgctgcattactgatgagtgtctcatctaaacctatgctctggtagcgtgcacgccatcttgaaaaacctcttagctctccaattcggaatccaataatttctgcagcaggctgaagatgagattttttatttttcagtttctactccaactccttcttacaaggaacatgacagcctattgttaaagcaagaaactcctaatcgtttaataattttaacaacttccacacacaagtagaaccatggatcaaactgcagaaaaatacaaacaatatccacattttgaattctacagtgttaccttctcctttctttatttcttttatttattctgtattctttattttatatgaatgtttgatacctttttaaataggcacaattaaaaggcataaaatttacatatgaatccctaacatctaccaagtaccatgtaacttttctaccatattcgtaccatgttctgagaactagttacaagaagtaaaagttagttcttctttcccttcttcacatgaccaaaatgaaaaaccataccaatcatgagaaaagttacaataaactacctggagatgatttaagacaatatgctgaagttcttttccagcaccacagacaacctttgacacccgcttcaccccctgaaaaatagtacttgctgaatcaaatgtgcaagtatgtatttctgttttcgcaaattgggattttaagtaagatatatataccacttcaccaagagaattaacgagaaattgatggattggtggactggtccgagcaccaccaagaaggcttaaaaactcctcttgagaagaggaatcaagtcctatagcaaagatggaaccaataaatcaaaagaatagttatgaattaggatagagaatatatatctaacagtacccaataagttaccatggctaacaattagatcggatatagaatcaaacttttcatgaaaagtgtgcatagcatcagaccactgtttggacataattgatagtgacgctcgaataacctcagtcaattcttcaatgttagaagcttgttgagccacttgatggagttcatttttcctagatcagaggaaatgcagagtgagaaaggaaacggtgtgataaatatagttcagatgcaggtagtaagagctgagtagatataacacttggagaactttatgccagaaagaaatatacaaagaaaaaaaatatcattctgttgtcgaatcttctttgtttttttcccataaaagactattaaatcaagactgcaaatgaacacagttagaaattggaggagagatttcttccatctaagaaaggtcatcatgtagcctaaggcatgctttgtcaattcaaatgggccgcaacgttaaagttgctattaccatgaaaaaaagtcctagaaagttataaaatctttatatcagaaaagaataacaccgaattcattatgctgctgaatcttcttattcaccttgtcattgggaaagaagaaagaaaataaacagaataaaaggaagaatgactatgaacgaggcagaaattaaagctaccccagcccattcaaggtaaagagtccaaagaaatgcttcatgtgctaaatttccaaagtaacaagtagtgactatagtaacagaacaacgaaaaagacttgtttacaaaggaatctaacagccaaattggcattctaatgctaaaatggtagttttacttgtagataggagcttctctattatatagaatcacaagctgatgcaaaaataaaaataagtaccccctcccaccatttctctttaaagaaaatcttataggcttcattacaaaatctttggtaggcgtatttagaacgggcgaacataacatatttactacaagtttgcaacttccatatatctttagataaagtggtgattgcatgatctgtacatgtctatatcaacttacttagtgagcatgaagaaaggaaatcatagactaaatataactacagggtaaaaaataaaatacagtatttggacctcacaatttctatatcaaagttacctcttccaaaatattgaagtatcaagtgttaagcaatgcaatccatgtataccatgctcagcaattttgtagtttactgatccatccctgttattaactaattctcccgagcacatgaccaccagacgacaaagatcttttgacaaggcaacctaatgcaatggtatattagcttggtcaataagactagttgactcttatctttatgatatatattccatcagatcatatgcatttttagtactttaacttctataaaagatttgcacccgaaccttcattgatacatgcatatatctaaagaaagtgaactaaacttaagtatgaacatcattaaaattacctatgaaaaaattccaacaagaacaaacattttgcagtaaatacatctttccaaagatcacatccacttgaacaatggacttaccttgtaaatcgaagcattttgaagtctgcattcggcgcgtgtatcagatgagggaacagaacactcatgtatgttctggcatattcacaggtttaaatgattcagttgacatcacatgcaattaaatgacacattaagcataaaaccccactt

SEQ ID NO: 381557 - DNA, 3224 bp, Cannabis indica
gatgactatttttaggatcctcagattactcggtctcggatgatgaacaattttcattttaaatgatatgtatttttctatattttttttttagaattaatatgtatttttctatatgtttcatattattgcaagactaatttagttatactataaaaataaaaataaataaattatttttgttgaatctttagtaatggtgcaattaattaagctacatttcaatgtaatgtgatatattggagtgctccatgtgaagttggacgaatgtgatgtggcaaaagagaagatgttattgggaggcagcccgaagctaggtccataaaaataagttgactccactacatagctatgtccctctttatttcaacaataaagtctttgccacttatttttaaagggatatttacaaagtggtttgcacttattatttggttttttttttttttttcttatcgaagtgtctgatacatattacacaagctgaaattggatctcaaaacttcactaactccctacgcctagctacttgagcaagcctcaagtagttatagtggtttgcacttaacactaaataatttttcatccatataaatattgtaggggcaccaatcataaatattgagtatgtatattacatgtttaaaataaataaaatatataataaaagatagaatataaaataataataaaaaaaaactgatgtatgacgtagtgtaaaaaaaattgctctaaaatagagaaattgtaagactgcaaacaattgcacttgaatataattgttgtatatggatacacattatcggttcaactgtttcgcctcataatatgtccccagttatatagctactggctagggtttattaatccatatcagtggatacattatttgatttgatgaagttgttttttttttttttaaatttgatgcgattttgttagataaaggataattggtcatttaataataacaaggactagatatgaagtatggtggctgtggagagataagtgatcaactttaatcataattgcatggcggacccaggatttaagttgatgggggcaacacttttttctatataagtgagggagttgttttttttttttttacattgtataacatgttaaaaattgatgcaaatttatattttagtattaaatatagtataaagtaaaaaaataaccataaaaatattaggttcaataattaagaaattaaatataagtattattggtagaggttcaaaaagtaaaatgtaaatactaaagtaaaacatgattttattaagattagaactcatttactattataccaaagctttcatatatagcacttttatttataaatatatattgtaagtaactaaaatgcatatatatttctttttcctatttttttcaggggcgcccgcctcacctctacatgggtccgctccttgtatcagcttattcgtgaatatgatcgattaaggtcaaattatgaggcgatcgactttctcatcgatcacactaaattaagtcatgtttttttttgcgtttttatactaatttaataaactatcaacaaatattatttatatacatacgcaattcaactataatgtgagtagggaaaacaacccactacccacccatggccaaagctgtatgaaaactagactatgctttactttttcaggaatatggtctgctaaagatgtatcatcaaaaacaaaacaaaaataaataaacaaataaaaagccagcagacgactaagaacgttgaattcataaaattattgataaaattgcaaccccacgtccgtagatctatctatctatctatgtaatatggcctgattctcacacacacgtgaaagacatctggcagtttcccacattgtccacttggcactacatgataggttgatttttcgtcgttaattttgtatcattattggtgctatgtgatacacaaagttctcctatataaggaaaccaaaccccactaaattgtttggcaaagcaaaagcaaattaagacaaacccacatatcacaattcacaactcaaaactcaaaactcacaagttattatatattactccattcctttgtttctgagaaccattagagaaaagaatgggtgccgttgtgttaaaccagagtgtacacataaatcccagcaaagggcctcaaaaattaattaacaacgatgtgatcgaagaaattggagggcttattaaagtgtacaaagacggaaaagtcgaaagaccagaggtagtgccatgtgtcactgcttcattggctgatcacgatcaactgggatcagcagcagtgatttctacggacgtggtcattgacaagtccaccaatgtttgggctcgtttttatgttccaattttggctcagaaagacaaaatcccattgattgtttactttcacggaggtggattttgcgtcggctcggctgcttggagctgctaccacgatttcttatccaaattatcagcccaactcagctgcctaatcatgtccgtaaactaccgtttagctccagaaaaccctcttccagctgcttacgaagatgggttcaaagctctctcgtggctgaaacgacaagccgtagcaagaaacgacagcgttttagccagatgtgacttctcaaaaattttccttgttggggacagtgccggcgccaacatagcctacaatttaaccactcggctaattaactccgccgaagccaagagactcaagcctttgaggtttaaaggcagtgtcttagtccagccattcttcggaggggagtcgaggacagagtcagagaaattctcggcggcggcggggcggcggtcggctctgagcttggcggcttcggatacgtattggagattggctctgcctggtggggccactagggatcacccttggtgcaaccctttggggaaagggtcggtgattgagaaagcatgtaatgatgatgatgaggttttgggtatgatggtgtgtgtttcagaggatgatatattgaaagataggaatctggaattttgtggggctttggggaagaagatgaaggttgattatgtggtgtacggaggagttggtcatgcttttcagattctcaacaaatctcagctctcacagattcgaactcaagaaatgatgactcatattaaagctttcattatcaaatattaattaattaattattattattttaaacaaatttattattatt

SEQ ID NO: 381558 - DNA, 2579 bp, Cannabis indica
attatttgggtaagttgtcactttccgctgtattggatttagatatagtgcaactttgaacactccattatctctcattagaacacagttttaagttgtcccttaaaattcttaactcatctattgaatttaatataccatattttgaatttaactgctactgctgcttttactggtaatatacctactctcattcatatacacgatagctacaatttcctgagttgatcttcttaataagcaattttttttttccaatttaattattagtgagacttttgttctttctttctctgatttaatcagttagtcaaaagagaagatatctgttttctttttctttttttttttttttttcaattgtattgtatctagtaggaagataaataattttataaaaggttttcgaggtggttttcacccaacacataccaaaactttttttgatcaaaacaaaactataataatgcataaaatactaatgaataaaaaaaggttagagaaatttatctgggatcaacagctggagcaaatccaagggcttatctatataagtattaagtatatttgataaaaggacagtattctgaaaggcacacttttctatcaagtactttccaaaaaaataccagtggtaaaataaagcctctagtttgagttttcagtggaccaataaaggcatatatatgatacatccaaataaaccaaggggccacactaactctataaatactaacccaaacccctgctttcaacactcaaaccagctctcatatcatattccctccatctcatcaacttatcagctatctctttttattagtgtattaattaaagaagtaagaagtagccagctcaaatggaaaaaattcagtcatgggtttcagaaaacaagctcaccagcattggtaattataggcttcttctttattttttcttctttagtgaaggtaaattttgaatcatagaaataattgacactgacataaagtgggttaattgtttttactgcaggagctttgtgggcatcaggtattggagcctctttagcttactctagaggatcatcaagtgcacccattatgaaaccaagtcttcggctcatacatgccaggtatatacatacacatatacatatatttctagtatatttgttgaaattgtgtgattattttggatgaaaatgaaaagtgtttgattttgtttcggtctttctaaataattaggatgcacgctcaagcattgacactggctgtgctttctggtgctgcaatttaccattactatgagaagaatgtgaatcaacaagctgagaatattgcttccccaactactctccatgctaatgaattaattcatctttttatcaatataattaagatcagttttatctatgatatgttttttttgctttaattaatagtcatgatcttgtatatattataagtgtaactttttttttattttaaataaagttaattgatatttaagttgagtagcttttgagttacatagattttacatcaaactgttaaatgatttaaattggcatatttaacaactcatttgagaaagaaaaagggaaaagattttcacagtatatctttcctcagatccaatcacaacagtaaatctaacacacaaatctcagatacctcctctgctgtgattataagtctctgaacggagagaacaaatgttcagaaaaccaaaaacgacactgcacctttatgatgcatataagatgcataaaaagaaaatcattaatcatcaattatgtagacaagtaatataactctcagagaatcaagaaatatgtagacaacttcctcaataaattaaatttggtttgaaagaataaggtaaattttattatctttttccacttgtaaagaaaaatattcagttgcacataatcttaattgataatgttatacctgaaaatcaaacttgaggctttgaccaagacgagctgagatactctacttgagagttccatgtcacatttaggaaactatgaaaatactaaccaattatttagtgctgagatttacacctaagagtgcccaacttgtgggccctcgcaagagttttcatcctagagacctcaatctaagaaggaaaccaacaaaaacttgactcattaaggtacaatgtggctagtacttgaacataaagttaaaattacacaaaaactctctcctttatggtctatgagacctctgctatctttggcacaaaaagatggcacagatcaccactcttaaagtactaaagggacttatccaaatgcgttcctccaataacaaggatcataaaatgattgaaagaagccattccaaagctcatttttatgccatgctacctgtgccatctttttccacaagaaagtggcacgtgtcacccaaacagtgtcacaaccttatcaaacttcaagtaccactggtgagatgcttgtttgagacaataaatagatcatttcaatttgcaaactaaattgtcatttctattttcctcgaagccttcaggttgagatacatagacttgctcactcaattctccattcagaacaacagttt

SEQ ID NO: 381559 - DNA, 3837 bp, Cannabis indica
aagtacttagacaaacaaagtattaacagtacttcaagaaattggcctctcgctgttcatctgaaacagatggagtcagaacaaattgtgagacgtctttcggctgcaccaacgataacatctgtataaacgaatctacatgcttggagagaccctcagactgctggaggaacataatgatattcaaaatttgctcagaagaattaagtgcgacaggatttgcacataactcttcaatctgagccatacaaaagttcttacctataaaacaaaaatatagttaaatacttaacaaatgattcaaacaaacaaatgggcttaataactgaaactcaccacatatcctggtgtcagagttttcagaatcagacaaagcaagaccaatgcaaatcttttcggacgcggataggtgcaatgcatttgagaaattctcaagtattgcttcactgatctctgaatttcttagtgactcacaaaacaccgtactaaaattaggtctatccagaagacatttgaaaattgcagccacaactatttccaaggtcgcattcttcgcgtctgtcctgtatctgttcagatgatccaggcacgtttggagcagcaaaatccttccctcggtttcatattcaacgaactgcagataaccatacattaattcatgtcgacataataaatcttttactcaaatttataagactgcccttatttaaagaaccacaaatatgaaataaaattagaccataagatgccaatgcctggtagaatgaatcttattcgtcattaacaagaggagcgtaaaataaattaattaaaagagaaataccccaagaaaatgacatttagaaatgaaaaattcgcagcgaacacaacaatggataatatatatatatttaaatatagagaaagtggaagtgagattagtggtacctgagagaggtcctgaataacagagtctgcatttgcttcggtgaggctttgcaggacaaaccgaatctgattggcagtagttgacgagaatttcagcattgcaacgacaaagctatagtctagggttttcaaacaggagaggggaaaaaaaaaagactgcaaaagcgagagggtgtgagattctgcggatggcgagattagacaacaatggtgaatttgggggaaagatcggtgaagaggaagagagggggtacttagattcagagattttggagactcgacgaggtgagaatcgggagagtgagactcggcttcgaaatgccagtgcctattatactcaaacttttgccattggattacctgcgggttaccttattagacaggtgtcactcttataatgggatcaatagagaagcttcaaaataaaataatctatataatatctttatctattttattttatataaaatgcggatatataacataattcttagtttattagaaattattgggtgaatttttatttatatataataaaataaatcccaaaaatatgattgagaatggaactcaaatttacgatggaggaaggatttataagtttatataacagaattcttagtttatgagaaatttggtgaatttttatttatatataataaaataaaaataaaataaatcccaaaaatacgattgagaatggaacccaaatttacgatggaggaatgatttataagttttagacgatttagatggaacgatcgccgtcactgtgggaccggacttatgtttgccctaatattaccttcacttggtgtctgcacttgtcttctttttcatctcactttgtagatcgccggccacccgcatcggctgtccctgtcgtctctccacttctcttctcgcacctcgccatctccgactcccttgcccagcttcagcgcccttaataaggtgggactcaatctaagtaaaatttagggaaattagtgttatctaaacttggatattcaattcaaacccaaaagaaatttaaggaaattttgtttaagctgattcattccgtttgtcgttttggcttgtgctctgcttaggtttttctcaaggcgtggaaagggaatttgttgttgaaagagttgaactttcgttatgaagtaatggctcacaggttccttcgagatgttgaggccgatgcttgggaacgatccgatttccccataatctgcgagtttcgtgattgtccttgctggagcagaatagatttctttaagatgatttagatttatgccaatatctgttttatcttttatatagttatgtaatttttactaatgttgttggttacataattcttgaaatgttttatcttttatatagttatgtaatttttactaatgttgttggttacataattcttgaaatgcagacaaaagcaaattatgacaaggagtgcaagatttgtacatgaccattcacagtttttagatagagaccgggtcgggatggaagatgtaagaaatcggagatttgccaaacttgcagtaaagtgaaaaatgtttgtcaagtttgccttttggatttggagtatggtttactagttcaagtttgagatactgcagtttctattaattctaatgaggccctacccaagagtgatgtaaatagagagttttttgcttaagagcacgatcgcaaggtttgtttaaatttacttttatttgattgcagtaaacaacaatattgaaactaagaaagaaatatgtagtaatttgcacacttgatatctattttcttttttcttcgttttactttttaataatggttttactaagcactatattattctagaagatttgactcctgaggagatcatctggattgttcctatttatttatgttttgatgagaggattaagctgattaatgcaatctctttatttgattgcagtaaacaacaatgttgaaactaagaaagaaatatgtagtaatttgcacacttatgatatccattttctttttcttctttttactttttaatcatggttttcctaagcactatattattccagaagatttgactcctgaggagatcatatggattgttcctatttatttatgttttgataagaggattaagctgattaatgcaatatctttgataattgtagcttgaagagagaaacaaactatatgtgtactatttagtctgttttattgtttgtggtatctttgttggaatcgctaagcatgaggatgcaaccacttatgtaccttttttctttaactgttgtttggttcttaaatgcaggctagagctagtttagattatgaatattcttatgggaaggtgcaagcaaatgacaccattttgaagcttcaaagaacatcaccttattacaagaggaattgagcccatgtctgcagtttctacattcgtggtgaatgcactaggggtgttgagtgtcctcacaggcacgagatgccgataactggggatgcttgtggttttcctttatagccaaaagagagatagagttggaaaagaaaataatttttatgaggatgcacgcaatgacttagtagtcccaaaattttctatttacgtgtactatttctttattgtgtatttgtactttgataaatacttgccctttcaagttgagggctaagcatgttaactaatggtgattgaggtagactaaagaagctgttaaaaatggcattgaagtctcaaatttgttttatttagaattgtgttaatgagactataatatgatttggtatctttatgtattgtttttttgtttactatttttcttttccaaattttcacaactttacccttgtttactttagggaaaaaaacaaaaaaattctaaaaagggtaaaatattacaatattactatggg

SEQ ID NO: 381560 - DNA, 2922 bp, Cannabis indica
caattttgaccaaactcttgtttcatcatctacaaagctttttcaacatattgttgcttagtaaacgtagcccttgacaaacattcctttcttggcctcttctgactctccctcgccggtgtatttgcctagctgagcaagcgagttggcattagctcggataaggagtgcctcctgagcagccttcacattctctggtctgcctccccatgtcttcaagcaagtgttctgaagagctctagcataagagaaggacacatgccacgggtttggtgattggttcatggcgttcaagttcaaagttgcctcaacttcagattgtccacctgataaaaactgctcgaaaatcacacaacattttcaaaaacatcattagtaacaagttacttagcaagtgaacaaagaaacactaatgtcatttgtttatggtacttgccataattccaggaacagctggggggattcttctgtggaggagcttgagggtgtagtctgcgacttgctcgggtgtggctctgtccttgcactcagcaccaggggtaaccatgcttggcttgagaaggataccctcaaagaagacattgttttcagcaaggtagtagaaaacttcagcccaaaccttttgagcaacctcaaaagtcctatcaataccatgctcaccatcaagtaagatctcgggctcaacaattgggaccaaaccattgtcctaaacataacaaaacataatcaattttcacaaacacaagtacaaaaatcaagattagcttagtcttgtctgattagttatcttacttgggagatagcagcatagcgggctagaccccaagcggcttccttcacagccagagctgatgggccattgggaatgctcacaacagtacgcctgtttaaataatgtaaatttgtgtcaaataccgattaaagagcattgctataaggcattatagtgtccaacatcactattaggcactacgggtgctttttagcatttctcaaccagacaaaagtataatttaatcgagtttttggtattagatttcataccatttggcgaaacgagctccttgttggtagtaagcagcagtgcgagaagcgaggccatcaagaccttggcaccatgattcatcattggaaccagccaaaggcaccaaaccctgttgtactcataaacaatcaatacaacataacatggtactatgacatgtttgtgataacaaacatagtttacaatgaatgatcatttaccttgtcaactttgataccaggaacaatgtcttgttccttaagaacatcaaccatctttttaccatcaacagtggattggtagagagtctcctcaaaaaggatggcaccagagatgtactttccaagtccagtagctgagacaaggagagtacggtaagcctggcgattggcctcagtgttttctaggccaatcgaggccagacgcttcccacaggtagcatttgactcatccatggccaagattccacgccctggtgaggcaacagttttctatatccaacaaaaaatatgcatactttcatcagttgaagcagaacatctataaaagtatagtaacatattacatgaaaaacatcaaatttagattctaaaaccaaaagggtatctagaaaaagtatgcatacttatgttatgttacttttgcatgaaaaatctagccacactcacttttttttgcatgaaaatatggctatacttttagtgaattttgcataaaattcttagtttaagtaatattacataccgcggtcttgacaagctcatcagcataggagctagcgcgcacggtgagagcagatgaggcggtagggaggcaccgaacaaccgagactgaaggctggcgaaggttctgtcccttaacccactcagacttgtcaagaactggagctgacttgaggagagaagctgaggttgcagcctattttttttctttctttctttcttttactttacttgagagaaagaagaaactttcttgttatcttatcttctctcctttggcaaagccacaaatgcattcactctcatatcactagtctgtttttttttatagttgcctaggtgatgctgctctaaagaggatggccaatatgaggctgctgtgagctaaccagtcccgtttcgccaagtggatgataacttgctgacttggcagcctcaaagtaagtgtggttcatacatggggtttcttgctcacctcttaaaatgactttaatatattgattttgggaaaaaaaaaaaaaaaaattgtgatattatttttgagtcagttagagtagaagacaaatgtatcatactcaacctatataataatccaaacaaacaatagtttttgggagattcctctggaaaagtaaatatgaggctgtaatccttctttacttgttgtatctttgcttcttattaacaaatggctatggtttaatcataagatttgagatgtaattttgttatgtaaacggttcttatgtagccatgtcatagtgtttatgattttttgtgccacataaccattgagtatatgacatgtcatgaattgggaccctttaataaatatttagtcttagactaatgcaaggtagattctttgtcaactagaagtggttgaaaattgaaatctatgtgtgtgttgttttaataatagaaccttagaagctcttattaggtggttgcagccactctttgctagttgttaaccaacatgaggctgaaaagaacttataaaagaattagacatggacgagaagaataaatttcaaacattaaaaatagtggtgggggtaaaaaatgaagttgttttcccaaaagaaaaaaaaaaaagagattttacaaaaatgttgaattttggacaaaaatttataattttactgccactcgaaattttttacaaaaatactg

SEQ ID NO: 381561 - DNA, 1136 bp, Cannabis indica
ttaagattttttggtacaaattttctcagggaaaatactttagagcttttacaaagatatcgccgagataggcgagtacttcttgattttttactctctggtagcttaatcaagaaagttgtaatgcctcctggtgctgttacacttgatgatgtcgatcttgatcaagttagtgttgattatgtcctcacttgtgctagaaaaggtagaatacaaccttaattcattgcaaatgcctttattttatctttttaattattaagcataatgttctttgtcaatgtaggtggaatgcttgacctctcagaagctattagagattattatgatcatattggtttaccccaaatggtaagttgttatcaaatccttgccaatttagttggtagtttcacttttatggctaaatgattcctgttaaattaattacataaacttttttcttttttaaatgtgattgccttatagttttatcatttaacttccttaaaacttgaccagaataatacaagttctgctggtgaattttttttggttacggatcctgagttttcgggttctcctcctaggagggcaccaccctcggtaccagaattcataccgccccctgcttatactgccccgtctgttcttgtgccaccacctggtcttggttcacccattgaagatgaagcttcatcacctgttatgtcgagtgtgtcaaaatcacaatcttttaactccacacaagttcatgaactaactgtggatgacattgatgattttgatgatgatgatattgaagaagttagtgatatcaggacttcacgaagaaatcggaatgatgctactgatgttggagtgggattgccttcttttgttacaggtatgttgtaggtgtactgatcaatttagatattgtggtaaatgtcttgtatgtgtagcttaaactatcagtaaacatgatacaagttaccttttaaagattaatttgaaattttcatgagaactatgcacctaatcttgcctgaagaagtgtaagaacttagctcaccaaaaatattttttagtgtttagatcttaaggttttaattatgtattacgaaagtgctcgaaagccctttgggacagtgtttttccttcaaaagtctcatttt

SEQ ID NO: 381562 - DNA, 3994 bp, Cannabis indica
aggaaaagttgagcaaacctatggctgtttccggttctagagttgtatttggtgaattttacgtaagtaatttgacatcaaggcttgaacaccgcctgccattaactgatagtaacactaacagtgtaatatacagcagcaaaaacagaacttttgacagcttccagaaagctactatgagtttgaaaaatcatggccaacccaacaatagtgcaatctatgggtatttcgtatatgaagttgggaggaggtggtttggttcctacccagttatagattcaggatcaaaggagtttcacagctcatcttcttcatgtttctctgctggtcctgctcatgatgtgtcttttgacaattcttcccgcgaggagcaaccctctagttctgcagattcatcttatcagtatgttacttatcttgttaaaatcataatcgtgttttccccgtattatgttatgaacagtattgtttgctctttgatataaacgttcaataaatacttctatagttatatgctgcatcatgactgaattatgttctctttatggtgctaacatgaaagggactgcgaaaagatactatattagtgggagagtggggtaactggggttgagtcatttggatatcagattgatgatttgaccctttttttttcctttttaaaacctcgtgttacataatatccatttttagtgctaccaattactaaagatattacaacaatacagggacagtaagcctggaaaggctctaaaactggtctcagcatcatgctatttaccccacccagataaggaagaaactggtggtgaggatgctcactttatctgcgttgatgaacaagcaataggggtcgccgatggtgttggtggctgggcagatcatggtgtggattcaggactatattccagagaactcatgtctaattcagtaactgctgtgcaagaagaacccaagggttccattgacccagcaagggttttggagaaagctcactcaagtactaaagcaaagggttcttccacagcgtgcattatagcacttaatgagcaggtatgcagcttttattatgccagattctttagcatgtcacaataataggctttatttaatattacacaacttagggcgtctgatatgtggacatttggtactcacagataaatatttgagaaggttttatatgtgatgagaattcatgatactgcagtgtataatctcgctgctaaagcagatactgtgtaattatgaatttaatctattaagggataaatggaatgctatgtaatctgatcgatcaacataagcatgatgtttttaatattgtaccccagcagtgacttcacttggagcgagtattgaacttcaaatgtaaaattagtcagtataatttataatgtcgttcactttgattggaggctcatttctatttctttatatgtccacacatggatggactcaatttattgttttcgaatgaacaataggaagttgggaactgagacttattttttgtcacttggtatcctattttgatcattgatactgtttatggaacattttgtgggcaacttaaatatatctttggcctcatcttgcagggaattcatgccattaatttaggtgacagtgggtttattgtggtccgagatgggtgtacaatcttcagatcaccagtgcagcagcatgattttaatttcacttttcaattggaaagtggaaataatggtgatttacctagctctggccaggtctgttaatttgtatatgtcgtattgtctttcgaagttatattgccatttattcaagttttgtgagttttatttctaattatatgatatatacaaacgagatagtaaacacttgaaacttgtttatcactaggattgtaaagctttaaatgagtagttatagtttgtaactttcatgaatagttaacattccgtggttgttttcataagctgaatgataaggtgctaagttgactgtttgattcaggtttttacagtacctgtagctcccggggatgtcatcattgctgggactgatggactctttgacaacttgtacaacaatgagataacggcagtagtagtgcatgccatgcgagctggcttagggcctcaggcaacagctcaaaaaatagcagcattggcgcgtcaacgagcacaggacaaggacaggcagacaccgttttccacagctgctcaagatgctggtttccgctactatgggggaaagcttgatgatatcacagtcgttgtttcgtatgtggctggttctagtgacaaatgacaactcttttgttcctctctgtacctgatgtatatactttgaggatctttggcgttactgaaacttctctttaccaagggcacggattactaattggatgtgttggctatatttgcaaagaaaaaccggatggagccgagcctattaattatccattcaacttcttcacagaaattgttcaacacagtctaatctaagcgtgcatggaaagttgataatcgcagtaacatggaagatgatcaaagaaacactctctatagatgatgtatatagtatactctcctcatattcatttttattttttgtagagtcgaagactcctctgcagccgtttatgttgcacacttatccgttattgtaaaagcgtgatggtgttttttttttagtgtatgatgtagtagacaatagtgcagactcaatggttatcttttttagctttcaatctaatgagggaattgttttggttatttgagatcacttggctaagtgcttttcgttaattaatgccttgttcgtgttcattattcacagttgcttgtaaatgttgaaccactctaccaactcaatcttactcccactaaaatgctaaaattattatatctatgtgtgcactatgcctcttttttgtttattcgaaagacctcatggtaaattagtgcttccactaaaaagctaataagatttttgtctcccgaattttgacatgtactaaatcatgccccttgaacttttaatgtcgttaaaagtatcttttgaactattgagattgttggatgtaaatatttttgtcaaattttagtaaaaaaagtctaacatgtatgaaagttcaagggcatgatttagtacaagttaaagttcgaaggacatgatttggtagatatcaaagtttagggagcatggttaagtacataaacaataactgaaatagtaaaattaaattaaattagacaaaagtccttaaatctaacaatgtcaatagtttaggggaatttttaatagccagaaaaatttaggaggtatgatttggtacatgttaaactttaaggagtaaaatcctaattaacctcactaaaaatattattatagcgaggccaagttttaaaattataaatatttgtgcggagattaacgaacgaaatgtttaaaataaaattatcattaattccattgaaagaagtcctcaaatttgatatacttggagttggagtgtcatatcatataaatagttactaatacagctcgtacacattatatatttatttagatttatttgcggcgtaactacttaagtttatcttttggttacaaattaatacctaagttaattttttggtggtaaaaatatcttccgtcaatattttgttgcaagtgaggtacttaatgttaacttttcagttaaatgctaactaaataaatacttagtgattttaattaatccaagccatttaattttaattttaattttttatttaaagaaacataaaaattcatttaaaatatcaaacaataataataaacttattataaaatattagtattatgtaatattataatttagagaaagaaaatagagaagagatgagaattttctgagtgttttattccaataggtgatctcctatttatacacatacaagagtcaaatattaagaaactaagagaaagggaaactaaaaaaaagggaatgttgattacatta

SEQ ID NO: 381563 - DNA, 1388 bp, Cannabis indica
atatatatatatatcatattttggaatttgagataggtgggttttaaccctcccctagaagaatagtattattgatacaacaattatacttgtatagagtgtttttttgttttttgatagatcgtatagagtttaattattacctgaatcctgaagcaataattgttaacgaggaaaaaaaaaacagtcaactttaattaaaaagaaaattaatgcatacgtagtttgtcaacttgttttggggataatcgatcaaaaaacagtcttgtcaagtttagtctgctgaatttgtcagcttctgtctatttttattttttattttttaattttttataattaatattagcatgtaaaaaaaatgcacataaaattatcatataatataaagtctggtgcattccatgaaagtatgtcccgtctattaattttatcacgttatgtggctttcgtttctttttcaaattgcatttatgcctgaatggagaaacagtataccatactcttctaccaatttatttattaaattatatggataatgatcatgaatgaaaaaacagtgaaaattatacactttaaaatcaataagttacttgtccaaaatacaatttggaaaactaccaaaaagtagtcttctaagatgatgagccgactatcttttttgactagcatcattttcgactgatatataggtttcattcaaaaactgcttatctaggataagcataacttaaatcaactatctgtagcttagacccaatatctcactacgtgagttttatgtaaagattattagtacttaattattgagattaggggtgggcatccaatccaatccaactttttgttcctcatccaattcaatccaattagtaattggatttgaaaaaccatcatctgatccaatctaattagacctcaaaatccaattcaatccaatccaattactaattggattgcattggttttttaattggatatccaattacacgcctaaattttaatattaacataaaaaatacgaagaaaaatacgtaaaaattaaatatcacattttattaaagtttaatactccataaacatactatcattacaatgtaatgcaaataaaaattttaaataattaaaacaacaacaattctaagtaataaaatagaacaaaacatcatgaaaataaatatacaaaacgaccaattgttaaaaatttaacacaaaaataaaattcaataaaaatataattaatatatattatatttttattattttttattatataaataaatataaataactttttaatatatataaatgtaattggattgaatcggtttttaattggattttgagattgatattcaataaccaatccaatccaattagaatccaacttt

SEQ ID NO: 381564 - DNA, 2534 bp, Cannabis indica
ttttttttttttttgtaatcaatgatgaaaattggagtaatctaatgggagataaaattgggtttctaatgatgcaggtggagattgagtttctgatgagtatgttcgaaaaaggagtgagagaggaattgggtagctttattaggtaagcgctatggaactgattatgactccattggtttagtttcaagaactaaagagtatactcatatacatatatatttatatatatatttatataggtgaggttggttactaatttcgtatgaaaacaatcctaataaagcaatgaaaatggatagcaaattgtttttctaccccaaatttagtcttattatttatgcaagtaaacacaatgaaccttttactctggttgaactgttgaagacgtaatatttgtttgcttcttaaaggtgttattgttcaaagttggcttttttaggtttatcatttatgagaaagcaatgaaagtgcatttgatttggtcctcttgaagcagggaagatgtccaaatttcgtttattggagataagtctaagctcccaggttcacttcaggaactgatagccaatgtagaggaaagcacaaagaataattctcggctccaacttgttgtggcagtaagctatagtgggcagtatgatgttgttcaagcttgcagaaagattgccttgaaagtcaaagatggtgctcttatgcctgaggacattagcgagtctcttattgaagaagaacttgaaaccaattgcacccagtttccctacccagatctgcttattcggactagtggtgagcttaggattagcaatttctttttgtggcagttagcatatacagaactattcttttcacagtccctttggcctgattttggagaacttgaatttctagaggcattacgagcctttcagtctagacagcggcgttatggcagagagagtaatcagtaatttaaatttttagcgagaggaggaagcgaagtttaacagttttggaattggatgtgcctttaaaagcaacaatttggagagaagtaatccaaccattaccattggagtgtatcaagtatctcctaagagatggttaaagtgtacatagtattctacgagttttacttgcatggagtatgtggaattgatatttaaacaaagtttcacattaacattacttgcaactatacgattgtttacaatcttgcatctgtttcaaggtttgtggaactgcaagattagattttggttgtgggaagagatcatgctcatggaaaagaaacatatattttctgattcaacaatgaggattttttgcttgttttcttttgatcatagaagcttgaggaaactggaacaaccatggtcattagaaaatttttgcagccaaggccaattttcttcattaggtgaatgaatgcaagttcaaggcacgcgaagttactattcttactatcattgtgtgaagaacacagtttttgcattcccatactgcaaatactctccgcacctaggccagtttgacagcagaagagaaattgctggcattaattcgccagattgcatcaataatgttctaaggttagccttcattatgacttttcattttgtcagttaaactaagatgtttcaaaacttatatttggaaaacaaacatgtgatttacatcgacatcatgtatctttccaactcacattcttgatattgtaaaagctttgtgatatggtcatggtttctcactttgaatgtacaccactcacttgaactagtgatatgtcttggcaatggcaggtgggaagcaaacaataatgtcaaactcatttgtagtgtttacttattatagaaactacaatctcctagaagcagtagctgaaggggactactaaatgcaaaactgatgttaatcattctctaagccataaagagtccaccaacaccaaaaggtaaccctccacgaggcctatttgtttttttaagatatgaatttgggatattcaagtagaccaacctatcatctgtaatataatatttgctcccatttcttgtaattcttgcataataattgttacagttttgtcttatattaaaaatttataaaataacttgcatagaataatttgttaatgataatgcactgactacatacactccattataatttataacctcacctcattagtttcttctttattacattttagtcagatacaatatactcttctcttgtcttcttttaagtggagtggagtggagctaccattttctacttgcacacacaaatccctaccatttttcttagttagtcagaaaataaaaataataaaagactccactttttatgcctttgattttggttaggtatttatacatttgtatatatgtttgaatatgaattaatcgttcaagaaaatgaaataatggttttgatctcaaaaccaattgatttttgagggagtagccatacccaatattttattagatcccgtataattttttttttcttctcatttttcttcttccttttttccattttttttttctttt

SEQ ID NO: 381565 - DNA, 2726 bp, Cannabis indica
atcttcttcatcttcatcaaaaccagggaaataagtacttttgagggaaaaaaactcattttaggtgccacaacaagggcctagaacccaggttgacacctgggtcagcccaatgaccatgttgacattttgtcatcctgggccaattccattgattttttttttagaattattccgagcatattctcaattttcagcaaatattaagattcaactatttatggggaccaaacgaaacttctaggtggcctaaacctcgacccagcgccaaggtcgacacttggcactgggcctaacgaccaagttgacatattcatttctcgaaaaagtgttccgggcattttttccttcatcaaaaataacaaagatacaagaaaacttggagagaaaactacagccacaagggcatgaacgttgagcctagtgcctaggttgacttcgtgttggacccagtgaccaggttgtcaatcaacatggttcgctagtttagatcatttaaatgttgattctgctccaagcgttctctctagaattgtcaaaaatgagggaggagaccttgtcctcttgttctaaaaccttggaagtatcaaaacgacatcctagaagctccaaaatgaccaccgagcgaccaggttgacatattgccttgtgcgataggttctgcttacctgattctcattccgtctgaatttattaacttatttttcacaatagttgagagccatgaagttagaaattcaaattcacaattcatattttcacatttccaacaaggtgatttactcaagaacctggtaatttcgagtctcccgtttccatagaacaacaacatctccaagaactggttactagcttcacttgaacacaaaaaaggacaaagtcatttcaaaatgtcacttgggcattaaaaaatacttacctggcgcatttcaccacttacacaacaactagtataacgtaacatgtcaacctggtcactagaatgtcaacctaatcgtttggatgtcaagttggtctgtgggtgctaaatagcgttcactaaaacggtcataactaactcaatattggtcatattgatgcgatttagcttgcattccgaagctatttcaattatcaagccatgtcttggacttcaatttcaattctaaagttattgacttcgaatttgaccctcaaggaagttatgaatttaagctacaacttacccaaagcgagtcctgccatcacggcctagactccaaaaattgacgatcaacctaagaagttaattttaaccgttagatcatcatctacggtaaaaaatatccaacttgtatttttccatatttttttggattttttattcacatttaataggacctctttcacctataaaaggcgagctcctctggctcattttttatattcagaaaagtatccataaggtcagagcatctctctctaggttatctctctaaaaattagagaatctagacttagccattttttctataatctataagaagacgtagctccattattgtcacaatatatgaagtgaactattaaaattttttgtgtgtctctatttatacttaacatatatttcattctcgccaatctagagagtaggtgtggcttaggaatctctatcaaaatttctgagttaagagaatcaatgcacccaaaaagtttaatggttctctatgaaagaattatttgaaagaagaatcctttaccctttctcataattttaattcctcaaatttatatttaatcctcggatagtaaaaactaatgcaacgacaagtgacatggcctgtatagttctctaacacttgaagtgtaaggcgtggggttcttgaattcttaaaaaagaaaaaaaacacataataaaatggaactatacaatttgtagcaaagcatgggaccgacatctgaccagtatcaaacacagacaaaatgataaaaaataaaaaattgcaataacaattagacccattatcgagctcaccattcctctatcgaacctacaagtattcgatcaaaaaataaaaaattacaataacaatcggacccacaatcgagcccaccatcatcctctatcaaacctatatcttcaacctctatccttttttcaaagaacatgcatcagacctacattggacctacatcagacctaacctaaaaaaattatttatagtagtaccacagatcagacccaaatcaaaccctagatcaaaccaaactcacatatcatatattaggaaaatacataacaaaattctaccctaaatcagtgaacaattaaactctaacaaccaaaaatacaatttatttcaaaaagctagggattcaaaacttaccgtagacatctccaatcgaaaaaatgggtaaggtcagtggttgtgcattgacgagaaagttgggtggtcgtctacgtttgagagtcgcgagattgggttgggataatggtcgtggccacgaatttcgcttgggacagtggttcaagcgacgagagggagagaaagacgagagtgaatttttgaaatgggaagggtaattttggacttaaagaaaagttggcatattttaaaaattttgatccaattatgtttagtgtattaatttttccataataaatgcatatatagtcaaattttcccttattaccaccacaattccatttctccatatagagtcagccaagcaagcttagtcaatgaaatttctgttggaaattattt

SEQ ID NO: 381566 - DNA, 2379 bp, Cannabis indica
aaaaaactcgaataaaaatacttacaaagcaacaactcgagcaaatttcccttgagaacatgtaacaccagtccatgaattctccttaggcaagcaaggatcgccactccaatctgaaggcggattgttaaactgtctacccaaatccaacattgccaccactaacaatcaccaaaaacacattattaacaaatgagatttttcattatgaaaaaaaagtgattttgttttataacaaaactaccatctttagaaagtgtctttccaccaagggggagaatttgcaggacttcagcagcattaatcacaggtccaacaggcatatcattgctgggaatcaagacaatttcagtctgcccagataatggccattgagttgaataaactgtcacacctttggttgtgacattaagattagcatagaatttgttgccatttattaacacatcaaagactctccagctatatgggcttggagtcctgttgtcctggaaataaagggcaatgtagtagtcaccagtagatactgagatttgtggccattggatttgtagcctctttcctctgctcgttgtaatcgcgttcttgaatgccttttcgggtgggacattccagaattctaaagggttcactttgtgatggctaatcaccacaggatttaggtccttgaagggttgccatatccggttgaatttgtcatctggaaagctaggttcatgtttatataatatatatattatatatatccaacatggatcagagtcttttgaatctccttaaacaactcaattgaaaaccacaatgatcaatgagattatgaaagacagattaaccagtatttcctaatctatgttcttctatatatctagaccttgtttattttcttaatttattcggcattagtggtgtctaagacatctagacatgtcaatttgcgattaactaacgatacttcctaaaagttattatattaaattatataagatccgatacttatagttagagcaatatcaatattaatacataagagaatactagacactactagtactttttagcatttcttctaatttaataaataatacttgttaggagcatggttacgagtttcacttacccaatagaatgatcttcaccaaagcaacacctagccactgtgctaagcgcattgttggcaaaatccgtggcattatacaacgaatcatccaagttctccacctctaaagccgacataaatgggctcgacttcgtttccccatttctagcaacgcacacactcaacctattcgccttagccaaaaccacaatctcataaaacgagctaagcccattggcgtagtcctcgctcgtatcaaccacaccccatttcgttccttccacgatctgatcgaacaccggcggcttatcacctccatcgaatcctccatagtaatacgtcgtcttcacaaggtactttccgcctttaatcacaggaatcgagtaacagaatttccgggcagaggtatctgggaagtaacggagagtggagagaattgggacgaggtcattctgtttgagcttcgttatgttcccggccgaggtgaaaccctcgtcggtaacgtatctcaacccgttgacggtgactccggcactggaagactcaccggcgccgcaatctaacagataccctgttccatgaaaatggcattaaaaatcatgcaatgatcataataataatgattcagaattgatcaaatgattacgtacctgttgggttagtttgagattgagcgaagagggaaggaaaggtgagaaggcaacaaatgggtaggatgattttgaggaggagagacattattatttgaaggaggattcatcaaattgttttgggcataggaacagagaaaatgaatattagattcagtttatgcatgaatgtataattggaaatgacagtttaattatcaacatgcttgatgacctggtcatatttatgatttattttttacttctttatatgctttttttccttttaaaaagcctattatattctctttcaaaaataaataaatgttgattaagttttttattcttcaacttttatatattaaattatgtcccatgaactattgagatggttgaatttaaagatttttgtctaattttagtaaaaaaagtctaacatgaatgaaagtttaatggacatgatttagtatatgtcaaagtttaagggacataatttgatagatatcaaaatttgggaagcatgatttactacataaataatcattgaaatagtaaaattgaatgaaattaaacaaaaatccttaaatctaacaatttcaataatttatgggaaatttttaacgatcaaaaaagttcaaggggcatgatttgata

SEQ ID NO: 381567 - DNA, 4157 bp, Cannabis indica
ctctctctctctctctcatggccatctctgacatgggtcatcttcttttgtggtcttagattctttggtttcggatctctcaagtcagaccattttactttttttttcttcctttccttcaatttatgaatatcatatgttactacttcatttaaatccttaatcagatctaacgtcgaataaggataaggatcacccaattcaccatcttcacttaacttcattcaattcactctctggtttgttctctttctttgtttctctctctactctttttttgtttctatattagaagatggctttgaattatagttctccttttggttgcaaatggtgcttgaattgacttgtacttgaattttaatttgtagctctaagttttggttttcccaattccttgatgtggatgtgctgttgattttgctttctgggtttctatcagttccaatgattgttattaccaaatttgttaaaattagagaaaccttacactgatgcagtttatctagttgcccattttgtccttatccttatctttttttctttatactgttttattgacattacatgtttatctagttgcccatttgttttggttgttgattctcaaattttctgttgttcgtttcttttttgtttagtctatttctaaaatgatagccctccgatgttgttagtatgtttttagtgaaaattcaggtttcacaataagtaaacatggtggtactggtagatgaggacttagattatatttatcacatactaatagttcacctgcgatgttgtgttatttcaaaggatagagttgggatgttttagtattttggagaattattgaattgtttacaatggtatctcgatcattttagaagaagtaaactaaattatccaaggttagaacttaaaaccagcaatcccataaactgaaaatatgcattttaataaactcagtgaacattttgaaaaaaatctgattgttataaactattgaaataactgtaatgtgcatttcattgtatttcagaattgtgattcatttctttgtttcacattatgagtgttttcttctcctcttttaatctttccattaatgggaaagaaatattgaaggagagttttttttacctgaaaccaaaaggtttctggtctagtttttctttataattgtgtagcattgacaattaatttttacctgatggaagttttattttctaacttcttaaaagattagaatgcttgacaaataaggagaaaaatggcagcagcagaagcgagagctgtgtggcaaagaacagctaatcgttgctttgtgcaggaagatgccaaaagagctcccaagttagcttgctgccaatcatcttcaacatctaaacaagttgaagcaggacctactgcagcagcaacagcggatgccccagatcatcctgctgttggcttcatgcctccaaacaggaatccttcgtattctagtctatcccgcgacacaagatggtggctccaaatgcaacctaattatggacatcataagggttttacatatgaacaagtaaatgatttggtggatgaaaaagaaaccttagaaggtggtgttgtaaagtcagctcctaagattggcgaggcccaaaaaggtgacacacttcttgatagtcaaacgactagtgattgttttcatgatgagcataacattgttgctaaaaacaaggctttggaaataggaaaacagaatgtagaaactgtagattatgacattaaaaaactcgtcgactcaacagctagctgggagattatgcagatggattctactgactactcagatgccaaaccagccaatgacccgtgtttagatccagaatatagttggattgggagtgagaagagtgagccgtggtggcgtatgacagatagagatgaattagtctctttagttgctagaaaatcacttgaccatattgagaactgtgatcttcccccacctcagaagatttgccatagaagtcatccatttgcccacattgggtgttttgacaataaggaaagttctgcatcgttagatagaaaaactcatacttgtggtctctccactgggactgttcgccctcagggatttgctaacactggaaaatcacaagagagacagaaatatttatatgatgaaacttcaaggtagttattgaataattaaatttccttctctaattcatttatgttgagttgtttcatgtgcattgtcttctaatagctaggctagtttagacctctagagaagaattactatttcacgattttcatcaccctccatgagaactaccctagtatagtgtttgacaccatgttgatttgcattagagaaatggtttgtttttacacatgggtaagcttacatttcctgatttcttcttacctgaaaaacagttactgcaaaactctcgagactatgacagagggggtcgaagattccggcagtgaatttagtaaagaacagctgatagaagcactctgccattctcaaacaagagcaagggaagccgagaaggcagcaaaggaagcatacgccgagaaagagcacattgttacactcttcttcagacaggcctcactactttttgcctataaacagtggttccaattgctgcagctggaaacactttgtattcagtttaggaagaatgaccagcaaatgtccacccttttcccactagtccttccatggaagacttctaacaacattaaaaaaccaaggaagagctttggctgtgatggtgccaaaggtaaaggagaaaaaagaggccagcctgatcaggacatcactaaatacgcagttgctttcgcattggggttgagccttgttggtgctggtttgctccttggatggactgtgggctggatgttacctcatttctagcctaattagccaacttcttatgcttctggtaccattggttctaaaatagaacaacagaatatgagtatgagtaaattgttttctttagattttctcttctttctttttgcaattaggctttttgtacgtaaattttttagtctacttctatgtacagaatgattttcatgagatgttgtatatatgttttgagtagatatttctgtaagctgtatgcaagtcatctttagtttcccttaatattccaaactagtttctgtttcatatcattgatctgggttgcagaaaatttctgttatatatgctgtttttttttccactaaatcatggtttcacctaataaaattgaaaaatgaaaaatgagtataaatgcaaatatctaaaaataatttccaacataagaataaaaagattaacaatttaggggtgttcataaaatacttgatctaatacaatcggtacaatccaatctaatttaatctataaagtgtagatatctgcacttaagcgaagtgcgaatttacttttgtttcacatgcaaataagtgttcattagattacatttaatatttttaggtctattcagatccgaaccaattatatattggatgttagattttaccatccgatatgatttaattaatttcagtcattcaatcaatccaacatccaagtagatcgggtctatccattagatgtatttcattcatgtgtctgtattgacttaatttgaatttatttaatattttagacctagtattttttggatgagttcggctccatccaatattttgattcggtatgtattggattgaattaaatctatcaaatctaaaaagaaaaaaaaaatatagcaaaactttaatgttagttttcatgtatgcatatatattttacttataacaatataaaatttaattactcatctagattaattaaaaatactaattagttcgattgactgttagatgtattggatatttggatactctattcaacatctgatctgatccaattaaatattttaaaatgacatctaatccgacccgatcacaattaaatatctaatatttaacagatcgatatatgcacagaaagtaaccggtataattcaatttacacttattttatttattttaaaatttataaatatattattaatattttaaaataattaaacaaaactcacaaatatttttcaaaactttatctatcaaatgtatatatttatttgaaaattaaaaaaaatatatat

SEQ ID NO: 381568 - DNA, 1015 bp, Cannabis indica
ttgatcgagtcaacccagccaaccgaaatctgtgaacccgaaactggtgaacccaaaacctgcgaacctgaaacccaataaacctgcctgatgttcagccctagacgggagtttattatttactcctctctgcctccctaggacaattgtatataaatataatatataaataaaaatgtaaaattttgattatatattttctgataatagtggagggtagaggggggagagtgatatttatagtaatagtagatcaattttgatttgctttcagttgaagatcattttagctatctagattttataaatataggaaataaatataaagacaggattacgaattacaactaattaattagagtgcccatgcaaatgcaagttgtgaaaaattgttatggaactagattaacccagattatggagcaaactaataatattataagtatcacatgaacacgcattatactttttaacattctgtgcatatgatataatcaatgtctattcatttgattcacaaagctattatctatatgtttttcgatcgaaagatagtgtttagtgcgcaaaggcaaagactttgatattgtatttaaaattaagcgcgtcttttttattttttaaaatagaagatatttaaaataaagttgctgattaccatttctaaaaattaaattaaaaaatttatgactatatgttatatagctcacaaacatgagctgatttttaattttaaggtattaaatgtcatacggggactgatttctttaaatatatcagatctgatataccattatagtaaaatgattataattcaatttaattaaaatttctatttagtatttatctaacttaatattagtatgtctttcagttaaacaatgagctatcatgatttgaagagctgtcgatgccgattgtttattactcatatgggattttcatcaccacatagaaaaatgctaattagtaatttttccccttaaactttcacatgtaccaaatcgtgccccct

SEQ ID NO: 381569 - DNA, 2827 bp, Cannabis indica
atcgctagccaatcgcaacgtgaaatgtcgaaaatgtgctaatattttccataaatattcaataactgaataattagaggtatagaaccaagattaaaaacttgtggaatgtctttataactatattgtacactgttattaaaattaatgaaaaggtccctaatgtgcaagagcctccatacataaaatagtataacaatttgtgagtgagaaataaccttagaaaggaaaatgaagatggcccatatggtccttcaacagaaacacccaagtgatccacattagaaagctgcttgtacaatttttgagaccaacttccttggcttttaatgacaatacttagcttatcaggctccatattacagttagaagttactgtaaaagggtgccattgaagctttgaaattgttggcacatttataaacaaaatactcgtcggattatactccaactctgtaatataatataacaaaaaaattatagtatagtcacatatatacaacatttaatacgtacgtactataagtattatgtaatatgtaccttgagtcttggcaaaattgagttcaaaagctccgcaaggcagaagacgagaggagagtaatttgattcgattccgtgactgtaaaaatctcaagtatcgatcgataaggaagaggaatatccccggaagaatcatgcagaggtaggcagaaccaacgtggagtacataaaagattatatagagtgtgtagaggtggtgagtatagaaaaacagctcaaacatttttctcctaactttatttaaactggttgcccaaatggcaaatgcaaataccattgcaatctctccagctacatttgacacataagtttggctccactctagtgcctgcaaccaataataataacattaatttgtctttttcttatctcgtatgtaaaagagattccaattatgtggtcaacactttaagaagtttacaccaaacaaaacagagataacacaaagaaccgtacatcgaccatttgatcggtcatggcccagtaaatgaagaatccaacggtgtgagcagtaaaaagaaccgtggagagatgaccaagccaaatgtgatatttaatgctagactctgatgtgagtccaaccagaggaagaattgaagagcctcttgttactggaaaaaacagaaatgcccagcatgtgtttccaatataaccaagtcttaatgaaacactcctgaattttgcttgccatctacaataataattcatttaaactttttacattatatatatgttagctatacagtttggaataattagtatatataattattaattaattcttacactttctctcccactttatgcatgtgaagactgccaaaactgacatataagtaattagctagagaccaagtgaggagagcaataaacatgagcacaaaacagatctctactgagctaactattcccagaggtgcttttacactcactggatttctccacgaagccaaagtacgatgaaattggctgcttgttacaccaccactactgcaaataattattaaaattaattatattaatacacaccaaagttttagaataataacaacgattatttgattaataacctagacttgttattggatttcttctggagatgaagataaacacagctcaaagctcctataaacatcatagggaatgtaaaaagaagaagatttgtccctgcaaagtaataagattctactaattaattgagaagaaaacatgtaaatttttttaaaatatttgtcaattaataaaccttgctctcgtaagtatgtagttgagctgagtttggtggttagcttaggagtccatttcttattgtaagattttgtaggtagcaaaacccaaaccaataacgacccaataaacaccacaaggaagattgtctttaggactgtgttcctcatcttcatcatatatgattttctaattggctttggaaactctttccaaagatgagaggagaaaccccttttgctactgaaataatgttcttagaggccagcttctatatatatacagtacaagtatattgctttatatctcataaaatgtatgtgtgaagcaaaagagcatgattcatgcttatatacaagtggattttaaacacttataatgagaagtcaaaatgaaagaatgatgaaaataatatatctattattgctttacctcttttacattcaaaagagtcggttttattatccattgatttttgtaatattgtgtcaatttttccccggttgatgccaatagcgacactcatgaaaatgacattattctgatttctgatagtaatagttcaatactaatactattgagcaagctttactattaaaacaaattatttattattgtatacgtacagatatcacaatgctttatgtgtgtgtaatctcaagtaagcacaagtgctgctcagcagaataatctaagccgtccatcaatctagaatctggatctaatcataaacgaacaatcaagatttgtctgacactttctcaacatacgattttccttttatctcttctttttttacttttttttttttgggttccacgtccaattatttggccattataatcagcaggattacactaaacatataattgatgttcacataaagtaactattaagttccatctatataaatattgggatatgattttgtctcgtaatatactctcacagaatgtataccgtggtacattagattggtctcatggtacattaaataagtgtcaagtacgtttttactttttaaccctaattatccctaaatcaatctcagccgcca

SEQ ID NO: 381570 - DNA, 5163 bp, Cannabis indica
ctctttccttgagatcggcgctatgttgcttgtgcttcaagcttgtggtcgccgaccacggtggatgactgcctctactgaggtctctcaagtccgaggttggtggtcgtgggcagctccgggtctcttggttagatggaaggcgacagtggtgggtttctttgggctttctcccttccgattttggggacggcaagatgcggtggtcctactcaggcgaaaacttagactttggagagttgttcctctttcccttttatcagatctttgtgttcattggttttcttttcaggcctcctagctccggtgcacaatggctcatggttagcttccagagtattattgatgtagaggagaggactcgggttttaaccaaagggatgtgcttcccttgtcctagctccctcaccgttcagaacccctttagatggtagagtgtggactggtttttttggaagatggtagcgttcctgtgcctttggtatgcttgtcttggaccctcgtgtgacctcctttgcgctaggggaaagtcttttgaagtcattttatgttttgttttgatttggtttgttcatctttttctgtttagttttgtcggtgttgtgcaccctatgtcctgtgtggtgttgtcctctatggcgttggctttaggcctgtttttaggggtttgtccccttcgatgctcttgcatgagccaagagcttattgctcttttcgttatcggcgtggttggccgacatttgagtcatctcctagtgagagttgtgcggatcctccgccagacttgtagggcttcgacctttgtttaaccatattaaagttccccctttcaaaaaaaaaaagtaatgatgtgaccaaatattatttttaaagtttgagagaagagaaagaaataagaaagagaaaaagagagtagagtaagagaaagaaaaaaaggaagagagagagaaaagtagaaataagggtcttgaaacaacacccaaataaataaaaacattattaatatttaaccaagttatttttaacaattatatcaaaaataatatgtgatgtgtaaaattcccattatcaaaagggattttttacataaatatatgttttttttattattattatttttacatgtactactttattttatttttttaacattcattatcagcctaagatttccatcaaggggcaggccccagcaaattttattgcagagtgtattggaataaatgacgattcggacgagctaattctcgagttgcagctttggaaagtctatgttgacagagcatcaaaagaaaatgtatcggagcggggataatcttaatttccccgcaaggacatcaactccaaagcgctcttcacttttaattcacaacctccagcaatgaagtagagcatgaagcaatgattgtcggcccgccattaacaaaggaagtgggggcccagaatattgaaatacatagtgattcctaactcattgtgaatcagatttccatagagtaccatgcaaaaggcgaacaaatggttgcttacgtatctcgatccagagagttgttacaaaacttcaagagatactttatctgccaagttcccaaggagcaaactgccctcgcagacatgttgaaaaattagcaatagatatgaagatctaagaatacggagtagtgcccatttcacaccttaaggttccatgtatcggagcactgcaggcagctgttattgaccactccaactcctagataggcccaatttaccaatttctcaatttggaaagcttccgtctaataaggctaccactcgaaagattcaatatcaagctccttgatacgttattctaaattggagactataacgcaagggattattagtttcgtatttgaagtgcattacccgatcagagattagtgtggctattcatgagattcatgaaggtggccgcatttccagacccagcctataaaaaaaaaatcatccatgttgttattcatgttaacctcatcaccacccgaaagatttaagatttatgatattattcatgttaaacacatatccaattttctcaaagacaacccaacaatcagagaattttggttatataaataagcacaaaatgatcttgttttccctttcgttcccttgaatttgataaactattttcatttataaagattgaatttttattaataaggatagataaaacgaaagtgagaaaacaaataaaatagaaaaaataaaaaaagaaaatcactcacttaccttggaaatcaggtgaccgacggtggtgacttggtggttggggcggaggagattagggatggcgcgtgagtttctcaagaatagtggtggtacgatggtggtcgtcgatgagaaagggaatagtggtggcgatggtcatcgaggtggttcatgcaagaatcacccgtgagaggtgagccgtagtttggatctgaaatgaaaaactggtgcgactatactttaacctacagtttaaaatcgtaggtaatttcaatttaaaagaataagctaaagtatacttaacgggtctaaaccgttggctatttatcaatgagtgtttgcaaccgacgcctattctgcactataattagggctaagcatgaaatccaaaaaattgaaaaaaccgttcaaaccgacctaccgaacaccgttggaattgaaatcggcaaaaccaaaaactgaaaaaactgctatcagttaaaaccaccattgaacgatcaatttttttggataataaagcgactgaaaaaaccaaaatcgactgttatatatatatattaatttattaagtttttttttactttatgtattgcacttactcataatatattattattttattaatattaaagttaaaagaataaagaaattagtttttgaacaattaatttgtttggttgtagttgtagaatgtagaataatgtgcttaggctaaattggatcattttttttttaaaaaaaaaggaagttcggtttaggcaatttaaaccgaccaaactatgattcaaaacggtcaattttaagataggttctggatcggtcagtcagttttcggattacatcaatccagactgaaaattgaattctggatttttatataaaaaactgactaaaccgaccgatgctcaaccctaactataagcgttgattataaacactcacttaaatttattagcgacgatccttgaaaaaaacgatttgaggaccgataggaatagtggtttttgtagtagtgaatcaatcaaataatatctcatatatccccactttgattgactaaatcaacactttctataaagtccttaaggttaagtgtttttcaacttgaacttaaccatagtgtaagaatcacaaattttattgaaaaatttagttaacaaagcattgaaccaacttttttttttttttaataataaaacagtgatgacacacacacttttgctaggtttaccccccatgtctctctttgcaccattaatggccttgtgtacattccgttcatttactttttttaaaaaaatatactccccaattctgaccacccttaggtcaacatagttagaattcttacaatatttgttaccaaaatacttattttctaaactgaattttattaaagactccaaagtctaatccttgaaatggtaattcactaagtactttaaacctttgtaggatgagacatatagtacttagcacatttattcaaacattgatttattcttacttgctgaacctaatactagtaaagttactagtattaagataggttatcttcaattgtgaaccattttaggtagttttagtctcacccctttagagatcttctttactagatctctagttagtggctttgtaaatggatccaataagttttcacttgatctcacataggatattgaaatgactcctctttgaatcaactcactcacatatccatgttttagactaatacccattatatactctactatacgctccgataattgttgcttgtttatcacaatatattaaaattgtagatacattctctttgataattggtatctcaacaaaaaaacctcttaaccattcaacttcctttctagtggcagctacaactatgaactctgcttctattgtggaatgagaaatgtaagtttgtttcttggacccccaagaaatcaaccttccaccaagggtaaatacccaattcgttgtggaaaaattatccccaaggttggctatccaacttgcatcagtgtgcccttccaaaattgaaggaaatttggagtaatgaaggcataggttttttggttttctttagacaacccaaaactcttcatattttaggtagttttagtctcatcccttgaccaaagtggattttaaccctagacacctaacatggctttctttcttggagattcagtcagaatgggtactttagaacttttacacgttcctaagtattttaccaagggaaatttgaatttattatatgcatacatttggtgtgaattaaatttttaaacacaaccttactaaaatttaaaaaataggcacacttatatattcatacccattatacccttccctcttctcttctatactgatagtgatccaatgggggtccgatgggggcccgatgctgactcgatgctaccttattttttttattgtttttgtacataaaaaaaaagtagaaaaaagtgaccatcggaccactatcaagccaccatcggacaatatctacatttaaagatgttaagctccattcattaagctcatcaagaaggcatcgggccaccatcggaccaccatcgaaccatatcatcaggctaccatcagaccttcatcttcaacctttactcatttaacaacaggaagacatcagacaactatcagaccaccattggatcaccatcggacttgacaaaaaaactagttttttgctcaaaactcggatctggccattttcgaccctaaatgtaacatctactcaaaaataacaaacactaatcatataatttattcctttgacaacattgtcgatggtgaagccgtggttgatggagaagtcgttgggtccgcggtagtcattgggtttgtggtcagggctgaccttgagctaagacgaaggaggcggccgccttaggcccccaccgctca

SEQ ID NO: 381571 - DNA, 1998 bp, Cannabis indica
cacccaagattcttgttcttgtgcaagaggagttgtttaacttttccaaaattctatctatgtcctttgttgaattcttctgtgaggctctccaccattacactgctttgtctgactcacttctgcttagtcctaatggtggacataaaaagggattgagaagattgatagaaaatgatattttgggaataaggattttggatagtttgagtcaattcccatgtgagaaggaggagaaaatgttgtggaaagatgggttagactgcttaaaaggattcaagccaattccaataagttataataacatttcccaagccaagttcctggtgagcttattcagtggagggtattgggttcagcatgagaaatgcaagttgaacttgtgctggaagtcaaaacctttgactacagcttccatttgggtgccaataagaaaataatgtaattatgtaagcaaagtcaactctactctctctctctctctcttcgaatatatgaagcagtgtgtggtaggttttcagtgcgtcattacattttaaataaggtagttaaggcttctatattgtgtttatatcttcatatatttttgtcgatgtagaagtgtatatgccatcattttgataaaatgattcttcttgttctatttctacttgtcatttgatttcagtaagattcaagtgttctgagatacgctaataaataatatcccccaaattatatctacattaatatcataatgattcatgaatatagttggtactaccaaagtgaaaatcgaaagagcaaggcatcataaaggatactgctaaaaactcgtcttaaggtctctgatgatatatatttgacatgtagtttaccagtgattagtaaatggagcagtatcaactatagtacttataattgtcccaatctacctatatatgtagttttgactgagtcacttatgatgtataaggcatcataattagtaaaatacaattagagttatatttggagttgttttatttgaaaaaagtagttgttttcactaatattatatgtaatatataattatatattgaactgctatagttggtgtgttaggatttggttctgccggtttatggtggtgatcccacaacagggcaccagaaacaacaatttaaagtagatcataggccggtcatgccacgtaatcaacttaggagtgggcgcaagtctgattttggaattttgtgtttgattgatcacgattgcccatcttttttggagtattatttaaaaatagccttctatatgttagaagtacttaatgagagtaaatttgtgtgtttgtcccataatgtataataatttgtggtgttacatccagttgctattaaattttaatcttatgatagaattttataattaaaaaaaataatatttagtgtgattttataaaataaaaataataaaaaagagcaatgctttcttgtggatcaatatattgatcctataatcaaagttgtttgatcttggagatgcgaatttccatgtaagtgtaaataaggatcatcttcaaaattaaacattttttatttcaatattttcaaactttagactagaaacttttatgtcctcttgtcgtgacgactaccataagttaactcttctttgacgagtggattctaactagtagcgcaagccaaagttttctcctcttaacactgcttcatcttgaaaaaaaggctacttcctactactctaccactaacaacatattctagccatctatttagagggaatataacaagaataatgcataattaaatgtaatttctataataccactactacaatgttagcttttagagacagttttttcaaccccatttataaaaaagaaagctaaagggtgtgaaaatacccgctaagttcaaaattgacatttagaggcagttttttgataaaaaccgtaggtataaaattgcattataccatttagaggcggttggaaattaaatataattttttttt

SEQ ID NO: 381572 - DNA, 3229 bp, Cannabis indica
agtagtccgaccataacggaggaagacgaataagaaattcaggagaactctgaaaacatgtgcatgataagtacttggcttcagtcatcaaaagtcaattatattattgatgtgaaagaataagagattcatgagaactctgaaaacatgtgcatgataagtcacttgattcgccgatgatgaaagaatagaaaacattgtaaggaaaactgtcaattgaaatgttgggcacttgtcattgtaaggaaaacagagatttggagtctgaacctatttagttaatctgatatcatatccaattgataccattaagaatgtaagaaagagcagaattattcaaccaactcttgactaatgctgaattttattacaaggaaaaaataaaataaaaaaacaatatacacttcaagctttttaggaatagatcagctatgaacttacactgactgggtatgagtctcacatggaaatgtttatataataagcttacatatccatggcagaacacattcacaagggattaaaaaaaggtggcccagcttctacttcattgtttcttagtacattgtaaaagaatttgaaaaaacagcgaacagacgcgggcagagactgggcaacccgaaagcatactcgattctctgtcctcgtataacttaaaacttcaaggctacaagaaacgggcaactactgaaaaatttctacccgccaactgcagccaggaacttgtttttgcttacaggttcttcatgcaacactaccacatctttgagcttttcaaacagctcctcaagctgatcaacaccaaacttttgaaagtctagtggtttcttgtatctttgctcatatatttcttcgaaacaaccaacgaaaattcgacaagaatagctgactagtatctcttgcagctcgtatttaaactgctctagttggtaatcgttatcacattgagtcattgtttccaaattagtcttttcttggttcagtctttcatcgtgttcttcagtgactattctttcctcgtctgacaactcatcggatgaaacattacctgtgacattatctgtgcactcttcctgagatgccttccctttcttattatccttccttgttaaaatcataggtggtgcacttgggcctgttttccagttccaaagatagacaaattttctttggcctttaccgtccacagctattgtgtcgctcatcttattgaaaaggtttacaagcttaactacaccatattcagatacataaagaggcctcccgaaaactttatggtagtcagcaggaactcggttgagaggaaggcatcctcctgaaagttcaagcaactttactagctgaccctttaggccattcaagtccccaggctgcacccataaagtagagtcactcagatcagcagaaatagcaggccctgcagaagcttcattcaagccagacggtacactgtttgacctcagagctgaagagttgtaaggcgttatataactactgttgtattctgtcagtgactgtgacactatcgacaaatctcttgagctgtaataactttgtgagacccccctatgtacaatggcttcttcttcattttggacattgtcattgatctgacaccccatgaagtaaccagctggtccagcacgagggggaattaaagccctagaaggtggagcaaagccttccccgcgagccacgcttggccagtcccacacaaactttccagcattgcatagagcagatgaaacaccaaccccagaagggataacaagaatcacggtataaccccgttgaccaagtatatgaagtgctggagcaaaatcaacatccccagatattagcataatgaaggaagggggagggttgtctagggcaaataaaaacatatcaactaaaatggccttatcggcagcatcctttcttccatttggaacatcaatgagtttgacaccagttctctggcaaccctcccgaagcctcctggggaaggcattaaagtcaccataggcagaaaacgtcgtaacaactccttcaattaaaggatgcagcctcaaagccattctaatattaccagctacatcttcagggcgaacatcacttgggacagggcaattctcaatatcccaaaggatagcgacgtgaccatcagaggagcttcgacttggctggttgaatggagcttcgagtgtatttgtgcttgaacctgcaatatgtgctctttgctcataggagtccaaacgcactagtgacgctgatgtatttgaataagccatgactgctcaactaaactaataattctgtacatggaggataagcaagacaaataatatagattaggattgttacaagctgatgcaaaaaatgtgcaagctgcagataacactgactacacatataagaagcacgagtgctgacttagccaatcaacaatttcaatatttgaggtctccctctgatataaaaaggaataaaaagagtcgcaaatatgacagaaattactgtgaaaattaaggcaacacatcggaaattataaggcacagaagtttcacatgcaatagatatcaaccttgcaattactgaatctgtgttgtactctgcatgcaaagcttttgtatatagatttatcacagagaaaccatggtcaagcaaaaccatgaaaaataggactaaacctaaaactattaatttaagcatgttagcacacatgtacatctgtaatttcatctccatacccactagatagcattaacactatttctagttttctacactgtgaacttgaaggtttcaagttctacaaccaccaaacgagtccttgccaaagggtgactctaaccataaacattataaacactaatgtcttaactaattatctatcttattaatgttaggccaaacttttaccaaatagttcaccagaatccatggcaataaacataattaattacatatgtgttgttccttatcaatgaaagattgacatgaaataggaatctaaaaaatctcagctaaactcaaaacaagcaacacaatatgaaaacccattgtaacacatgattccaacatgattttcaagtaagctccattggctgcataggcaaacgacataccatatatttggaatgaaaaacaagagaaacaatctgttaacgacagctgctaacaggaaatttcaagcaactgttttccacgcatttgacaattgcaaagaaaacatgtaaagcattca

SEQ ID NO: 381573 - DNA, 716 bp, Cannabis indica
tttttttttttttttgtgtattgaacattaaatcttttagagcacatatgataaagggagtaatattatgagtaagtttaaagtgttaaacataccgcaaaatagatgataactaatgtaaaagtccacctgcaaataaattttgtattaggctatgccatgaattataaactcaagaaataaaataatgataataatcattattaatatgtctcaaatatataaggttcttttcttaccagtctaatgtgttggtattatctcgacaccatctaactagttttttttttaaaaaaaaaaaagaaaaatcttacttttgtgttatttgctccatttactctgttttaataaaaataataaaatgataaacagagttaacaagaactaatttcagcacatttgttttcctcataaactgagttgctgtgacagttgacaaaacaatgaccatacaaacaatatatgagtttcacatagaatagaattaaaaatccttaaagaagaggaaagaagaataaaattggaaactttcataaatatgtcttgttcaaaagtaagaatttcaaatgtaatggagttaaccattaatatatttataagaatatggaccatcttatttattggcaattctgatttcactcctgtaatcaccggaagcgtataatcattacgtcaaagcaagcacaaatatgcctcatgagagagagagagagaga

SEQ ID NO: 381574 - DNA, 1595 bp, Cannabis indica
aaaaattggacaatgcattcaactcaagatattgtaaaatacaacagagtgaatttaacaagcagttataatactagctatcttctccaaatatccatcttcccaattcaacgtaaatacatatcaataggttgaaacgttgaatattggaatgtataacgttgtgaaactatcgagtactgagtgggagaacattagtataatatatagtttaaactttgaattacctgtcttcaccaacacaataaatccattcacctttaggtgaaacacaagctgccacaaaatctccaccttctcttttacctgatgaaaagctcttcacaacctacaccgtagtacagaaacaaactcaataaaattaattacttcataacaaagtaaaataaaaatctcataactcctaaaaccaataaggtaagaacattaaaagttgggttaaatttagatacatgacaatacattcttgttctaatttatgctgataatagatacctgtccttgaagagtcatgatgtatatagatgaggtcttgttgcatacaatgatgtgttcggactttttgggaaaagatgaacagaattcacagacgcatcgccaccctataagccagaaaggaaaacaacaattaggaagaagaaaaaattctaaatctataaattacagtatctcacactcacaagcatgcacacacaacaacgcatgtgcatgcacacacaacaacgcatgtgcatgcacacacaacaacgcatgcgcatgcgcatgcacacaacaacgcatgcgcatggtgcaaacttgcgcaaactcgcgcaaacttgcgcaaactcgcgcaatccataaactacagattttaacaaatgaatacccttagaggaggaggtggtttgaatgtctgcagacattctgtagtcttcatatcccacacctataaaacaaagccaaaaagaaaattaagaccaatgatagcctgtattgactcaaagaagagatgatgtaggctagtttcagatcatcatcggtgatcaaaacatagttgaaaaactcactttaaccgtgcaatcactagatgcagtaataacacgagctccatcatgtgtaaagattgcatcatttacataagatccatgacctcggaattcctttaacaacttcccagatttaagaccatgaatcctgcacaagaataccattttattactagatcagaaagaccatgaagggaactgatgaatgtgacaataaataacataaagaatgactgtatacagtgacgaagccagaaatttagttgagtgagggcttgaataaatattaagtcaaaactaataaaaatgatgataaatgtatctttcaaattttcatctttaacaaaataaaataatactattgacaaaaataaaataaaatattatcaatggtattgttttattttttaataaagtattattttttttattatttgtattggactacttttaaaatgggcttgattagaataagaataggctaatgaatcatgattaagatagggaaacttacaaaaatactggaatttgggttaagttttacaaaaatactgtcacacggaaaagttt

SEQ ID NO: 381575 - DNA, 2842 bp, Cannabis indica
tttttacgtacctacggaaggaaaaagaaaggcaagactttgcccctccctcacatagtggatagagcaaaaggagagagaaatggaggcagagttattaagactacgccaccgaggtgagtatggaagggaaaaaacagagtggaagtgatgcagaaccatgtctctacagagcctggtcctggtaaatgcaactggcaagtctcttgactcaagtcctattcccaagacaccaaccgaaaatccgaacaagattatggatggaacaaaagctaatgtaccaacaaatgaattactagctgaagttctttatgtggctgttaatccatttactccaaggggaaagaagtctcagcagatggttggggactttatatctctgtacagaagcttggtataccggaatggtcccaactacagactatacaacaagcttcaatctcgtaaaaagagaaagaattcagattctgaatctgggtcccagaaggaagatcaaaagcagacagctcgaaagattactgaacaagagtctgggcgaaagaaagtcaaaaaccaaaagatgggagtggacgagcctaaagagaaggggcgattcaaactcctgatgtgatgtcggataggcgaaaaccaatgaaaggtgctggatctccagaggcaaagaaagtagataacgagagtgtggaaggaaagtctgctcttttcgttacatttggcccaggatcctcactgccctctaaagctagtctcattgaaatgtatggtaaatacggggagttggatgaaactgagacagaaatgttctacaacaatttttgtgcccgtgtttctttcaataaaatctctaatgctgaatcagcctttaatgattcacaaacttctagcccttttggctctgctagtgttagtttccggcttcagtatcactccggcgcattcaagactcgggagctcagtgaaatatccaggcggcagagaaatgcttctccacttaagaacaatgtcaccaccccaaagaagcggaggtcacagccgagaggaagttctgaggcagacctcaatttcgtaaaagagaaacttgagaagatctcttcaatgctggaagataaaacttccaaagtctcgccaaggacgaaatcgaaactacaggcagagataaatgaactgttggagaaggtaggcacaatggttggaggatcgtcatcttaattaagtagatttaatctttaaatacctgtttacacagtttcttttagttttattagccagttgtctatgcatctctgctttttgtataggttgtaggaattcacttcatacagatgagtgtcttgtggtggtcttttgtaactagttgctcaagctttataatgtagaggtccattttcacagacaatttcaccctatatgaatatagatacacacacacatattatctatatatgatagagggctaagcgataatcgttctagctttgtttttttcttttcttcttttgctttaaaggagatgacaacggtccaaatatgtcctctggaatttgtaagtctttccttcttgaactgtttttaacttttccttggtcattattttccccttgatttacttccaaattttaaattcaacgacagaatttaacaacgattttatttttcttccagagtctattataattcccttcctggacttcaccgtacattaaatcctcgaacaaaatcttttcgaaatttcttcaattgctaattccaataacaaaatctttttctttatgcccttttcttgtgtttcttccttcatacaaggattactgctacatgtgcaatctatttcagacaatgctgtgttagggggcgttttcttttagtgatattgctttaacttttgaactggttttaatgttttttcttttaccaaaagctgagaaacaaaagtaacatagctgtaggggagcaaaaatttagtgtaaatgtttgaatgtacattgttgaaaaggtgaaactattcaagcagaagattatgttctgttggtgaattagtatgatcagatgagccagagaacatcccatcccactgagggaagtagatgaaagtgataggaagagtaaaaacaatcatcatagctcccatcaaagaaatgcttgtctgcttagatagtttacaagagtccgagaacagtaacagctgtactatcactgccccaacaggtcctccaccccctgtcatacctgatatcactccaagtgccctgcaacgaaaaaacaaaaatttataaacccaacactattagattccttaatatccttaactatgattcattactaggatttactcaacattttctcttgtcatcaagttgtcttcgatttctgagcttactaagtgagccatgctgtttgacgtggcttatctgcagtaaacggtccactccactttacaaggtattttcttaaagtttacaaaccatttgaaacaaataggttcctgatagaaagaagccatctcacatatcttctgttgccttggcagattttcagagcaatgtacttcatcgttcaatgaatttggttattggtggaagaagataaagatagaagaatagtaactattatcacttttcttttcaactttttattgtgtgaattccattaaaaaattattaagattatcatgaataaatggattagttgccaaaacaagtttcgtttattattattattttttttttaaaaaaatcactattagtcttttttttcccttttcaaaaaactaattctttactaaatattttgtggaatgtgactcatgaggtagttttttttttctttctttctgaaattacctctt

SEQ ID NO: 381576 - DNA, 4260 bp, Cannabis indica
cggctttaatgccctttgtttctgcaatcaatacaatagggaaagttccattttttaagcaaaggaatatactggaagcaatttcctattggctaaagcaatgacagaaagatattctttgtggcccacatcatgatatcaaatcattttcccaatcattaataacggtaataggatctgtctagtcagcatccttgatttcatcttctaattgggctgacattgggcctttcatttcaacatgccccctcaagctgtgctgtgatgagtgacaaacagtaagcttgtccttaaggtaatgaaaggctgtaatgggcagagactttgtcaatatgtcagctatttgttctttggatggtatgtatctcacttcaactgatttgttcatcactttctctcgtacaaagtgaacatcaatttcgatatgtttggttctcgagtgaaacataggattggatgcaagttgtcgtgctctagagttgtcgcaccagattatggctgtgcgattgtgttctattccgatttcagtgaagagtgattgcaaccaagtgacttctgtgcaagcttgagcaagatatctgtattatgcttctgtgcttgatcgggcaacagatttttgtttccttgaactccagctgatcaagtttccaccaaaataaacacatatacctgaggtagattttcgatcatcaattgaactagcccaatctgagtcgtaaaagctttcgatgatgggattagttgctttggtgaattggattccttcaccaatacttccaacaatgtatcttagtatgcgcttgcatgcaagccaatggttttgggttggtgcttgaaggaattggctcaatttattgacagaaaaggcaatgtcgggtctgctcaaggtaaggtattgtagcgctccgatgacacttctgtattgagttatatcttcaaacggtgggttgtcctgcaaatggagtttgttgctttgaatcataggtgtaggactttgtttggcttccaacatgtgtgttcttttgagaagatccaaggagtacttggtttgagacaagtgaagtccatcttgccccctacttgtctcaaaatcaagaaagtaagtcaccgagccaagctttttgagtgaaaatggctggttcaattgggagataatctagaggacacgggtggaactgttgcctgtgagtaaaatatcatcaacgtaaacaagcacatagaggcgtgcatctccttcagataaaaagaatagagaggtatctgagactaaatttttcagtccaagccgaagaagagcagtgcgaagagtgtcaaaccaggcccttggggcttgtttaagtctgtaaatagctcgattgagttttcacacagctgtaggaaactcgagatcaacatagccaataggttgagacatgtatacctcctcttccaaagtgccattaagaaaagcattattgatgtctatttgttggacatcccattcattggtgacagccaaggataggatgacacgaatggttgaaggcttgacaatggggctaaaagtatcaaagaagtccactccgggttattgttggaagcccttggccacaagacgtgctttacagtgttgatgagtaccatctgagttgaattttggccgaaagatccatttattatcaacaacatgcatatgtggtaatcggggaacaaggtaccaagtattgttctttttgagtgcaaaatgctgctcatccatggcatgtttccaaaccggaattgttaaggctatttcaggtgtggctggggtggatagggaaagggctgggagatgagggttttggagaagagaggtaaagaaggtgcggggtttgaagatgccggcttctgatcgaatgaccataggatgggagggtacgggtggtgcaatgttggggcagggcagatttgtggttgctggtgagatatttggagtgttttttggtgtagtagggaagtgagagtgactggatgaggaggctggtgataatggttgaatagggagatgtatggcaagagggatggtggtgtatgatttggatgtagtagagttttcatgctgagatttggttaagcacagtcggatattggagaatgagaaggagccgtgggacctgcatcacatggatttatgtcagttgaaaaatcagtagcatcatcaacatcattatcctaaaatgtaggtgaggagataaatgggagccaatgattatattgaataatcagaggtgtaggagtggtgtgatctagtggctgtccaaaaccagtagcaaatgaaaattctgattcattgaacgaaagactatgagctatctatagacgaccatttaggtgaagacatttgtatcctttgtgatttgggctatatcctaggaagacacatttggtggatctaaaatcgagcttgtgagtattgtaggcacgaaggtgagggaagcaagcactcccaaaaaccttgagaaatttcagatttggggtaactttaaacaatttttctatgggggatttgtgtgccatggttggtgtggagagatgatttatgaggtaagtggatgtgataaacgcatcccaccaatatcttaatggcatggaggcttgtgatagcaaggtgaggcccatttcaataatatgttggtgtttcctctcggatttgccattttgggcatgtgtgtgaggacaagggtgtctaaaatgaagaccaattgattctaggaatgatgctaagtttcgatattcacctccccaatccgattggagagttttgattttggcatcaaattttctttctacaaatttttagaagttgagaaaggtgtttttaacattagattttaacttgagagggaaaatccaagtgaagttgctatagtcatctatgaagtgcacataatatcaatatccttccttggatagtatgggtgagggaccccatatatcggtgtgtatgagctcaattggtgagtgagattttgtgtgtgaggtgctgtaatgtttgtattttgatttgcctatgtgataagcattgcaaaatggtatggaatttttgaaagagactttttcattaatcaacatgtgttttagtacattgctattgggatgaccaagacgcatgtgccacacattgatatctgaattaaagctagactcagcaaacaaagaaagacacctatgagattgactcgatttatctgttaatttgggaagtttggcagtatttctgctcttggaggaaactgtaaaactggagctggtgtggacaggaacatgtgatgatgatgatgctgtgagtttcaattggtataatccattgttaagcactccccgtagcacctcctcctttgatattagatcattcacaacacaaaaatcagcataaaattccacatacaccttgttatctttggttagttgagatatagacaatagatttttagagatttcaggtacacaaagagtatcattgagcactaaatagcaagttgagttatggattttacttgagccagatctagtcacgtctaagggaaaaccattaccaacaagtagttgagtagtacctttcatgtcagttttatgctgaatgttggaggactcagatgtagtgtgattggtggctccactgtcgatatactaggagttgtcgacatgagcatctgagctattaaaaaggcttgttaatcattgtttgagtgcatgctattgctgtttcgagaggctgaaggttcgctggaaccaggagctagaaaatagatgtcgaactggcggtatcattttgaaggaatgtgcccaggtttgctacacaactggcatataggtctgttgttgttggagctccctctgccgcgtccacgacctctggaattgtaagaacgaccaccagaagactgattttggttgtgtccatccaatattgagggatctgcgaatctgtgtggcaaattgagcagcaggcatggaggaatcgccatgggttgagttgagttgctcaaggcggatttcttgactctgcagcatgtattgcacctcttgcaaagatacttgatcatgcctaaaggttagattcaccacaagcgctttgtattcatggccaagacctcccaaaatatacaaaattagatcatcatctaagagtaattgacctgcagcagacaaaccatcagctatgtttttcattttcaaaatataatcatgtatagtaagattgccctttttcagagattgaagttgatgttgggttttatg

SEQ ID NO: 381577 - DNA, 4804 bp, Cannabis indica
cagaagacgatctagacctccgtcacgttaggatggattttaagcaccccccctccttccatgccctattcactttaggtattattctctttttcttttctatttaaggttaagttgtcttagttcagtttaccacatatccacttctttctctttccctgccctgtgttttatgccatatttgttcatcactatgtccactctccctgatacccaatcccttcaactcactgaggaagaagccctcatccacgactttgaccatgtatctattcaccctgaacctcaatccaattctttctgcttggttgttaagatcttatcccccaaacccttgaaagccgattggattcaaaaagcaatgaaagatgtttggattgcctgatgccctttctccttttctgaatatcacttcggaatgttcctggttcagtttggttgtgagggtgaccgttgaagggttatggaaggccagccctggcacttcgatcgttctctcatgattttcaccattcctgatggttttgataccatcctttccactcaactttgctatatacctctctggatccaggttcattatgtcccgcttggctctcgctcttatggtctggctcaatttgtggctgacactattggagatcttattgaggtgcacctggcctctctttatgatgctgttactccttttctgcgtgtccgtgttcttctcgacacaacaaaacctctccaccgtggtttgaatgtccatttcaggaagctttccctcaccaagtggctcaaacttctgtatgaaggtattcagaattattgttaccactgcggcaagctggatcacacctttaataagtgtgagaagtttctccatcactgtgaccatcatccctttcctcccagtcttagttacaaagacactcttcgagccccagccaaatctatctacaaaaaaagcattttcgagctctccacatccattcctttcgaggaacaaccctctctctccaatactacccacttcagccttcaggaaaatatggaccatttcattgtcccaagtactgctgcacctaccctccctactgcttactccactgctcacactacagttgtcccttcccccactttattcataccaaccactatatgtaccacttcgcaacgccctacataccccactattaactgcccactcccctctcgccccattatgtcttccaccgtcactccttccacctccaaaggaaaggctcccatgtaccccgaacccccaaggccactgtccatcaatcttccatcatccaaccttgacactcctatcgctcctttaaccactaggaagcggtctttcactcgacagagttgtcaagtgggttcgtcggttcgtagcatgctgaaacaggctcgagcctctcattctgattttgcagttgttccttccatgtccgacaacgaggaaacggcgggtgttgcacagcaaccccgcctagaaaaatgagtcttctgagttggaatgctcatggatgaggaagttcccgagcattccataacttctccctcctttgcaagcagcatcaacctcagatttttttttgttatggaaactaagcttactgctcattccatttttgtttctagggctcagttgtattttgctaatgttcttgaggttcctagactaggtttagggggagatttgcttctgttttggaaagatgatgtgtatgttaatattttgtcttactcccttcatcatatcgactgtaatgttactataaataaaaatatctttcatttgacttgctactacggctcgccttatatttctgataaaaacaattcttggactttacttaatcgtctttatgatgttgctccttttgctctgtggcttattattggtgattttaacgattaccttggatttaatgatcgtaacagtcattgtttgcctccctctcatgccatgcatcacttttagaattttctaggcaaatactctctttctcctcttcccttctcgggtagccgtttcacttggaaacatggtacttctttggaacgcttagactgggctatcgtcaaccagaattggaacaatcttttccctacggcttcccttcaccatttgggtttctttggatcggatcatagggctcttaaagtggtttttgaaggaaatcccatgatatgtcgtcgtgactctactttttcgtttcgaaaaccattggcttcttgaacctgatttttctgatcttgttactcgtaattagactttggatacactctcggataaccctgttcccctctccaaagttttctctcaaagcaacgtaattgcattgcttcaatgaattcttggggtcgaaataaaaataatattactcgggatattaaacgcatccaatctgatcttgaacatcttttggctggccctattatttcaccttctgaggttcaaaaggctaatgctcttcaacgtactctcaacaacatcatgcttaaggaagaggttttttggaaacaatgctccagggccaactggctcaaagctggtgataagaataccaagtacttccatagtagggcctccactagaaagcgtaataatttcatcaagttccttgctttggatgataattccaatgtcactagcttaagtggtataactaactcttttattcagttttattctgatcttttctcttgccaaggtacggaccctgaagccatagccacaacccttcaagggatttctaagaagatcactgctactcagcaggcttttcttgccaactcttttgactttgtagaggttaaaaaagccctttttcagcattctggggataaagctcccggacaggatgggttgaaccctagcttctaccagaaaaattgggacaccgtgggcattgatctctgccctgctgctttatatgtccttaataccgacgctcaccttcctcctgtcaatgacaccactttagttcttatccctaaggtcaaaaatgcttctcgtatcaaagactatcggcccattagtctttgttctactttctataaggttgtgtccaaaactatcgctaatcgtcttaaatccatccttcctgatcttatttctcataaccaaggtgccttcctaagcgatcgcataatctttgataatatcattattgccaacgaagttattcacgcgatcaataatcgtaaacttggaaaatatggttgggcggctttaaagcttgatatggaaaaggcttttgataaattcgaatggacctttatccaacacatccttcaccactttggttttcctccccatttcatttctctcatctttcggtgtatctcttctgtttcttttcgtctccgtatcaataagtgcctttcatcccaaatctttcctacccgtggaatttgtcaaggtgacccactttcgccatatcttttcctccttgtcacttaaggcctttcagggattattaactataaatctcggtcgaactctttccatggtatatctatctgccgctctgcccctcccataacccatctcctgttcgccgatgacagtttactttttaccaaagtttttgcttcgtcttcttctgcaatcaaagacattttgctcatctatcagaaggctacaggtcaatcggtcaatcttcataaatcctccattcttttcccctaattccaattcacatgaccgagatctatttcgggattccctgaatatggataacaagcatttcattgacaagtatctaagagttccacagtgtttttctagatccaaaaagtcttcttcctttttcttctgcaaaaagctagctccaaattgtcttattggaaccaaaaccttttctccagagctggtaaggagatcctcctcaaatcagttattcaggctatgccttcttacgctatgtcttgtttctgaattcctgtctccatttgtaaacatttcagtgggttaatgtctaatttctagtggggctctcttggccacaaacataaggttcattggaaaagctgggacaatttgtgcaaattaaagttttttgggggtttgggttttcgtaacattgttcatcacaaccaggccatgttagctaagcaagcttggagaattttcacttctcctgattctttggttgcttcattgttgaaagctaaatactttaaacataatgattttttgcatgctgctgttggtcactctccctctttctgttggcgtagtatcatttggggtagggagcttctcattaaaggtcttatttggaaaattggagatggcacctcggtcaacatttctgaatccaattggcttcctcacggggatagggttactttcaaacctggcatatctcctccttcctcaaccatttcttttttcataactgaggacagacattgggatgttaccaaactcaaacattactttgacgaggggtgtttaattccattctaactgttcctattgatccttgcaataatgactgccttatttggaaatatcacccgtcaggctactttactgtcaattcttcctaccatttgactaattcttattcttctgctcctggctcctcaaatccagctccttataaatcttggtggtcttctgtttggtcagccaatatacctcctaaaattaaacattttgtgtggaaagcttttaatcatatccttccttccaaccttaaccttttccatcgtaaatccaggtcttctcccttatgttctatttgtctttctcatcatgacactgttgggttttatgccctaaataaaactcttt

SEQ ID NO: 381578 - DNA, 6771 bp, Cannabis indica
gttgtcatgtccattgttcgggctttttaccaccatttgttgttgttattattattattattctcttgtagtttgggaattttggttgtcttggacaggggcttcagggctctttcctatgctggtactgtcgaggtgaacgttatcgactcttcgttccgcctcttcaagttttataaacccattagtttgatctataaattctttcattgaccccatcgtgagccttttgatgtcagaccaaagtctacctttgggctcgatccttcgtgagtcaaagtttttaccttggtgcatggcttctgtcatgaattagtgaatataattttttaaggaatctctccatatttgttttactcaggcaggtctttgaggtgagcaaatagttggcacgaggaggagatttgagtgtagaactcatatgcaaaggcgttccgtgagtcaaatttctcaggtgttagtttaaagtaccactactgtgcgaactctaccaaaattgttggaaagatcctacacttgacgtccccttttactcattacaggtcggtatgtatctcaaaatacttgatgtggacatgggatcttcttttcctatgtatatattccaagttggcattttgaacttggtcagaatttctaaggaattgatcctaggagagaacgaagaacctcgactttgatcgagttttaggccggtcaggctttgtattaggcttttaagtaaatccaattgggcttgtacccttgcatctatttgtgccacctgttgaccgacttgtgccaccggttgtttacttggaactctatttagtacaaagttctttggttatttaggacaaagtttccttgattgttcaggacaaagttgccctgattgttcggttggtttccctatggtggggtaaagtttgattctcgattttctcttcttctatttaggtcatcttgtaagccatcgccaggcctcaaatccatccttcaaaacacagaatcagtcctgggtctcctaacaacattttgtctttctgtcctttcttgcctcgggagatttccaccattgtggccattattgctattattctggtcatcattatgattgttgttttgatcggcatgacaattttcacacctttgttgtcaattgtcatctcaggctcgacctttagcctcgtcatcgtaatatccatcagagtattgtcgacgactagagactttggggtcatctatccttctctagatttgatgttgtttttggacgttgtttagacgctaatcatacacttggaccccttggtttcccgtatgtgggatgactcgtccctatgaacctccaatgggttgagtaggcgcctcatttcttcttcctttcgacctgggtcagatgttttgattgttttgcccaaagtaatgtccgcgcaggacttgttcatctgtgggtggcctctgttggttattcaaatgttccctctaacctagacgactaatccctcgactaggccttggttggttttcagaaagttcttctagctcataggcgataccttttcccttactgttgttttccctaggcgactgagcgttagtttgttgctgccagcctactgtataaattgtttgttgagttatgtggcctgtctcacctgacgattgatctattcctattgggctcacatcttttgggctttataatccatccactcttaaaacttgcgtcactactggtcgaaagcttgattcattgtggcacgagtttttcctggtcatggtggaggcagttagtgtggcttggaacctgtcctagaacttatcggagattttctatctctgcattatctcccaagtcgacatcaagttctccaatagaaggttggccaatgtcgactccagtttctccagcgtacgacctgttgtgtttccaaacacctacacaccaggagtaaatttgtgggtgccaatagtgatcctagccaagttcctaacctcccttggaaactgggtcatcagtccttgttcccactggggcattgttgcatggtggtaggcaggcattgggattgtccatgttggtgtttggaggcacttggacatttggatcaatgaccatcgagtcacgtggtttagtggatgaagctcttttggtttgaaccattattgtagtaaaaatttaaaatatagtatttttaaaatattaaatatagtatcttaaaaaataaattaagtattttttaaataaataatagaaaaaatacaaaaatatggtattattaagggtttttacaccacatactgaaattttttaaatttttgacttttttgctatgaggtagaatttttttcaaaaatactatggaagtgttatactgtgtattgtgttaagtttttactgttgttctacggttattttttagttgttctactgttattttaattgttctattttgttgttttatggttgttttataagaagacaataatttttttaaaaattttgtatgacagtataattgtaatttttttatccaaaatctaatatttttataaaaaccttaataggtccctattattaaaggtctttttgggcctggttggggccttgtacgtgggcctctgctggccacccttaagccggcccagattaagtgaagtaagatgagcagttggacatcatcatgctataataactttgggtgtattgttgatggaacttcaatatcacaataagtttgatgaacacacctaatcttttctttgaacaattatttttcatatatttgattcatttcttttgatcttataggtgtaactgtttttttttttaaatatagtatctacctacaacttttcatgtcaatcatctaccatctctcacttagatacttcaataaacttttttgttagctcagatctataatccttacaccgtatcaagtattatgtgaaatttataattccaaccaaaactcaatgagcatttttatacaaagatttgcatgtgctggtgtgattactgatgatcattgttattagatattagtagtgttaaacatcttctttaggtgacgttctacaattaattagtgtttcttaagttatatgaaactcgatacttaattacactaatagcagtgtgacaccgaagaagatactaggctccagtaatattttttagccattctcatcagtgatctgtggagatatagatgagctttggtcacaaattaaatgcttgttttgtaattaatgcttttgtatatcatatattggaatctaattaacttccaatacttatttgtattaaacttttacaaattttcaaaactatagacaatattttcttttaatttacataaatttagtattattacttttaatacacaaaacgcaactttaatctaaatttaatttattgaataaatacctacaatgtctaaatttaattttgaatttagttttaagaatgtatatttttctcttttttttttaaggtatatttttctctttttgaaagcaatgaataaattaattgagaatatacttatattagaagctataaatattatacatacatcccacaaaaaaaaatatgaatagttatcaagtcaaataaattatttatccatttaaaaagcatgcataactaattcataagtaacaaagattagggatactcctaaaaatctagataacaaacttataaaaagtaattctaaactctacaatgatcataaaatgaactctcataataaaagcaatcattagagtctaattatttattaattagattttataatttgagtcatcattaataaataaaatattattaaaattcatgtgcatcattagttagtataaaatattaattgacaaattctagagaaccatagagagagtgtgagaagccaaataatgagttgattatagtagcactctgtattgaagctatgatgaaaaatgcactctccaattcatatttcataacccaaaataatctaatgatttctatacaatacagacactatatatatataaaaaaaagaaatggctattacaataagcttttctgtttagccatcttaccaatttgcctccagctaggatgaacaaaaatcatgtattactagcagaaccaataactgtaacatgtcaaaaaaaaaaaattgacactctgtagttttatgacaaagataactagatcagccaaaattgagatcattggttttctttctttaatatttattggatttctgagagatatgagcaactaattcctgtaaaacagatagtaaagcttattagatcttttctaatattgaaaagtgttataaaaaacagtaattcgcggcataaaaatctaagtttaattttcgattataaataaatatctaagtttaatttttgatggtaataatacgtaagttatgtttttggaaaggtaaccacaaaaattctagaaatataacttaagtattattatcatcatttgcaactgaaagttaaacttagtatttatgctgcaaattactctataaaaaacagtgacaagaacgagtttaaaattacctgagagtaacgagcatgatcatgagtgaggtgagaagattttacaattgtttcccacttggtgtttgtcaaagaggtattagatttcaacattttggcatttgatttcggggtggtgtttaatttcttgcgtgaaaacgaactgtgcagagaaatcgaaggagcggttcgccaaagccaagactctgagggagattttggcaatggtggttggggtagaggagatggtaagaacaagctgtcatcaattgcaatttggtcactctccttgcttaaatttcctctactaaccatttcagaaaattcttgagcaagtcctagttcagagtccccttgtttaccaacactatttaaacactgaatatcttggaatattgattctgaaactgcttcttcttctgcacttgttggaatattgagctgttcctttgtatctaaacaacttgattttgattctgaactctcagcattatatacagaatctacataaacagtcttctcaacagcagggttcatgttcctatgattggctgttatgtcctcaaacttgttagtagttttgttataaagataattaggcttaatgttaggcaccttgacattgccatgattctcttctttgggaacaccaagaaatgctgctcgtctaaaaggcgattgagacggtcgattcctgtaaggcgatatgctcgttgctcgtgaaggcgttgagggagatgatcttcctctttgtagatcacatgagtatgtcaaccttttcgattcgctaaccaacttcttcttctcaatcatgtgaagttcagctgatcgaaatccacagtttgttttcggtttataagttgaatccaaagtatgctgagaatgacatttgtgacaatgttacttaattagaattgattttaagtaaagaaactaaaaatgaaaaagaaagagtttgagtttaaccttattcacactcttggtttcagaatgttttggtgtcctcaatttcaaaccaggaattggacctaagatgtttaatgaattcctaaaacataacttgggaaataatccacaccctcctcttgttgatatacttctagttttagtatcgtaatcattattttcatcttcactacctttatcatctccttctctataatcaccatattttggtactataagtctcttaagaccaacaactgtgttcacaacctctttaggctgttcaacttgtttcttgacagcataatgaggtggctccaacgccatagccttggctgcaggtaagaatcttttcatcatgaaatcgcgagtttgcggatcggttgaaaaggctccttcataaccattttcactactgcaattcaaggaagcagagtctttggaagaaaaggtttcaagtgcatcagaataaacatcatcatcaccatccccatcaccatcaccatcaccagggggcattgttggagtaacaacacaagcctcttcagcttctttgtcatcattattaaatttagcttttcctgggatttgttcccagttgaaaggaactgcaactggttttgttacttgctctaatttgaaggttggttcaaaaactgaacttttactcttagctttctttttattctctctttctgaagttcctaatggtttagagaatcttcttacagaccaaagtggtgcattcaaattaagcttcctttcagccattcattaactaacaaacaaacctgaaaattaaattgaatgatctaaaaccaaatacctctaaaattgaagaataattgtgtcataaaaactaaaattgaatgatctaagaaaatatcagagtaaatcaacaaagagaagaaaaaaagaggtaccttggtatgagagtggtgaagagttgagagaatgagtgagaagaaagaaaaggaaggaatagagagaaatgttatcaagaaaaaaaagttgggctcatgtactaaattgtgctttaattaataatatatttttatcttacttttgtttcttattataagtacatcaattatttatatgagcattcttattaggcggcattttctaaattcgtcgtcttgtaattagttagtgataatatttttttaaaaattattacattaaattatatagaatctgataattaattagaccaataataaaattaacatacagtagaatctctatttaaaaatactctattcaagaataacctctaatttgtta

SEQ ID NO: 381579 - DNA, 1542 bp, Cannabis indica
ccttgttgtgcgtataatatgaacatggcggtaaggtacttaattccctttggtgtgaactgcgccagagaaattttgtagtaattggctatcttcacgaagtagggatgtagtggcaggagagccccatgcttagcatatgggccagaccacgcacacaaaacctcgcctacttcattttcaagttgtccttcaagggaaggaatacatccacatccccgaggaggccctctttgtctaagttgtggaggcgcctttcagtgagtttggacggtggggatatccacatcggactgtcaggtagttggtatttagatagttcagcctcttcaaaatcttggtcagcataatcgatgcctaagactaaagggcaaccacaaaaatcataaggcttcttgtcctctgaccaccaaccggccccatgaaaaggcatgaccgcatacctttgcttgttgacctatttgttgacttcttgaacttctagatccccacttagtaaggggtcttctccctcaaagtctgacacaaacaactcatgttgcctggccataagctgggtgaattttggattgcatggtccaatcttacaaaaacttttctttgtatgagctagattccttgagtggaatggataaatttgtgtaggatggtccactacagtaacaacaatctttgccttaacctgagggcgtagtgacagttcagggtccgctttaggtaatgtttttgggatgtttggttggaccatgtaagtccagttagagggcaaatactccctccaacaaaagttgtattctctaatgtacatgctgtacacgtcacccccaattcaaactgaataaaagtggctttggacgtatgaaatagcctgttcaaattcctcgcatgacaacacctccctcctcgaagctagatgacttgcttttgcatgtgatgcacaaagccttggctagtcgtcaaaaattagctggagcatgttgttgtctatctggttattacctcctcaaaagtcgtctagggtcatctacaaaagaaggaaagggaggtagagcaaaatagaaagaaggttttagaaacgacctatatattctgaccaatggaacatatagatcaaatagaaggggtttcatcagaatgacgaagagcccaactcgaagatgatcaagattgtttgaacctctaaaaaagaaaaaaaaaaatacacctttgtgctatgcaaatgtaagttcgactaatccttaaggaaaacacatgatttgcgtatcaatttagccgattggctttgcatagataattgtatcattataaatcatcacaaagcttaaggatatacttaaataatgaagaacatgcatgcaagaaacccaaatttttgtaggaaaaagaattgaaaatttcaagcaagaaaaagaaataaaggtattaagatttggagagatatgcttctatgattaaccatgaagctggtgagagcttgacctttggtggccatgcttggttgtgaggtgcttttatgttggccgagtctcaatggttcacttg

SEQ ID NO: 381580 - DNA, 718 bp, Cannabis indica
aaaatgaataatgaaatcgttgctctagaattgattacctttaatggaaaaatgggtgaggaagcagaaacaaagcaaaagatagcgaggttgatagaaagcttatcaatgcgccacaaaatgaatttcaccggagccaatcagatacccaaaatttcagccgacaacatatatgaagttaatataatatctcttcgatttcggtagagtcaatttcgctaatgctagcttcttcttcttattattgttcttgcactgatcagagattgagaaaagaataatttctaggggggaaaggaaatgctggcgatatatcgtccgagattttggtgagagtggaagctttcggattgtattacagctgcagtgtttaatgccgaagtcagaaaagaaaaaaagaaaaaaaaatatgaaaaaataaataaatttacaggcgaggggacaagcgaatcgagagagaccgtatttatagtgtgggatgagtgttaacagcgccgttagatttgacgggaaaagcgttttaaagaatttgagtgagtaggcaatttggacataagggtccacatgtctaggtgatgtaatagaacggatctcttacgtgtatgggaagtagcatacgtggtggcttttgattggttaagatgtgaaagccctacatttttttttttttttggattcaagggtttatatattacacaatacataacttgggactcga

SEQ ID NO: 381581 - DNA, 7968 bp, Cannabis indica
ggtgttgacatgcaatgtcacaatagtccaaaagcaactgagattcacaagaaaattcagcatctcgataaaccaattttggtgcatattcgattgtaacaaccttcaactcgtgactattacacttgtaactatttttaaaatagaaacatttcaagtgttggctgttaactccaatgaacgacagttgctcaaagccaagttctcaattggagaaatatttgaaatgagagcttttaaggtgattgttttcaaagtaaactctacatgatggttatttctaattttcttgcaagaagagaaatatatacggtccaagggattaccttccactaccaaaggttcaagatttatggcttcaactttaatttgtacaacatgcaagaatataatttccaagaacttgaggcttaaactttgtaatcgataatgaacattagaacctgcgaattcatatttagataatcgcaatctttcaagagaaggagaactcaacaaaaacttagatagcacatcagatccttcaatatcccattgcttaacatttaacaatgacaaaatttttagtaatagaaaactatatgaatgagaggtatccaagtttactccattcaactccaaattagttaaatatcttgccttgtctagtgttttaggtaaggagtagtagctactccaatcctgataagattggtcatcacctacgaatagatacacttccttaattttattctcaactataaaagttaagcatttatttaggatagtagcccttcttaagtgataataacaaactgtatcaatctttaaactagttatacctgaatcaacaacaaaatgcatacttttcttaagatgttctaaaaaattatagaaatagctagacactctaagctctcaaatgagcattgccctaaaacttgaagttgaaaggaaagaaaagtgttcttaatatatttttattttctatttttaaaatttaaaaacaaaaataattatagaacatatttttattttctaaaaacacaatatttaaaacacaaagtttacttttatttttataattaattttttttttaaaaaaattgttacaaaacccatccttagcaaataaatatctttaaataaccatttttaaagatatgaacgatcccatacccacccgtagtgccgagtaccgatacaaatcaaagtacaaaccgcaaagagaggacacgtgtacgatcagaccaaaatagtgtacgtctcagatcgaaaatacgtgtttcttgttttcgatctgaaagattgaaaatacgtgttcattagttatagataaaacgaaccgcagagagcgagcttttcgatattacttatctttgtccaactacgcacgcttctttctttattgcaaatataaatatctttgtcaacaccttctttccctcattttcatccttcttcaacctattctgcaattcaacaacaggtctgctaattttctatcactctctttctaattttctaattcgtttcatttctctgattaaatttactcattgatttataggcaaacttttggttttctttattttgggtgatcgaaaggtcttaatatagaaacttttggtttttttttgtttgtttatttttgttattgggtcgctgagaaaaagttgattattcaatttttagttgattgaatagctttctgcctcgaaaacaggggaaatagctagtgacttgtgtatatgagttttgatgaaaatttctttacaattttgattacaattaatttttttaagtgattttaagttgtctttgtgatcaataatctgtagttagagattgtttagttgctaggctaagttaagtgaatttgaaactgtgctgtgttgacctcaactagagtggtatttttattacactgaaagaaaaaaaaaaaaaaaaaagtaaaaaatgggggtgaacttattttctttagttagtcatatgtggattttcctatatgatgcttcggtacttgggatccagttatataaagtacccttttgtttttgcagttaagatatgggaactgaactaaggtcggtggctgcaactctattcctatgtctcctattatttcctatggtgatttctgcatccaatgatggcttgatcagaattgggcttaagaagaggaatcttgagcggaataaccaagttgcttcccagattgataccaaaaaagccgaggctttgaaggcttctagtcgaaaatatcgtcttcatgcgaacctcggtgatcctgaggacattgatattattgaactgaagaattacatggatgcccagtattatggtgagattggtattggttcaccaccccagaagtttactgtaatttttgacactggtagttctaatttgtgggttccttcttctaagtgttatttatcggtgagtttttggtttggtttggtttgagttgttgtttgacctttatgggctgaatttgtgattgactcttaagtaatccctccaaatagtattttacaatcttgcatcttactgcaggtggcttgctttttccacaagaagtacaagtcgcgcagttcgagtacctataagaagaatggtttgcttctaacactcttatctagtttaagatgcacgagattccttttttcctatgttgctttcactattttaaggtttatttgaactccatacttgatttgtgaaggacattataccgtattttcctttcatcaactgtttgtaactttttaaacgcatttcagtagaagaactttattgtggatgacagagacaatattacggtttcttccattgcaggtaaacctgctgctattcagtatggaactggggctattgcaggcttcttcagtgaagataatgtgaaagttggtgatcttgtggttaaggatcaggtagtataagctgtttgtgtttgtatttaaaactataaatgcataaatatgccaggtattgtttttcctttgctaaagttaacttggtttttctctaggaatttattgaggcaacaaaagaaccaggccttacatttttggtagccaagtttgatggaatacttggacttgggtttcaggagatttcagtaggaaatgctgtgcctgtctggtatattttttcttccatactgttaataataacatcgtgttcggctgtgactctgtagatcattgtctcccagaagttggatgggcatgtaatcaatttttaatatttctaacatcagaattaatgcaggtacaacatggttaatcaaggtcttgttagggaaccagttttctcattttggttcaaccgcaatgctgatgaagaagaaggtggtgaaattgtcttcggtggagttgatccaaatcattacaagggtgagcacacttatgttcctgttacccggaaaggctactggcaggttcgttttctacaacttgataatgcttgtaaaatacatagcattactgtttagctaactgttaagatttttaacttttccattggcagtttgatatgggtgatgttttggttggtggtcaatcaactggtgagcaaattagaagtttgttattatgattatttttgctaatcatttgttagtttaatttattctttttttttccttctctatttgtacccattttaacttaagcgtccatacttcagggttctgtgccggtggttgctccgcaattgctgattctggaacctccttattggctggtcccacggtacgccactctttgtttattacttgtttaattgtatctggagtacactacctttggtatcccatgtgtctagttgtatatttctagaacttatctggaatgctcacctatcagtgacattgttttttattcttacatgcaattatgttttacctgctttctttatacatacaaacaggagaaaccttttttttaacaatcttgtgttccaaattcagcttagtgcattcagtatatattaacacttcgcttatactacatcaaaataaataaataaatacaaaataaacacatattgcttatgacttgcaattgtatgcttcttagtagcttcgataacattttggatgatctttcttttatggcactagtaactcttaatgaatagtctcttctgtcaactgctgcgggcacatgcttcagtatttatgtctgttttttattaagtgaatttaaatttcatttacagagtattattactgaactgaatcatgccattggagcttcgggtgttgtaagtgaagaatgcaaggccatagttgcacaatatggagaaaccataattgagagtttgacaaaggtacaatatgtaacatgctatgcttgatgtattgtgcctctgctattgtattttgtattaacactaaactgttatgtgacaggatcatcccgaaagagtgtgctctcaaattggtttatgctcttttgatgggactcgagatgtgaggttagattcagtcagctataatttatattttacatatcatgagtcatgctatatattgttattttatgttttaaaatttcttaacttaatgtttattttggaatgaacttttggtcagcatgggaattgagagtgttgtagatgagaatgccggaaaggcatccagtggtgtgcatgatgcaatgtgctctgcttgcgagttggcagttgtatggatgcaaaaccagcttaagcagaaccaaacacaggagcaaattctaaactatgtgaatcaggtgaaatagccctcttttcatgttcctgtgtacattttcttttcctttctatctacagggttgtggtctgactcctgtaaatgcacagctgtgtgaacggctgcctagccctatgggagaatcagcagtcgactgtgacagtttgtcttcaatgcctaatgttacatttactattggtgggaagaaatttgagcttgctcctgagcaggtattatacgattattcttatcttcgcttccggttatttcccggaaaattaaaatgattcataaaagttgcgttttatggtactgtgtatatatgcttatatgctaataatgtatgttattttgggtgactgtattcagtacgtcctcaaaatcgctcagggagatgtagctcagtgcattagtggatttacagctttagatgtgccaccccctcgcggacctctctggtacatctctaacatcttaaatatggtttggtacccatttgcttgatatttttcactgtactgtttggtcccgtcaattcttgtaattagttctgatttccggtgtttgattaacaacactatctttcaagcaagatcatagcttcttctatgtcagtattagtttttcaccaccattttcttagatgctaaatacctattcttcctgaaagtaagtgcatggattaatggttttttactttttacttatcgtcgtaatttaacaggatcctgggggatgtgttcatgggtcgctaccacactgtgttcgactctggcaacatgagaattggatttgcagaagctgcttaaatattagtgcatgctttcatttcagactctattgcctgtttgtatgttcttctgttgactccccttttcactcataccatacacatggagttgcataataatctttctatggtacttaaaagtgtgctaatatatgacacaaatatatgtaaatataagcagtgttggggccatcctttattgcttttactatggatgaaacaatttggatcgctgttttagttattgatccatcatgtattgcggcaatatactgggcatttggagctcaattttctgctacatttgtgtgtgtagattccatgctttatttcgatcatatgccatttactaatagtgagaagggattcaaactctcaacaaacggaaggccccgaatatgttttcttgttgctttgctttgtatgggcttgcttttattataccaaatattcggtggagagagcaaaccccattgttttaaatttagagaaattataatgactttaaatcatatcaccataagtaaatgtcctcattttaaatttagcagaaattgttgtttttacattatttattatttatccacttgagcatgatcttgccaagaagagaatcgtcaatatcagccaaatttatttgtttacctcatcttcgatcatcaatataataaccaacattaaaattccctggaatgagccatggcttggctggaaaacgaatcttcaataggtccttccataaatcttttctctcatccatggtattaaatccatagacaaaagtaacataaaaagcttcctttaacagtgaacatattgagaactctcagccagtacagtcactctatagcaaaattcctccgccaaagaatcaacaatctgccttctatgtttctactagtaaagtaatcccaacttttgaacttattctccatcatttcaactactttattgtccttaagcttcgtttcaagtaaagctctaactcctattttattcatactgcaaaagtctaacacagtatcctattttttcaacttattgatacccctaacgttccaacaagcaatgttacaattatccatcaactaataaaaacaatacttgttcccccttcatcaaattccctcatttcctttcccaatctaccatcagccacttgaagcacactaaatgtgttccctgacttgttagaattattgtctgcattagcatcctttccttccaccttgcttgaccttgctgcagctggtttttttgggtataatccattcatctcgaggctcaacttcttgttgtttccatatttctgagccagtgatcaatcgacttgagcctgccttcgattggtcacaagttgaagttgaaactagaacactatctttctttgtcactcctgcctgatctgagcttttaccctttttttttccttccctcctttgtcatcatctatcatgatatggccatatcccgagcaattcttacacttaacagggagccacccatactcaacactttgctcaactaactgatcgtgttcattcaagtatgggatagtgtgaggagcatcatccgtgctgtccatctccactagaactcttacaaattgaactcgggtgcattctttagtatgttggtccaccattatcaattttctaatcgtactaaccaaagcactcaagatattgtttccccaatattgaagcccaagatcgtgaagacgaatccaaagtggaactgttcgcaccagcttcactgtgttcaagtcagttgaccatggcctaataatgactggtttcctgtcaaattgcatcactcatgtttctagcactctatctttatttgcttcatcattaaatttgaccataactaaccccatgttgatatggaccacttgaactatacctagatgtccccaaatgcgtttgatgaacccctcgaagactgccattgaaggattagctcctagaaccatacatattactgccgatctccaattctccgctcgtttaacaacctcatctggatcaatacgagcgatcttgaccccatttttcgctaatggctatgtgtatgtgagcttcgaatccatggagaataaattccctttcgaaaacgaagaccagtgactcttcgccgactcgtgatactttggcccaatcgaacccagtctggggctttcgaaccacgtgctttcttgaactcaaatcaatttcttgctccctcgaacccatttctggggagttagccactgcagcaatcagggtcaggccatccagttgaaccagcatcctcaaggacatccaatccaccttgtttctcttcatcaatctcctgaatcttggatcaaagtaccgacttctgaccaacctgtttcttcttctccattggagaagagcagagaaaatcacaacttatattatgtgaaaaaatcagtagaattttttctcataaacaaatt

SEQ ID NO: 381582 - DNA, 1594 bp, Cannabis indica
taaccaatgttttaagcgtattttgggcattaaatttgtattgttatgtaaaatctatgcttatctcttgatcattttgtcgttgtagtcagaggtgaacttcttagggcgactctctcatcccaacctcgtaaagctgttgggatactgtttggagggtacagagttactgcttggctatgaattcatgcaaaagggcagcttggaaaaccatttatttggaagtaagggaaatctaatcacaattgagttataacattacttctcccattaaaatgcatgctcttttttgctgaacatacactgtgttttctggctgtacagggggctcagttgttcagccactttcttgggaattacgccttaaaattgcgatcggtgcagccagaggccttgcattcttgcacacatcagaaaagcaagttatctacagagatttcaaagcctcaaatatactaatagatggggtatatttctatttaaacaatgccataatgacattattctttccaaaatgaaacactctagacacacttgatatctaacttttcttgcttgtactctcagtcctataatgccaagatttctgactttggcttggccaagttgggtccttcagctagccaatctcatgttacaactcgggttatggggacatatggttatgcagctcctgagtatgttgccacaggtaaccaaccatctcattttaccatctgttatctcaaaggccacctgattagctagctctgattttcttgacttgttttaaatagggcatttgtatgtaaagagcgatgtttatggcttcggagttgttttgattgagattttaactggcttacgagcacttgatcaaaaccgtcctagtggaagacataacttggtggattggataaaaccatacttatcagataaaagaaagttgaaaaacattatggattctcgattggagggtaaatatccatctaaggctgcattcaacattgcccaacttgctttaaaatgtatagaatctgaacagaagcatcgaccgtccatgaacgaagttgttgagacattagagcttattgaagcctctgatgaaaagccaagagagccaagggttcgttctactcgctccactgttcatcgaacaccaggccatcatcatcagcagcagcctttgcaccatcgttccccccttcaccccaaaatagatgatgctagagttcaccaatactcaccaagagttaggtagtcttaatatagactattatgacttgtgaattgtgatcatataccatataggcatatatatatttttatacataggtatagtagattctttaagcaaatgattttgttctttgagatctcatgtgaattgttcttcattcaatgttgttctactcttcaattgtatcactataaaacaagtaccttagtttgcatgtaaatctgtaattacattttggctctaaaagtattgaattgcaaggacataaaaaggggtgttgttatagagaacttgagcatgtttggtattattttttgttttttgttttcaaaaaatttttttttagaaatgagaacaaaaaatagtttttgaagt

SEQ ID NO: 381583 - DNA, 693 bp, Cannabis indica
atcatatagatatattgacagcaattaataataaggattcatatttggaataagtactcgatcccactacttaaatagtggcattgttgtttgatgtaggccactcaacatttgatttgaaactgcatagaaaagtatttgttgccattgtggttgtgagtgtcccctacagcctggccctaattcaaaaagtatatatatatatagataaatattgaatcagtctatagggatgactaagttttgtaagaccaacagtgaacactacatgagaaataacaatatgcctttgtaagcatgtaaacattttttccattagtgagtgtgagtgagcttaatatacacgtaccgacagctttcattggaatatatgtcattttacattattctctattgcgggaaattatcattttgccatttgtttgtgtgaaaaatttcacaccattatcacacccaaaggtaaaaccacactatagctagaaacatatgtagtagtatacactacacaacaaattaaatcctgcagaaaaataataataaacacaaatacatataggaataagaattaatgaaatagaataaaatttatttttttcctttgctaaaattaaaatttaaaatttagaaaaataatagtacattggagacttttcttacatttcaaaatggaatagacattctaacaatatgcaa

SEQ ID NO: 381584 - DNA, 1221 bp, Cannabis indica
ccaagatggtcaccttcaaacttttactttccatagcaaccatcaaatagtggcacactcttcacctgacatcaacaatgatttcctcactgggaatctccatgatgaagtgtatatgcaactaccaaaagggctaattctacctccttcaacttgtgcaaaaactataatctcatctgcaagctaaacaaatcaatatacaaactcaagcactcatcaagacagtggcaccaaaaactctccgatgctttgatccataaaggatttactcaatctcaagaagactatactttgttcacaagaggcaacaatgaatctttcatagctctccaagtctacgtcaatgacatcatcctaacggaacaaaatttaactcttcatcaaaaacttcaaaccactcgcaaaaataagttttcattggaggctctcgacaatctcaaatactagctaggttttgaaattgctcgagaaacagagggtcttgtattgttaacaaaaatacaccctccaactattagaagataatggctacataagaagtaaactcaccaaaaatcctatggatcctataatcaagcttgatgatcaataatgaaatcctttagaagacccttcttaatatcgtcaactcattagaaagttgttgtatctcactttatccagacccgacatcacctttctcttagccaattcatggcttcccctcacactcctcatctacaagcaacccaccatttacttcgatacttgaaagggggtctaagagaaggcatcttttactcagcaacttcatccttacattgatcttcgaggtttctctaacttggactaggcttcttgtccaacaacaaagacgctcaacaatagattttttgtgtgttcattggagattgtttaatttcatggcacacaagcaactgccaatctcaagaagctttgctgaagcagaatatcgtgctcttacagccacaagaagtgaagtaacctggctgagataccttcttcaagacttctaaatactagaaacacgcatgcctttatatgctacgacgtcaaccaatccgcaattcatattgttatattattttataatataataagtgtagattaaaatgtggtaatatatattattatgtgaaaaatatatattaagtgtttggtaaataaattgtgtaacatataatttatttaacctaatattgtaacctacactttgtaata

SEQ ID NO: 381585 - DNA, 3247 bp, Cannabis indica
taaacttttttgaatgttcaaaatagaggggacatcaagataattacttataaagggcttacgctcaaggccaagggagtggtaaaagagatcagagatatcagaaggggtgttaggggaaaacagaatagaggacttggtataattaaccttatgtctagtggcctagttgtaaatattgaaagcttggctgatcaggtcacaagattgttgagatgcagttgagaaaatgaatgtgtcatcaacaaagtggaggtgaaaaacatggggcattacgggagattgagatcctttgaaccgagcatacttttcctaaagcattatggtagttgagaggcccttagagcaaagaagaaaaaggtaagggaaagaggatcaccttgcctaattcttcttgaaggaacaatagaatcagagatgttaccattaatattgaacctaatagtaacagtgttgaggaaattgagaataagcttaactaagatggaaggaaatcccaagtgataaagaatagcctttataaaatcccattccactctatcaaaggctttctccatttcaatttttaggtcaaaccacccctatttgccctactttctatgattaatggcatggataacttcctaagctatgaaaatattgtcaaaaatattacggttgaacaaaaaggcactttgtgaagggctgattaaatcacaaagaacaagcctaattctgttagcaatggctttggcaatcactttctataaagttgagcaaaggctgataggcaaatgatccttaatgctagatgcgttcaattttttagggatgaggagcacaagggtattattaatgttagaaatgtcagcatcatggttaagaacacttaagatggcatcacaaaaatctctcttgagatgccccaattcttacaatagaaattggcatttaagccatcaagactaggggatttatccctagagatgttaaaaaaagcaatttcgacttcctcatcataaaagggcaaagacaaagagagaaattggctctcactaattctcttatcaatgacagataatagtctttgaatagcttccatgttaaaggtctgagaagtgaaaagattggaataataagtactgatctcagactaaagtttagggtaagaggagacaataataccattgctaagggtgagagacctaatgtgattatttctcttcctagctgacaccttcttatgaaaatatttagtgttcttgtcaccaactttaagacaatgaattttagatctctgtttctaaaagagctcctacttgtaaagcaaggcatcaagctgggattggaggctacgggttttgagcagatcattggaggatatgggaagtttagaaaattaggcacctaaggttttatccacaaagttaattctttcctttaggttgttgaaagatttgttcaactttgtgataaagtgaacacgacagttttgcttagtaatgaatttattcaagggattatcattatcatggtcaaaagtactaaaccaaaagtttttaatagtttcaaagaaagagcttttagtaagccagtggttttcgaaaataaatatacctttgacaggcttggttaagctatgatcattaagaaccagcttaagactctatggtcagaatgataaaaattcatgtgatataaggtagcattaggaaaggaatccaaccaacccttattagtaataacccaatctaaacattccaacgtgcctccatgtttcttagtaaaacagttgcccacaaactggagagggataagatcgaacttacgcataaagcactaaaaacctgtgatagcatgggcaggtggttcgacttactactcctatcatgtacggagaggtagtcattaaaatcaccatgatcaaccaaggtaaaggaggggcattatgaaagagtctattaataagagtccaagtatgaactttatcatgcaaataaggtgagccatacaaataagaaacatgatacttcatacattcattaaagttaactatacaatcgatatggttaatggaaaagtttaaaataatgacattaatttcctgattctagaataacaaaagaccacccccaaactaaccctaggaacctcaaaagcatggtaaagctttctttctttctttcatttttttcaaaaatatataaagaaattataattcatttatttttacataaaaattcatattatagttattattctatttagattataaaactagtttttaataagaaatccttcttatgtttaggttatttgtgtcaactataagttagttataacaatgagtatttgtctatgttagtttagttagctgaagttacttttcttactttagttaggttttatcctcattggttaagttagttaaacaaattcttgtatcctataaataagttgtctcctctgtagtattataccaattcacactcaatgaaattcattttctgttttgttcaattccgtaatatggtatcaaaagtgggaaagaaaagctttcccccaatcttgattcttctccatcatctctaccatgtcttcttcttcttcttcgacgtttcttccactagagctcgttttttccacttaactctgtgaatcttagtctctgtctttctttcagggttcttcacctgatcttccttcgtttctaccatgtcctctaataatcaatccattcctactgatactagtggcgatccttctcaagctgcaattaaagaagctattaatccaatcgtggaaggtggccagaatcattaatcgtccaacagatgaatcttcttgaagatccatttgatccttactatttgcatcatgctaacaatcctagtaatgttcttgtttcacaacttctcactggacaagataattacatgtcacggagtagagcaatacaattggctatttttgtcaagaaaaaactcagtttcttggatggtttgtgtaacgtccccgcttcaagcctccattgggcctttacacccacaaaataatggctcttatacatgagtacgtcactctggttgcttcctggattgacgactgaccgcacagaccaacacgagtatttctagcatgctttttcctcactcccacgcttcctgggaaaactttccaggaggtcacaaatcctgaaattgctccaggccaagcacgcttaaccgtggagttcttttgtgatgggctaccgaaaaacaagatgcac

SEQ ID NO: 381586 - DNA, 2260 bp, Cannabis indica
gtaaaatagtttttaattcctttaataattttgcttttttgacttagagagtagaaatggttatttggtgatttaggatagtgtggaaaccatacaagtatagtaatacttgtgtaatgttgaatattgtaataatatcttagctgatcctttcaaagtagttgattcatgtttactttgttttctccttcaatatatagtttcttttcttttctgcaattctggtgcattatgtgctgaaattttgctttaattgggtttatgatattgtttcagtttctgaactagcgatttgcttctctagaagtacaatgaattcaggccaatgcttgattataaattatgatgaaaaataaccagctagtacatatttgattgctgttggctcactattctatctgactcttcactttttcttaggtttattattctctgaatattttagtatggttttttgtaatgtaacataaggtgcgtaacctttgtgcaagtaatagcaactttcaatgatgtacatgttagaattgattttttgagcgtaacctggcagttcgaccgggatatggccccaactaattttttttgagcctgtggggattcgagctttggaacaaatgtctaccagcattttccaagactcctccttacgacccctctcgggggtgtttgtagctagaatccaaatgaaaccagtttaaccactttgttatattattttagaatcacaatgtacaatgcacaccaaccccctccaaccccctcgggcggtgttggtgtgcattgttggactatgtcaaatgattgtctttgtcacttgaatgctcttttgttatggttgcttgctgcttgtatttattttttattatgggaatttactgtggtaactatcacacacagccaccataagaactaacctcatttgaatatttacattttaagaattgggttcaagtcaaatgttaagaattgcctataagtggaaaatagaaaagttccaaggtggagcatagtcggtcggtgttgttcttccggtctctccgggtgtggattttgaacactagacaacctgttaagttcacattttcagtcactaagtttagttctaatgctttcattattcagttcagtgcacatacttagaacactagacaacctgtttttcattcaccaatgatctaaggcaagagtttatttcccaagattatatacgcaagctataaacaagtgctgttagttatatgacactaaactttaggtgatggaataattaagtggtagtggataaataaagtaggaaactgaaacttgtacttatccaattttggtgtggcccagagttcctatcaaagattacacatgtgtggagtagactagctatcttaccaggtcgatgtcaattctaagaagaaaaaaacgactccattttgccacaaaatccatcatcttattcttaacccatgattacttggtttatgcatgttgtcacacttcacttctagcctttatttggttttattattaataattttttgggcaaagtcttttgttttttcggctcgtgctgtgcataaatctctaatgggctttatattttgttaaagatcaatttagaacttattttttttcttcacaaaaatggaacaagttagcatgtactatgtagttattatccttctcaaaagaaatcatacaaatgtcattatttctcaagctttgtttcaaatagaccagcctaatactattaaaatcatgccatctcagccttaaaattgacacctactttaatggagtttttacaaaaatatataattttgcgtaaaaatttacaattttattattagacgaatttttttacaaaaatactgtttttttttttaaatagcccgtaaaatattaaatagaataattaaaacagtagaacaattaaaaatcaactgtggaataatggtgaaaatttaacgctatacatggtacaaattgaaaattttagcatgtggggtaaaaattcctttaatgaagcacctcatctttttcaacaaaactagtatttcaactattagactcttttcttcattaaacttcaaataaaacttaataatctccactagcaactccaaatcacttatggcacgtttactatacagtaatcgggatcagaataaattaatggcgaaatataacggaataaatgaaaaataatcggaatcaatatttgtaatatgttgtttactaaatttttttagaaatggaatagttgtga

SEQ ID NO: 381587 - DNA, 4462 bp, Cannabis indica
ataaataaataaataaataagactgaaaattattggggtatattgaaagttaggttagggtgatgatattatcattattatattagaattaattttatgggccaccttatctggtagtatgctgctgcttgtcatatttattgcctcaaatataatcatttctgtgtgtgttcttatatatatctattttgttttgaatgaatagatattcttcttctatactatttgtttggctaagaaaattttggctctacattacttgtgagattgaaatttgtatctgtatatctgtatctatctaccaactgaaaagggttattcatatataatttctataagattattatcaaggttcatgcatgtttctatgtgtttgtaaaatgttttagctttggtaggtattagttgtggaattttgtttttggaagaaaaagcttttttagaaatttatattttgagcattgttatgatttacccatagtgcgtaacactacgataaagtgttgtcttataattggttagcgattttttataatatttattatagtaaaataagtgagattcaatattaaattgcaccaatagtaatattacacctcacaaaggtacttgacaccataagtacccttttagcatttctcttatattttatactttaagcaaaataacactttatttgattgattatgataatggtgtttaactagctctaaactaataaagaagttgaaaaaatgacaatgagatccatctattctcttctaccattttatatcaatgatacatttggagtagtgttagtatcaatcaaattaagttcaaaattgtagtagctaattaagcaagttttttaagggatttgaagtttaagccttaaaaggtggagtgtagctactagctatcaatattaggctgtataatgttaataggtgaggaaagggttaatgactcgttgtggtttctcttttttagtgaaggagagtttcaacaccaagaccctttaaggcaagttgctcaccacttagtgtataaacacttatgagatgagttttaagggtgattaggcttgtagacatattcctcatattttttaaagaagccactcaaagtagaattcatatttttcaactcataaaactacataaaaataagcactttgctactaaactatttgttgtattgtattagtattatattataatataatactatgtttgatattgacttgtattaatagattatgtaaagttatactatatttgcaataaattcaacccaaacaccgactatggatttcgagtctggttcgtgttcgggtctcgagtctgggtaggagattggagttgactctaaatcctttgtaaatattataatataagttaatacggatcatttgttatgtattaaataatacaacttacattgttttgagaattttagtcgtaataattaatacaatatattgttttacttaaatataatgttatttattatttaatataatacaatacttatacagcctaccaacagactcatggtggtaaatttaagcctatatttgtaatgttttccaatttaagtctttattgggctcttacacccacagaatgatgattcttatacacaaatacatcactctgactgttttatggaataacgactaatccttcaaactaacacaagttttttcaaagtaccctgtactcagcacattttttttgagaaaactaatgaggactctcaagaagttcactaaagaagaatatattggattatgagttctacatattctcttctctcaagaaattttaattgtaatattcttcaaaaaagggtgtaataaatataatttttttgatatatgttagaaatatattttagttcatcaccccccataaatcttcatatcggatcatgcattagcttcttagatttccacttcaattttatttatttattattatatatatatattaataatatggggactcatttctattaaaagaaaagaagtaataataattcagtcacatttgatgcacatgattgattgtgtgggaactccccatccagacaatgggatcatattgaatcttttgccatattttatgtgacatgacattggctcttttatacaactttgtcttcaccacccattcataataatattatcataaataaaaataaattaaaaaacttatcataacatgagataagttattttccaattattcttttttctttcttccctatttaataaatttattatagtatcaaattcacaaattgtgattgtgataaagaatgacatgcaggaatatatcttttatttaaaatgtttattatttatttaaatgacatatgtttattgtaaaaataaaataaaatatatgatgagaaagagatactcgtaaatttaccatgaaagaggtactgatggagtggacaaatgttcttttattttctgaaatatcttcttgcattcttctgtccactcaaatcgttttttatctcacaatatattaaagaatgacaaatacttatctgttcatttcgagataaatttatttaatgctgttattttttcagttaagaatcgaacttcttttggcttcttaggaaagagcatatctagcgaaacctttatgtttttggattgacttcaattcctcttacgtttactataaaactaagaaacttcttagaaaaatccctaaagatatatgtagatttttattcttccactccactgcaatttccctagctagctaagtgtgaattagagaagccaaactagaatagaggatatataatatgcatgacaccttggcttggcatggcattatatattcttcctcaaattgataggcatttttagtgataaacaaaacataatgatcagtgcatgcatgcatggactatttggtataaaaatatatacatgcatataatatcgtttgtttgtataaaaatatttatatacttcataagatactagataatatgtatagatattctatattttgaaggtgggcttattttaattaatatttttagttgattgttgacataaattatattatcatcaggtgtaatatttaggtggctttgagaatttattacaaagccattattaaaagaaataataaaagggtttacaaataaattcaattctattatgtcaatatcttccctttatatataaattaaatcaccaataatagcataccatcaaaatggttcagtttcaaaatgttcttacgaaaataatgactattattatactccaagatagaaaaatagaataaggaggagaaattcactgcacacccaaagtcaatactcttgactccacaaatcttcttaattaaaacttaatttatttattttaaaaaaatattgtgtacaatacacaatatacatttatatatatcatagttcaactcttaataacggtgtaaataatgttcggttgaactaatttttgacaccaaatataacaaattatcaagcggtagcagatgctcttagagcaacttcaataaaaaaattgatttagcatcggtatcaatagtgattatttttattttctcttctttaaaagatattattttacgaccccatttaatatataagcacctcgattggagttggtattaggcaactaaaagattttgtaggcaaaaccaagttgttcttttttttgggttgaataataaaaagtaaaacagttccacagctttcttaaactgtgagaaagaattggtgcattaactttaaagtgttatagacttgctaaagccaattatattctttttcttcaactggaatctaaacacattgcttaaccagacccaccaaaaaaaaatagcaatggctattaaatatgtatgttgttatcttaccaagacaaagacatatttaatattattgttttcctttctttctaatgtttttacttaattgtgtcaaataaatatttgtttggtttgtaacttttctagaatagaaaattccattgatgtaccaattaactccaaggacaacgtacgttactctgtgttacacaatttaacatccactttagtcaagtaatatgaaataatatatatatatatatataaatgtatataagtgaatagttatattcccattatttaatcaaatatatacatttttgtgatgaatttcatgaatcataagatttgaaagtacacaaatatgacagataattataacaagatagaagaaacatgccttctataactaaacaatatataatatttaaatgaaaaaaaatacagttttgtcaccttaattagagtttaatatcaatttttttgaaaaaaaataataaataaccatatctttatttaattagtaaaaacaaaataagaccatatgctggttctttgcccaatacaatcacttaaatgtaaaaataaatatatttatttgatat

SEQ ID NO: 381588 - DNA, 2210 bp, Cannabis indica
atctcctaaatcttagtcctcctcttttctttggtaaacaaagcttttgccaagtccgccaacatattttcttcttagattgaaaagaccccaccaatatctagttatttatcgttctatttcctcaaaaagttcttcaagaattctgatacatgacattaagtacatatgtatagactagatgcctgcttttagtaaaatctccttgcttacttgaaagaataattttgtacgccacaaatttagttttaaccaaatcttatatttaattggtcaaaatatagattttttgtttcttccacccaccataggcaaccaaaaataagtctcaatttcttctctcgtattcatttcaagagagaaaacatattgtactctaatttcttttggggtattaggaaaaataaaagaagagattcattgaaattaatcatatgtagtattaatatgattgactaaagataatttatatataaattcataaagatattcatatattcattttatacttgtccagaacagtcaggatacacattgaaattttttatacagacactagtgatctcttaaaagctttaatagagcaagctgtcatccacaaagaacagatgaccgattggtggagtttgtctatctattttgagacctaatatatctctcttctcttttgcatgtcacagaaatgttggaaaaccttctacaaatataagaaaaaaatatggcaaaagtggatctctttctcttatgtctcttaacagtattacttcaccataaatctgatcatttatatggaatgaataacgaactgtatggatacttctcatcaatttacccacccatttttgttcaaaacctaactttagaagcattttctctacaaaaatccactccacccgatcacatgctttactcattgtttatcgagatattcaaaaactgattaataagaacttaaggaaatgcaaatattaaataatagacaaatgaattttttatgtggttcaggcataaatgattcttagtcctcgagtcagttgtattagccttcgtcggcaagtgtttgagtattacaagtgtttataacaataatctctgtattcttttggtttctcttaaagaagaaagccctctaggaattttagtagagattttgtaagtaagaattgttcacccctttgcacataaaaaatagaggtatttatagatacacatgtgggtaagggcatacccacaaccctaatagggtttgttactcaacatacaagaaaggctgaaaacacctcaagaccatctgactgttggtttggtaggtagtttttttttatcaagtggcattccttcgatgcaagatatcacgtaaagatctggacacgtgtcattcaaaggtttctcctttaaaagtaattgtctagacaagccattagacaataagcacaacagaggcacgtacgcgcacaaccacagtctaacacaagggacatgatctgatctggtgtcagacgaggtgaaaccatcaggtgtagttccagattaagtcttaaggagcttctgggaagtttgtgttggaattattttaccaggatcttggatctactcacaagtatgttgattaacaacctaaatatgaacttctaaagcgataataaataaacacatataaagtatgagaaaccttacattgggtgcagcggaataatatgtctccttccactcagatctctaacccttgaatcctttctgttgcagagtataatcaagatatgagtcaaaatgtccttctcttggatttggatccttcaaagtcttccaaactatgattgaggtactgtttgttgtgtgtgggcactactctttcactaggatttcgaaattgtatctctcttgtttaagaagaaggagatgggcggctatatatagagaaaagggaaggctcaattttctgaaagaggcagtttcctgaattactgagtaattgcttaattgtcttatttggtatgagccatcactttccatttatagataactgctaggtttaggttagtaattaattggcattaaaaaaatgaaaataataattggaaaatgcatatacaagtggccggccatgggtgttattgggcctcacttggattttgcagtttccacaattttatttctattttcccaaaaatgccaattttccaattctaaccatttaaatgtcaaaacta

SEQ ID NO: 381589 - DNA, 3119 bp, Cannabis indica
ctaggcgaattgtaattattttaataactcagagtgacaaataagttacctgatgatcaaacttctgcttgcttctgttttggccctgcgcgtggccacttaggagctaattattgctgttcttcattgtgtatgtgttgatgaccagaaaaaagaaaaagaaaattgggaagacagtagtggcgtggcacttgattcgagttggaagtttttcagggtttttttttaatcatcatcttcttcttttcatagagttgaaattgtatatttatagtccatgaacagagggacattgtatgattttacataaaggtatttaccaataccattgtgttttattttttaaggaaaagaaataataagttacctgaaacaatattgtgttgttgattggaagcagaagcaaaacgggcaatgcttcattgaacagttaccaattaataacctatagaagttgaaccaaaatagacaatgcttcattgaataggtaccaactaataacctgtttagagaagttgtgaacaatttgattattcatttgcatctcttcagcattgttgttagtatttgacatgtttctgtggaaactaacagaatttttaaaaattagtctgttaagccacaagaaattctgttagataggtatttattgtataggtaagaggtaagaggtaagatgtataatatatttccaataattttgtatgattatgtcttcattgctgtgaaaaagtttcaaactaatcataattattgcttttaagatcagaagagagaccccttgttgtctttaatctcagctagctagaagctttagtgtgggttatattttatctttttagctgtattagtatttccttgttcttttttcatcttgaacaattagaagttgtttaaatacagcaatattcaaattctctgctgttccagaactatgacataatattcaaaggaaatctgagtcttctaattacctgcacctgttgtaatattgctctgttacacaagtcataaaccaaccaaatctggctgtatatagactttatgtagtaatgtcttcacttacttgtataacactttatactcactattgttttctgattttgatataatattttatatatgaattctattagtcaacaactagttgtactcaaatgcaattgtctaattgaaagtgattaactttttaatctgtttctgtatctggtgaaaacaaatcatgttgtactcagtatgaatagagctgaaatatttaagtccttttttttttcctgttttgttggcttatttagatgcggatactagatttttgtgctgttggcatctctaggctgagctagattttccaaaaatgtccttttattctcgtttaatttggtatatgtttgtcttctatttcaggtttgcaatgtctcgaactccagatgaagatttagaatctaagtattatagacatctaaagaatggtgcttataaggtgaaggcttctaattcaacatatagatgcccattttgtcttgaaaggaggaaaacttactacaaaccacgggaactaagattgcatgcgtatgatgttagtagaagctcacatagaagggattataaagagaaagctaagcacttggctctggaggagtatataagaaggtaccatgaggatcgagtagagccaagtcccaagttggattcttgtagcagtaagttggaatatcgtagacacgatcgatccgagtcaagtaggaagttagaatatcgtactcaagaccaaacagagccaaggagcaagttagaatgtcagacactcgacctatctgaacccagtagcaaggtaaaatttcctacactcgacggagcaaatcccagtggcaagttagaatgtcctccatattacccatcaaaactcaatccgaagttggaatggcgtaagcatgagcatgaagaactacttgtttggcctcctatgggaattttggcaaacattcaaactgaattgaaaaatgggaaacgtgttggggaaagtggttcaaaacttagagatcagttaattggaaaagggtttagcccagtgaaggttattcctttgtggaattttttaggccactcaggatttgcaatagttgaatttaacaatcaatggactggttttcagaatgcaatcgcgtttgagaagagctttgaagctgataattgtgggaaaatggctttcaggcttgaaaagaatcgaggggacagaatgtttggatgggttgctcgagcggatgacttcaattcatcaaccatcactggaattcatcttcgtaagaatggggatttaaaaagtgtgtctgaaaaggaagcggaagagaaaagaaaagattcaaggcttttcgataaactggctgagaccctagaaacacaggcttcgtctctcgaagagtggaagaccaagtatgaaaaggccagcgttaagtacaagaggatggaggagaaaaaagaaaaaatgattgaagacttcaacgaaagtatgcttacctatatatctttgtttttcttagtggacaacatatttttactgttaattgttctttcatttcacttgatcattgttataactaatttatttcacgttgtgttgtcagaattaagaataatgcaacaggagaaccatgaatacttaaaaggggttttgtcgaggcacaaaagtgttagccaaaatctgaaatcacaaatggatgagcttctgtcccgggagaagcaattgcaacaacgtgaattcaacgatgatagtgagagaatgaaaattgaggaagaaaagaaaatggtaattttatggaactcttatattagaataaggtagccgactgcaatgtcatgctctgctagaaatatatgtctgggattgcatggggcagttcttccaatcagtttgcagtcatgtagattctactaaaaaaactaataataatatagaaaaccctttattttattatatgtgatcaaatatgaagaaaaagatgcacgcacattttagaattggctaattaataattttttctcccaaactttgacatgtactaaatcgtgccccctgaactattttggccgttaaaatttcctcccgaactattgagattgtt

SEQ ID NO: 381590 - DNA, 1816 bp, Cannabis indica
aagaaaatcttctttaggacatgagatgaatattttctctcccaatgaagaagaaaaaatccaaccagaagcctttttgatcacgaaatcaagagcaaatatcagaccaaaagatcgaatcacattgattggagatggttgatgactctatgagtgaatttgttgatgtgatgaatggtgatttttccttgctacaagatgaaatcgagaatcagatcttggagggttgtccaccaaattcaacaatcactcgctcaattgcgccatgaacaaagggagagattggatcgactctacaagagcaagctactcaacattgggcaaggcaagctctgaaggtgaactatgttggagcgaagctacaattcactccaccaattacaaaggagggaaaggtaattgttaaacttgacctagatgaaatcgaaatcgaaattgaatctaaatactggaaaattactattctttgtgtggtaatgagagctaaccctccaattaaggtgtttgagggatttttaaaaagagtttagggtgatgtaggcttggagaagattgttagaatgaataatggagtcacactggtgaaattcaatgatgaggccactcatgactatgttttagaggcagggtggttcattttgacaacaaacatgtgatcatgaggccatggtcaccagaatagatttgatcaagctcattcgatatgtaccggtttgggtgaaactacctggattgggtcttcaatattggaaaaccaattgtcttagtgcactagtaagtacaattagtactccaataatagtggataatataacaaaggaaatgactcaagtaaagtttgctagagtcctggtggttatcgagattcaagatgaactgccttcagtcattacatttgagaatgagtggggaatgcttgactttgttccaattcattatgaatggcttccaaaaactttctccaaatgttgaggctatggtcatcaagatgatctttgtaaggctggacagaagtggcaacagaaaggcaccaagaatgaacctactgaaacagttgcggaggaaattactacaactgctcaaacatttgacaaatatccaaacacagctccaagtgttgttaaggaagaagaaagctcttcaattctagtcttggaagagaagacacttgctgctgctccttagtaggtggctactaccacgccatcagctgaaactacagaacaagaagttggtgttgatcctcagtaggtggctactaccacacctgcagctgaaactacagaacacggagttggtaaaaatgagaaaaataaagaggaacaatgggaaattccaaagagaaaaggtgacagaattcaaaaaaggttggctcagcaacatagcaataagttcagtgtgctgcaagatggtcctatgactcataataatcatggagaattgcaacattctgagctggaacattagaggatttaatcaaaaaagaagcaggaaaaagtcagggaggttatgaataaaaacaaggtggggattggagcaattatggaaaataaagttagaggtgataaagtagtagaaataatgagctcatcctttcttgggtgggatcactatacaagctctataatagaaggtaaaattttgattgtttggcttaataaatttttgtctttgaaaattttggaagataactctcagcttgttcattgtagagttaaaatgatagggttaaatgagtccttttgtgtaacgtcccgcttcaagtctctattgggcccttacaccaacaaaacaatggctcttatacacgagtacg

SEQ ID NO: 381591 - DNA, 1342 bp, Cannabis indica
tctgaactttttcttgctgttttttataatatacatccttaattaatataacataaccaaattaaaatttctgaattttcaatttctttgatcaaaaaattaaaggggttttgttaattcattcgtacctgaacatattcatcgtatttttgtcggaccttctggctggaatcgcacaatctgtcgatgaagagaaacttccttaacccgtacttacgagcccaacgagacaaacaaaagaaagaaagggttgcgtaaagcgagagcgatatctgcgctggcacatggtacggccggctatggttgtcgtcgcaggtcggacaggagaggaggaagtgagacgctaaaggtacaccaatggtgaacacaacgaaaacggaccacgacaacccgacccgccatatacttgattggtccacgcagacccatctaaggaatgatccgaacttctttaattctttccccccatggatgctgggcttcgagaatatcaggctgtgtctttcatcttccatagtcttggaaatttctgagtcagaattgattgtgttcgatggttatacatataagaaaagaaatatgaccttttcacacagctagcttgatcgaattatttggtacgaaaaaaaggccttaaagtaaaacccaagaggcagagcttaagaagattttattttattttattttgctttttaatatattaatattccttacatatgcagttaggggaaagagagagtcataatatatgtttaatttctatatttaaaaaaattaaaagaattgagaaaaataaggttcgatattgaggatgacacgaagaacggtggagcccacttaaacatcaccacctgatttgtgccacgtattaaatttgtttgaattgtttgtttaaagggttttctcccattagtgtgtttataagtctaaatctctatgtccccacatacccatattagaaaaccaagttgagaaattagtgctgttaccagccgagacaatatactaatcaatgtacgtaaagttttgttgattttaatattttgaagcaacttgtaaaatgttgtgatttctatattgccaaatacataagcaaaaacaaacttaaccttactaactaattaaaaagaaacaagtgggaaaaacaaattctagaaacaaataatacctactttttacaaggatattttgtgattaggggtggtcagggccggcccgaacgcattgagcagcttgggcgtattgcacaaggcccctacttttttaaggcctaatttttttacttttattttaaagaaaaggcctatatttttcttttttttttcctattatatacacataa

SEQ ID NO: 381592 - DNA, 5357 bp, Cannabis indica
agtatagggagtaattcccctctacttttcctatcactcaacatagtgtaaatgttgcacatttactatttcaaacatcaccatataaatgtagtgtccattctagcctcaaaaaattaagaagaagactaaataaattaatgcactaaataatttactgtgaatattgagcaaggtagaatgctaaaagtaattacataaaaataaagcgaaaaaacaaaatattttcctatagcaacgaattgtatattttgtaaaacaattaaattccaaaaaaaaggaagaaaaaagaagaaaccttaggcaatctataatttagacttcctttgaaactagagaatcaaagaatatctcttggtctccactgaagacaccagcgaccaagaagagtccatttcaatgctatgtaaattagattaagttctaagaccttcgatctgaggtcgttaacacgttctaccatgcagcttcgcacttttaaaaactaaagctgcttgccaaataaaagttagagagagcggtaccaagtccaagatctcaacatcaaatgaagcctgtagcttgtcaagggttctccttcacaggaatagaaacttcattactcgtttcatctgaaggtggaggtttctgtggagcttttctcaagaagcttttggcatatagggaaccaaagacgatgacctaataaatcccaccaaagtaatgttactgctaatcaggaaagataaaaagtactactaagatttgagacttgagacttactgctccgataaattgttcccagctaagagggtgggaaaaccacaaacatgacagcaaaatgctcaccaactttatcaccaaaaagttaagtcaaaaaccagttaagtcaaaaaccatgatttgtgaaatagccaattaactaatgatgaaaaagggaataattatgttctgaatagttcaaaagtacctgtcttgtggtcattattgtggcaaatgtgagagcaccgaatgttcggattgtgtaagaaataaaaaattgactagctgttgctacctgcacccaaaatcatcggtgaatatatattttaagggtgtgttagccaatgagctaaatgaaaaatgatcactcacagttgacagcaagacaatgtcaataaaacaatcattatggcgagaaacaaattctattgccggcagtaaatggccctgtaaaattagacctgaaggcaaaaacaaagacgtaaaaggagtgcacgtatgtacatgtaaagtatatttgtaagcaagttgagaaagatttcaaagaaacttctcaactcccaaatccccaaccataaaactcagtccagtgatctacaacctttatcataaaggcagtcaatggtcaataaaatagacaaccatacaggaggagaatttataaccaatttcagtacttcaattataacaaatatgtgtgccctcttgacttcgagatttaattactagtctatgtcgataaaatgccttataataattgaaatggcaataaggatcttaccactcaagctgagaacacaggaacacattgttgtgtagaaaatttgattatgaatctccatgtcatagcctttaaagagtttatcttgaaatgtgcttgtaaagccatcaaacctgcagacacttatgagtataagactaaatggatggtcttcttctaaaatgactcttttaaacatttaaaaggtcaagctctaaatgcaaatgagaagttatatctattcaaagaaaagagatacacacatggtcatggactcgtggaaatagaattcaaatgcagtcagtacaacaccctctcaaactattaaagctcaaatataaatggataattaagaatgaaaattataaccgtaagtttcaaaataatacccgagataacccatcatcaatgaaacaccccaaacagtattctcccttcctctaccatatggactaatgtcaggtcctgcctacaatcaaagtacaacaaaactatttcagcgcacatcaacaaaaaaatatgatttacagattcttcagcatcatcaacaaaataatcgtcaaaacatgcatctccttcgaaaagtatagagtttatgttcctacatagatcagaaaaaaacatgttcttattgcactgcactacagagatggttttttctttttcctccaaatttttttggcaaatgctataggtttgtcaaattgaagtagatacaatatagtgaaactgaaactattgttgaatttgaagccttcaagtccatcaaactatggtcatatttcacataacatcacatacaaactagttactccattggttaagctaagcaacctgaaccttacagtatgtacaaaagtcttgaactctagacaagcaattccaatactaaagtatcatttaacggcccaagcagattccattgataggatagatgtgttaggagactaactggtttgtttgagatttgctgttctatgttcttatacatgtaaatttgagaagcgggtattacacgtacaactcattcctcataatagctgcaaactaacataatttcaacataaaaaaataatctatatgcatgtgcttgggttcaagtaatggaatcagaccttgatctgagacaaaagatgtaatcattaccggatataaaataaatattgaacagcccactgtaactagaaaagcaaaaaagtagtcttgtcccttgtacttcttctgcataattatagtgccccatacctgcataaaagagaatggaagagtagccaacttataagcatatgcttgcatactccttgtgtatataacatacatccactactttagaagcctttggctcagactatacaaagcaattagatttagcaacaaccatagtagctttaaatttatagagaagtaaaagttgacatttagaaagtgaacatattaaagaataagatcaccggaatcctaacccagaatagcacttcatagccacacaaccagatacaaggttagcaactgaaaagtatttaagcaacgaaatacactataaaaggtgattataataataaactacataatatatcttaccataacaggtatcattttagcacattttgctagtgtctgaacagggaaactgacatatttaagggcctggaacaaaaaatgtctagtcacttaaatgcatcaacagtatagctaaataataagctaacaactgaaaaactttgcaaccaagtttctcatatctacaacactaagaacactacggagacagctaacctcgtattgacatgttgtagttaaaatgttagatactgatacaaggcagtatttataaactggagcaaccggatccaaggcttttttactcgcctgagaaataagaatgaagaaaatgaatattcaagttaaaaatagtttgaaacatgtcataaagctacaccaaatatgcatggcccgaaaaatgagatgaaaattcaaccagaaaagtaaagattacctaattttcatatacaaaaagaaaaaacaacactacgtaccagtaaaaaacaagcagagacagcggatgttgtgattcgattacagaaaacaagaaataacgagtacttgaaaaattccttgttcagaccatatggaactctcataatcttctcctgtaagaaacaaagtcccatcaactctagagagacataataagacaatctttaagctgaggttttatgagactattcaattatgaatgtaataaatgattgcatactaccatgatcttgatttaaatactaattgagtattatgaacactgaaatccacaaataataaatgcaaacataattgcatacactaccaaaccaaagctaagatagcataacttttctcaacaatcccacaatttattcagtttaagtaattaaaataataataaaagaaaaaaaaaagagaagaagagagcaatccaaaatatccacaaatttcatcactttactaaaagaaaataaaaggcgatgtgaaaatggatggcaaatgtgtgtgtgtgtgtgtgaatgaatattcatgttacctgtaaaaaaccataagcgaccaaggtggtcataatgccggaaacagcaaaaatccctttccataatttgctatctttgaaaccaccgtgcaacgacgaaggctcacccatggcctttcccaccaatctgaaacacccccaccaaatcaattaatcaccaaaataaaataataaaacctcgggacaacacagggaaatgagggttatactatctcgtaacaataaagggcagcggtgaaaacagcgttgttgtccacgagcaacagagatgtacagactggccggagccggagctaaaccaaaattagggatcaaaaggtgttacggttgaagtgggagaggaggaaaagcttccgagtgtggaggctccggactcagagatggatgagggagcgagtcgtcgtaactcagtgatcacagcggctcgcaccagacggaggctttttctctcttttcaatattttaattttattttaatttgaaaatattatttatataatttttgggtagcgttttgttcactcactcgctctgatgtttcaagtgtcgagattcaagtctttcgaaaagaggacaggacagtggttcggcctacatagtgggccctttttaccttggtttttttttttgtgtgtgtgtgttgaaaccttttgtaacttcattaagataaaccaataaattcaaagctacaacagtagcaaatttggaatacccaaatgatctcttgatctagtcctaaagctctcctagaaagattatgggctaaagaattcaaattctaagatacatgattaagagagacattagggaaaaaaaattgattcaagagcgtttatattacaatatataacttgagactcgaacttacgacctccaacacacgtgcactctccacttatgtatcaaaaaaagagattacaattttttgtatcaaattagacaaaagagacttgtctttccacttatgtctaattttgaactagaacttacaatttttattttaaaaaaataatttgaatcacactatatgacaatcgttgacgtggagaaatttccagtcaacaagctaattatctagtcaacaagctaattttcagtcataatatgaattactacaagcaaatcaacttatacaagaccaatttatctcagaaatttagacaaaataatttgagaccaccttcaagaggcatccgagataaccacccaattggaccaaaactacctacaaaataaataaatataggaatgtggattagcacactatacaacgataatattataaatttttaaattaaa

SEQ ID NO: 381593 - DNA, 1404 bp, Cannabis indica
catacaacaaaaatgagatacatacaactatatatataatatttaaatagttataaaaaataatattttaacaacatactttgaaaaattggctaaagaagttattgatgagtgtgctctaagaagagactaagacgtactaataataatatatatatataattaataaatatgtgctaaattatattaaaaattagtaacaaaatgagttgttagtaacactaagaagaaaagatcttttactaaacaaaaaaaaaaaaaaaacgaaaaaaaagaaaagtatcttgagccaccttcgtcagcggatcatgatcgatcatcagtcagattaattataacaataataataaataagtgaaagatcaaaccttgaaatctctgttaataagcatgccgactgtgcaaaaagcagttgcgaagaaacacatgaccaattgaatctccaagaccaaggagtatgtaatcctctgcttcgacttcttgtacatcaactctaccagcggcaatatgaggccgtacagaaccgccgcggctaccgtcatcagaaacccaatcacgtaagatttctccgactctccgttgggccggtcactgctcgtgtggagagccagcacggccgcaccggtagtcagcaaaacgacagagtttacagaatacgacgtgaacttctgcttaacaagaaggtaagcgaatacggctgtgaaagccaactgagatgcgattataagggacgatgtcgatatcgggagacgagccacgccgtaggcgtacatgtagtcgtcgaagccggtcagcaaccctatcacggctgagccgatgaacaaaaacggcttcatctggatgatcttgttggatgggttgtgactgcgccggcgttggtagtaggcggcggctaaggggacaaggatgatgggccagccacctgtctcgagccagcttgagagccagactcgtttgccgccgcggaggaagtagagccgcatgattagtggtcccccacagtttcctattgttaataatatgcagttaactataagcaggatccttctttgtttggtctttctgttctcatcttcctccatttctttgaagctaatttgttttggacttggagtttgctccatttaatttgacaagtattgttagtgtggggacttatttataatgatatgaaactgccacctttgacataacatttatttttctacaaacataaatagacataaatatgcctaaataattataataataagtattgctattaggcactagtggtgcctagcacttctcgacatgtcacgttgcgattggctagcgatgttagataaattaacaattaactcaagatctatttgtatataacatagaacacaataataagatataataattaggtatgtgtac

SEQ ID NO: 381594 - DNA, 1577 bp, Cannabis indica
aaaaaaaaaaaaaataaagcttatacttcgaaaagcatctgaaggcttatgcctcgccttccagacaaaacaactaacaaactaaccattttaactagtgcttaaaattaatcacagtccttaaaaacgatcagtttagcaagttagcaatagcagtagcctttacaaataatctgcccagaatctaaaagacatatcacgaaaattctaatatacactaatagccatttgatttcttagtttgtacccgacaaaagttacaaacaatcaacataaggaaacagcattcattgagtttacctttgcaaaaaacagagtatcgccaataaacccttcccaggtttcttctctaaccatctgttgcaataggagggaaaagttttatcaaacacttgcagctaattattcaatattgttagataactaaataaaacagtaattcttcttcaattcacaaaacattcatgaacatgacaagcttcttttaataaattttgactatgattgtcacctgggagaaacaaaagaaaactagatttattattagaaataattggcaaaacgttttctcacgtcggcgtatttggcactgatgcaaaatagagtctgcctaaaaattcgattaaacgtttagaccaaatgtctgaatttctaaaaaaaaattgctttctagagtgtttgaggctttttttttttgcaaagaacgtcgaaagtaggctgcaaaaagagttaaacaaacgagaggtcattttgccaaatagtattatagtccaattgtgcattatcagaaatgaattcttatcaatacaatcgatggatcgtttactttattaacgtatattttacaaagatatatttcgatcagtcataaccacttgggcaaaagttcaaaaacaaaatgatttgatttgcattgattcaatgaaaaggaaaacaagatctgagaaggcaaagggtacacatccagaatcaagattacgaagaatgaagctcataccttgatagcagttaaaacgccaaaggccaaaaccgcttgaatttcctgagaaggacaattcatagttaatttaataacaaacatacataatttggagaatcgaagagatggggagatgagattactcgataaatgaggcgattggcgaatgtaggactgagtactgagactgaagatgtacggataacgaagtaagaaaagaaagcgaggaaatggtacatgtaatagggctcggtgaatattaagttgagccaatgcgccgctttactgcgctcaccctccattgttgtctctcgatccgaatcaccttctagggttccaagaccaagagtgactttatttcccaccaaagttgatctagattctaaaactaaacgatggaaactgaaatgacatagtaattctcatgtctagcgaactaaggatttaatcaaaattaatattatcattataaatagaaatttttatatcaaaaatctaatttacaccttttattacaaaaaaaaaccctaacacgcctacatcaacttttttacttaccatgtttgttttattacaaaaataccacttagtcatcatt

SEQ ID NO: 381595 - DNA, 3722 bp, Cannabis indica
agcaaaacctaaccatataggtaatactataacctgaaaccccccagacactctacctgcaactttgtaacctgagcagacaaagtagtcgcttctgtctgcagggtttgaactttatgttccagttccgaaatataacgtgacctccgctcctttgaacgagcagctgattgtcgattagccaagatcctggtttaataaaagataaagaatgaaagagttttagctgatgatacatgtattgctaatgctaattcagaaatagctaaaaaagcatagtacctctttgctcgtttgggatctgataaagctatctcagtaagtttttcactttccataatctttttcagctcaaccgcattgaattcgccatttggaaactccataccaaacttagccgagttaccatcagccaaactgttaggtgattgcagaccagccccagtacccagtggaagaagcttcaatgattcatcatcaaattgcaaacttcccatataactatccatggaaagacttctaatagtgcctggaagtaggcgcaatatctccaggagcagctctcttcactccttccctcttcccatttccgaaaccagaaaccttgccccgaaaatgctgtttggattcgcgttaatactactttccacttcattatcactgctttcacatccatttgtcttcgagccgcttgctctgctgtcaaaatccttatcctcagtaccaggagagttcactttgtcgatgttttccaagttcatatatgcactaaacaagtcatcggcaatctccccctcagatcttttactctccataccgttgccagtattgttaccattatccttactatgctcctgtttcaccaactgattctggttctctctaccagaaacagctccgtccagaactccccgactagaaatgggaatcaattgaggcgaagactgaatcatagcagaaaatcccaatagaatatcactactggaacgcctatgacccttccgaggaggaaggctctcacctgcccgaaacgcaccccctcggttaacaggggaagggagcgactgggaattggaattcacaacattttcctccatggtaacatcattcgaagctgggtcagacagtgaggaatgcgagggctcacgatgaggcgaagggcttagtgggggcaaggagtcaagcgaaaaaaacgaaggctgagacaaagacctgttatgagacggccctggactcgtattctgaggaggaggaggagtcgattgccagtttcccgatcgaacccctgtacccttcgaataaggcagtgaatgaatcatcggattattggggtgcgaagggggtataccaggtctcttactgctatcaggactcaagttaggcgataattgattcaaaggaagaatccccatttgagatgtcccaaaaccaaatgcagaattattaggccgttgcatagtttcactagtaccctccattttctatctccaaaaaagctaaaaccttcttaccaaaccaaaccaaaaaaaaaaaatccatattcaaaaatcaaaaccctaacataaaaacaaacaaacaacaacaataataataacagtaattgaaatgcacactgatttacctggcaagataaaccctagcaggagtaataaagttgtgatggaaatcgagtctcagtagtattgagtgtccgaacagagcaatgaaagtaaagaaaggaaaaaggcgaaaactttgttattgccgcagtggaaaattgtagttgtaatctggaactgtagctgttgatgtggttgtgggtatgggtttgttcagacataacacaatgtgtgtcgtaagtaatgatatatgtatgtatgtgtctatccatagtgtgtgtaattaggttaaatacctaccgcgtgaatatcaaagacgctcggttttttttttcaattcttttttcctttatctccggctactattttcccatattttattatttaataatatattacaaaaaaaaataaaaaaaacaaaataaaaactttgtcaccttcttctataaatgtattattaaaatattaaacgtatagagtaccttaagactttttttctttttatataattactataaatataaattataaaccacttgtaattagttaatgtttagtcaataaaagagaaatgaaccttttgaaaaggttaattagtaattttttttccgaactttgacatgtattaaatcgtgtcttctaaatttttttggctgttagaaattcccccaaactattgagattgctaaatttaaggacttttgtctaattttattcaattttactgtttcagtaattgtttatgtactaaaatatgctacccagactttgatatctatcaaataatgcccctcaaactttgatatgtactaaatcataccctttaaactttcattcatgttagaatttttttactaaaattagacaaaaatccttaaatttaacaatctcaaatagtttgggggaatttttaacggacaaaaaaagttcagaggacaagatttagtacatgtcaaagtttagggggaaaaattactaattagccttttgaaaatggtactctttttttttttttttactttttcttttaaagaacaatttttgattctaatttattctttctttctagtttctaatactaattgtgttgcctttttttacaaaaaaaaaaaaaaaaaaaatgtgttgtctttagaatgagatccaaactttattattagcggttattaatgtttaaagccctttaatgagagttaattacaatgttttttttttcctaaattcttttttttatatataaggaatttattaaaagaaaaacccgttatagtgatgggttaggtaagtcagctaaaatacatcaaagatatttacataataaaaaggaaaatcagtgatccaaatattagatgatttggatttcatatggatcatccaaatatgtatcataataattacatgctaagaacatgaattaccagaaagaaagcaagaacaatacatcaagtgtgtgaaatacaacatgcatctcatgcccaacaaataagttggtttactcacgttcttggtaatatatttatcacacatttatatatagaggtaaataatattttagactctgtgttttgtaaaaattatcaattgaactctctgtttagtaatgataaaatagatcttttatctctcaaaattgtataaataagaccctaaattgattttttgtgaaaataagacttaataataatctaatctaaagatgttatgacaaaacttgttacatttttcgtatctgtttgtgttaaaaagtatcttaaagttggttatattaaaaaataaaattgtttaaaattgagcttagggtcctatttttaacattttggaaaatataagatctattttgtcatttaacaaaacagatggtccaattaatatttctgcaaaatacagggtccaaaatggtatttaccctttatatatttctaatatatttttttaataaacatacacccttaaatattcctcttcagtaccaaataacttgtaacatttatttaatcaatcgtacaattatagaataatatagggtgcatttagtaacacttttttaattagttttttgtttttaaaattaaaaaagtaaaaataatttctaaaatcatgttatataaaaccgtttttactttt

SEQ ID NO: 381596 - DNA, 1696 bp, Cannabis indica
aaaaatagaagtggtcctctgactagaaaaccactaaattcaacacaccattgtttggacactctccactatacatgacctataaaattagtcacccaaattaactccattctataggttatgacttgtgaagttttcgaccaaagagagttatttatttttattaatgtatgtgattattttggtgttgatatagaaaattatagtaataataaatggtaaatcagacatagtctattacaagtcctttaaggagtaatatcggtcaatataggtctactaaactcaagcttttacaatggtcatcaaaagatttagtactataagctaatgatctttcaaaagatttagggtactaacaatagaaatgttaacaaatacgggtggtgactaataccttcttaggtatcgtattattattattaatgcaattaagtatcgagtcacatataatttaatttaataatttttaaaaaatatcgctaaccaatcacaaaaaaccacttgtaggtaatacttagcaccgctaatatgcccaataaaaatactatactaacaattataattatatattcaaactagataagctgcctctttgattggttatataacttaggttgtctcttaccatttaggagaaattaatgttaaaaagcaacagtggtacctagtaccacctaagaccattttaaatggacgatgtaaatattgtgctaaatttagctcaaaaataagttaatattatatttgcccgaaattttataattgtgcttcaatgcactacgagtaaaataaactttattttaattgaaatacataaaaatatcaacaaaaatattaaatttttattgaaagtatataaaaatcatatcaaaatatataaatgaaaatataaaaaagttattaattttattaagggaaatactattttggacactatgttttacaaaagttacagattgggctttctgttttgtaaaatgacaaattggaccatgtatttttcaaaatagtactaaatcgtaccaaaataaaacttaataataaccctatataaatgtgttatgataaaaatagttatgttttctacatatgttcgtgttaaaaattttctttaagttggttacaataaaaaaaatgtcgaaaattgagcttagggtcctatttgtactatcttaaaaaatacgtggtcatttttgtcatttaacaaaaccgaaggtccaatcaataatttttgcaaaatacaagaggtccaaaatggtattaacccttatattaatgagtgacaatagagtaaataaagaaagtcatatttattgtagtgtaaaatttgactcatgttatatgttgtgtcaaattcggcacaacttttagaatgtcccaaatttaaaccatattatataccatcattggagttcaattttatgaacatgggctataaaatgcatatatacaatatttataccactctgttggagatactctagggtatcaaatgactattgatacaattaagtatcgggtctcacacaattttatttaataattattatagaatatcactaaccatttccaaaacctcacctcaagttgatgctaaacaccactaatacctaaagcgatccagaggactaatgagaaccattgaaaagatttgatctcgtatgcttgcttcacaaagtagagagaaaagcta

SEQ ID NO: 381597 - DNA, 4889 bp, Cannabis indica
tttgttttttttttcttattttcaactgatttagacaaaagcagcatatatagaaagaaaagtgaaattcattgtagatgatatcttttgaatttgtataatctttttctaatgttttttatttattttttgtaagtaatgctaatttgacttaaaatgtatacttaattatttaatttaaagtctacttaaattgtagaaagaaggcttatcaataggtttggtaatatttattttattttattattccaactttgtgtggaattaacaaatagtattatgagagggtcaagagttttatacctaaatattatgataaattaacaaatacacatacaatttgattgtttggaactttttaattattagcacattaaattattagtaatcatccaaaaatttacaaatattttaaattattataattgtacacaaataatattcaaaattataactatttatgtgtcaaaaatggtatgataatgccatttattgaatagtaccattcacatttgagaacttcaaatatttacttaagttatattttatgaaattcaataactacttaccgttaagtgtcaagtcaagtgtcaagtcaatagccacatggtaatctctgattggtttaggtcattaaatttttattttttatttaaaaattttttatttaaaaataaatttgaatatatcaataagagaatgacacgtgaatattgactttacacctaacgatcaggtattttcagaaactccaaaaatataacttaagtactattttcgccaaaatttaaacttagatatttatcttcataaaagttaaacttagctatttacgtcataaattactcttatttttacagaactttattaaagtaacttgtgatcaacgtaatacaaatataaaacaactcaaaaacaatttatccctatttttataaaataaaaaaatatttactcataaaaatgctataaaacagctgatcaaatttttaggtatttatgaaaatatcccaatgaaggcccaataaggcccaatgaggagtgaaccaagtccaagcccaagcccaataaataaatacatataatatcacttctgttttccaactgtactttgagaaaaggatcaaagagagagagagggagagaagcctcccttgtccgaaggtgatcgagaatcatgggaagagagagaaacatctgaagaagaagaagaagaagaagcagtccatatcattacattacatttcttgtgtttggttactgagaaattgacagaaaaatgaacttgacaaagaggagttggagttgtcttacaaagaagctcaataattttagatattaccaaaatgtggggtttcaacaaagattgataatcccacccaaaaatcccattttgggaattgggtcaatttcaaaacagacttctttgatcccatttcgtcagtttgggaataatgctggaaatgatattgatacccatatagacagagattttcttgttcagctttgggttgaagataggaaatttgataagaaaactaggaaagtggtttatgggcattgtggttcttcatcttcatcatcatcagtgtttgaagatcggttgttgtcttcagaagcttatgtgcctgaatttaaggagggaaaacaagctgtgtcagtgccttttcctggtgtgacagaatatttgagacctgaaactccagaagaggtagaaatgatttgctcttttataacaagttttgttaataatgtatttattggattaaaagtgatagctttacttatacatgatttctcattgaggaatttattgacattaactttgagatgtaaaaaatcgtgctcccaactttaaactattgaaattgttggaccattttactaacagaagcccaacatgttgattgtttgcctattagtaaattaaatgagagtggaatctaacaatctcaatagtttgggaaaatttttgataaccctgaaaagtttaggggtaagatttggtatgtgtgaggggaaatcctaattagcttctcagaaatacatagatttgtaattagttttgtaatgagtacctatgtcataaagattaccataaaagacgaaatcaaaagaagtaaaagtgttggattcaagtattttcgaataattccgttttactaacacaagcccaacatgttgattgcctattagtattttaaataaaagatgtatctaacaattttaatagttcggaaacttttgatggcactgaaaaatttaggggcaccatttggtacgtgtcgaaattgagggggaaaattctaattagcttctcagaaatacatacatttgtaattagttttgtaatgagtacctatgtcataaagattaccatcaaagacaaaatcaaaagaagtaaaagtgttgaattccacatattgtacttgttgttagtgaatttaccatatacatgattgatacatgagatattcttcttggtcagattaatgttgaagcttcacccttgattgaatttgattataggtccaggtagaacctcttcttgccagatcaaatttgctgattacaagggatatagagtgggcaaatcttgtccttggttttgagcaagtaatatttagtttgaattctcttgtcctagattgcatattctgattttttatccctttctaaaatttcatggttcctagcaatatctttacatttgactttcgcaggaaaatcggtatgccattgtcgatgtgtgctatccccaatcagtaagtgtttatttcttcttcattttactgtcatgtgttcttagacaatgttgtgagcttcaaaagaatgtatagtgttttgttcgaaagatttttgaagtttctaatacttattatgattgttttgcagcctgtcggtttgattcgcgaacaaagtaatgtccttgctagacaggtaaaatatgattttgatatgccatgcttgtgatttgtgtcaagttccgtatttgtttccttaactcgatatataggagttagaaaacatgatttgatccatgttttgtggagtcaatattcatggtgatgtatgtatcttcaacaatctatatgaaccgatatatccatctttgataatgtaactatctaatggatctttttcattttaaagtttcttcgcttgaggcgcccttttgttgctcatgtaactgatgcggcaggtaacgagcttttcaaggtgagtatccttttttacttattttgtttttgtatttggtaggaggggtttttgggaagcatttgatttgattttttggttcacactgtattaggtacgcaggccgttttggtggataaacagctcgatttatgcagaggtcaacggaaaggtaagcctatttgctagttgttcttacctaatatttccagtgtattgcggtattgttgctgatactgtcgatctttatgctaatttccaggaagttggtgtggttcatcgacgatggcatctatggaggcggatttatgatttgtacctcgggtaattccctttttatcttttcgagatactcgaatctgaagcctacttaatcaaaaatagtgccttacttaattctcataaaaaaattatgcaggaaccagcaatttgcagtggttgaaaaccccggcttctggaattggacttttactttgaaagatatcgatggaaatgtgctggctgagatagatcgcgactggagaggtttcggccttgaggttgtgtctctcactttcaattttctatctttagtacaaatcgagaaagtgaacaactacctgtctaattatgtatattgtcataaaaaacacagctttttaccgatgctggtcaatacgtgattcgctttggaagtaccgatccaagctccaatcatggagctgctgctgaagtggtaggttattcccattaccaacgaatatttcgttttcctactgttattcataattggtcttttggctgcagattcaagatttagaagtgttccgtccgctgagtttatcggagagagcagtggcagttgctcttgctatatcattagacaatgattatttctcaagacatggtggctggtaagctaaacagtacttaaaaatcttattagaccgctaaaattgctcggtatgcacatatgtttccacaccttcccccacaatttttttaggcattttcttgtgttttctgctcccattttcgtttttctgtttgtttctcgaggggattgcctttgatggcggttggcgagtaaacacgattttgctgtacagttgttgagaatgagaatccatttgcttattcttcgaatcgattgaaggccttaaaatgttcatatgttcctctttcccgaaaggatgttttcgcaaagatttttcggtttttgataccaaaaccttgaaaattaaggagtcttgttgtactgttaaacaatatagaaatgaagcaaatgattgttaaaaaaaagattaaaagagaaagcttttgagggcctctttctctttatataatgtatttaatttataccagcaatgtttaagttttatttaaatttatgtatgtataaataatcttgccaaaatcgtagaggagaagaatacaagccaactctttctgtattatctatgaaacaaaatcagcaacataaaaattctttactatttcattagtatcattttctcccctttcttaatctcaattctcaactctacagtaaaaatacacaaaaaggagaaaaacaaataaaagaatggagcttgaaaatgtcttcaaaatttttctttatacataacaaattaattcataattaaaattcacatagcaatttacattgaaactaccgaagtaactaccggagcaactcaaacggtaaattt

SEQ ID NO: 381598 - DNA, 1935 bp, Cannabis indica
gcgagatctccattgatttggggaaagatcatcaagcataaatgtgttgggttttccactaaattggtgtttagtggatttaaactgttcttctaaagatacttcttcttctatgattggttttgttgggtcaaaattttgttctctttcaactcctaaggttgtcgttgtatggttggtggtcatgaattgaggcagaattgtttcatcatcactgctactttggtcatcggtttcccagtcatcaaattggttggatgatgatgacagttcgtcgtcatctaggttttctatttctccgttaaggttgatctgtgggagataattcagacagtgctgatggatgatgtcggtaatgtcgtctctctttccaaccatgagttaagtactttattggccttgattctcttgtttcttttttcttttaagctggtcttcttcatctagcattctttttagacgaagaattcgctctcccattttttgtggagatgctaatggttgagctgattttggtaatgttgagaacatccatagtgtggagtctaggcttggagcgagaggtgatctgtccttagattgagtttgcatggagacgtactggctttttagaccctttagctctgcttcctttgcaagaaaaatctcttgggggaacttgcttagatttgaccatctgtagtagttcttcgtgtacttgcgaagacaagtctggtcataacggtgtcgactttttaaaatacttcgttgacctgtgtaactttgtgggtgaccgtagagaatttctcgtctatctgttggagggtcttgttttgggccagcatattctctgtttgcccgttgaggatcgcttttgctgaagtgattttctttaaggtaccatcagcttctcaaatgtttggattgagaacttttggctggtgaatgatttttctagtttcatctgtaaagttgcatggaagtggaaatttatcattgctacgtaccctgtagcatgaagagatgtgcagttctctagtcttaattaaagtaaaataagtgggatgtgatattaaattacaccaataactatattacacattacaaattaagtagttagataccattagtgtccattaatatttctctattacttaaggtctcttctaccatatctcgaaaaaaaaaatgctatgagacaggttaatcaaaaataatgcgtgtatcttataagatgtaaaacatcacaaaaattaatcacatatccattgctatgtgtattttgatatatttgatgctgacatattttaattacatactcatactactgtctaatgttggagacctgtcaaatagcaatgttccaacttacaaagaataaaaacacaatatagaaagacttaaaaagaaaaaaaaaaacaaaaagcaaaaataattaatataaaaagacttgaaaataacaaaaatttaatatatagaatgacttaaaaagaaaaccttaattaataaacatatattaatgtagagacgacttcttcttcttaaataaaaaaaagactcaacttgggcaacaaaagtctttattgaatccaacaaaagtcttttagtcaatgtatttcgcttgttataaactataagaaatggaccctgatatatatttattatttttataagtgttatatatacaaatgataaaagtaaatgaatataatgtatattatttttttattatagagtcagttattaaaattaagataagtgttaccgtaatttttattataattttttaattaattttcgtattcaaaaatacttgttagaatattatttatatgtaagtttttaaaaaatttcgaatagtttacaatagatattgaaaatacatttaaatttttttaattgtactcgtgataaattaaaatatcaaaaactttattttcagtactataaactatt

SEQ ID NO: 381599 - DNA, 1327 bp, Cannabis indica
atactgagaaaggttgttaaattaattgttcaaccacgatcattttttcaattaaaaatgattcaattatacgaaatcttaagaaggaacaataataagcaaacttcatacaaccgcactacttaataagacgtactaaataaatttctattataaaaatagagacataagattaggatgagatatgattctaataaagaagtgattaattaataattatattccatgttgcaagtgtgtaataaggtagtcttagtcttagatgttaatgttttataagaaacttaaaaataagtaagaattgactaataccatttgacaagtgggatatattatatataaatagataactaaatatttataataatgatttcatgtgcttattacttatactatcttctaattttcaacacaaactcacaagattcccttaatttggaagtgtattggcctttgacagcatatctttggacctaacggtgcttgtctattctatgactaaagataatataagcatatatttatttatttattgaggttgaaaatagtatcttaagaagtttaccacatgtcagcaatctataagatgatcttcttccaataaaattttgaaatttatggtcaaacatgtcatgcatgagatgagatataatagttttataactttacatatatcatcattaaatataatggaaatggaatggatggagaggtattataattttacaccaactatgagatatattttttgttggggttatgaggtaagagtataaaggtttattctttagatttttctgaaatggaattatgttttcttttcaaacttatactgatgaatattggattgataactccacataatgtaattattcaaaatctttaattatagttatgtgttctttgattttgtggacaattttgtaatttcataaattttgttaaattaattctttgttttgaactttttaattaagagtaaatgtgtattatttattatattttttagtatttattttatataattttaattatgcatacagtttctttttttccctaagctttttaaccttaggttttcttttttcaacaaactgttggaaaaggaagaatttttttggcaacaaatctcaagaattcagaggcgcaaaaccgagtattaaaatacttataaattatttcgttgataagctaccaattgattctaggttaattaggatttttacttccaaattttaacatgtactaaatcatgccccctgaacttataaagtcgttaaaaatgacccctgaactattaagattgttaaatttaaggacttttgtc

SEQ ID NO: 381600 - DNA, 2947 bp, Cannabis indica
ctacccaaaaacaaagctgcattagcaatatcatcagccttaagtgtcaaatgttttaaattagcaatctcaccagtcacaccctcaatcacctcctcactgaccccagtaaactgtttagccattggggttgcaaccacgaaaggcgatacacaattgactcttatcccaaactgccctaattccacagctgcattcctcgtgagtcccaacacagcatgcttcgagcaagtgtaggcgtacgagccagtgccacccaagctaccgctgacactagctgttgatataatgctcccgccaataactcctttattggtcgctgagatcatggcttgggctgcgtgtttaatgccaaggaatacgcctgtaatcaagaacagagttgtcacagcctcacaaattaagaagggccaaataattttttttttaaatcaacataatttagaaaaagaaaatggaggctaagtagggatgcacattttctttatgggaggagaatttccccaaaatcaatttttgttctcgaatattaaatggggcagggacagggatgacactcttcgcctggccccatatagagatacgtttaatttattaattaattttttatgaatattttatatatgcgtttgtgtttttagtatattaatatcattttataatttttgaagttgtatttttgtataataattactatattaaataataaataatgtgtaatattttgtatttattaatttaataattttatataattaaattttaaaataacttttatttttttaataggagatttcctctatgtctccgctcttttaggggatttcccgtcccatccctaagtggagatatatatggagtttaaaatccttaacgggaaagagcaccctgctaattctccgtcccgtgtgcatccctacctctgagtgtccttgcctgtgacattcacgcgcaacactcgctcaaaatcgtccttgtggctatccttgagttgaaatttgttgtcaccaagtatgcctgcgttgttgaacattatgtccaactttccaaacgagtttagggctttttccacagcagctttgacttgggattcgtttgttacgtcgcaatggatgtaagtgatgtcgttgtgtgtagctgatgatatggattggcatagggagtgacctaattcatcttgaacatcggctatgactaatttggctccgtgttgggcaaaaatttcagcacttctttggccaattccactggctcctcctgtaattaaagctaccttaccttccaacctatacatatatataggtcatgtgattatatatatatttatatatgttctgaaaattaaaaaaaaaattgctttgccttaattttgggacataccttcttgagagtgttgagagcaatgtggttgccatatttttttagggagagatgatttgtttgatttgattatttcaatagtattgtgtggatatagactcatcatattatgtatattgtatatatttataataggatactacttaggattagattataaattaagtccacttcccaataaaagaaaaaaatatatatattatttaagttggttatgatggctagcatcttagaaaaacaaattgtaaataattctccatttttatatatatataaaaaaacatgtatgaccagatactaacttgacagctatttctcgaatatattatatgacacaatacttctgctccacttttccaatttcaaatatttaattcttggattttttttttcattgattttatttttgtcacctttctcatgaaagctccaaacaatccaaaggaaatagcataccaaattgtgtcatatcatgggaagaaatatcataccaaatttctcttcacacacatatcaaacgaaacgattgaagcaattttttcagttgtcatactcgtaattgatccaataacaagccaatttattacaatacacacccaacccaatatattgtgaccaaataacattaatatatctttgtacgtacggctcaatattagagtacaaatacgagaacatgtgctttggaatgatgtttcttattaattagtataaatctccataaaaaacttgtaaagatttgttatttcatcataaccaaatctgtagcttatagaatgaaaccctaataagacatccggtgggttcaaaatcttagattgtaaaagacaattttgtccaacaagaagaaaacgatgccattccaatgaagccctctccataaaatttgtactggaaccaaatgataaatttgaaggtggttataacttatagttatcattaatattagttttatcgcatgatattgtgattagttgagatttcgacaagtgtgacgaacaaaattcaattaaaaattttgtacaagtactagttttcgagtgatgataccaatgaatgattcgctctttctcattttgtaccataatatttgcaaacaagtttgaattttatgagagagtcatgaggcagattttgttgaagtatgattggtcttgtctttgtcttgtgttgtgttcatctcacaaatattatttaaaaactaattaggatttttctatgaacatgtaccaaatcatgttcctgaactttttttagccgttaaaaattctttctgaatacatggatgaaaattcaggggcatgatttagtatgtatgaaagtttgagagcatgatttggtagatatcaaaagtctgaagaacatagtatagtacataaacaattactcatgaggcaaactctcaatagaattttttctactgttaatttcttcaattaaatataagcccccaatttttaactgtgaacaaaaccaaaaaaaaaaaataatcaaattataacctacatccatcaatcattactttctcataattgaaaataaaagataataatattaataataataa

SEQ ID NO: 381601 - DNA, 776 bp, Cannabis indica
tacaccagtccagaaaattcactagctacagattggatttgttcatcacaaataataataataataataaaaacacaaaacaaaaaataatatgtgcacataatcatatcaatgtattttttaattaaatatattgattttgctgtaatttatcatcctttaattaactatgattattgaattatttaatgataagattttattgtattatatatatgtaataaagtaagagatattatacaatttcaatacgtttttcatttcccaactaacttagtactatattatcacttaattaatagttaataacttttacctttttttaaaaaaaaggaattaatagcttttacattgtaaataaatgagttcaaaatacaaatatttataaatatattttatttttttttagattagaacatgtttacaattacaaattttaacaataaataatatgtattaaaatttgtgaaaagtataatttcaaactagtttttaaaagaagaagaaagaaaataaactaatttatgtaaaatgaattattgttgtttattttgggagagaaggtagtagctcctattattacccttgattttgatttgttgtaccaagtttattcaaaaagtaaaaaatattgaaactaagataaaaaataagaagaattttattttgtactaaagaaaatattaagtatacattaatattaaaaaagaaaaattttaattattttaattaatcaatcttaacatttttaaaattttattttttatattattttt

SEQ ID NO: 381602 - DNA, 1317 bp, Cannabis indica
tagcctgtctaatctaatccaattctgcgtacaaaacgggcctaaaatgataaattttggctatatctattcaaatatggtctagtcacttagtctcatgatgagatggcattctctcatttgttccctcattggtttagctaaatcagttaagcataacataaactatataaactacccgagtattctatgatcgatcagattttagagtttattttcttgcagagttctttagcttaagtttccttttagattggtagctattgagaatctttcctctcgaagggttgtaaattgaaggtatgtgtgtttgatcatgatcttcttattgggaggttaatttgtaaggaggttaatctccatcggtgaatgatatagccacctaaaattgtaattggattcttgagtgattaatgaagatgatgaattccatgatggcttattttttgctagtctagatccaacacaattaattgagctaattctttctaacttgtctcattatttctctatttttctatttcttgtcttgctgaaatttatgttcttgaattccattttttttttatcacaatgagggtgattgtttaatcacaacaaatggtatcaaagtcgaggtagagttagggtgatcaagaactatttaattaaagttcaaagaatcaagaacacttcaaaaaatagctacaacaaagtacaaggtcaacaagtttaaagggaccaataacttcagtctctagagaattataatgaaagcactgtttgtacatcaaaggatttcaaaggcaattaattaagaatttctccaagctattgaagaatagaagcagaaggtagaaattgaatcaaaggcacacattgcaattctcccaatcttggagatgaagttcttccagatgaacaaaatacactcggtttgtgggataaaatagctgcaatctacatgaagaagtccttttccaataagtgaacttgaagtggagagaagatggcaaagaacttaaaagacaccttaatgactttaacaagattattcttgatctgaacaatataggtgtaaaggtagatgaagaagaccacgttattattctactaagttccttacaaaaattgtataaacattttgtttatacaattctctatggtaaggacacattgacaatgtcagaagagaaggctgcattgaacgctacagaaattcaaaagaagtttgatgacaaaccagaattcagtggtgaagagttgtatattagaaaaagacctaaaaagagaggctataaaaggtcaaaactgttggatattattttaccagggtct

SEQ ID NO: 381603 - DNA, 1328 bp, Cannabis indica
actttgcaaaaaattaaaaataaataaataataagattgaaaaaaataagaaaacaacacaaaaataatataaaaacatcatattctttataaataaaaactttaaaattgtaaaagttatttacaaccaattttttttttgtaatttcgttttgtgaattttttgagtatttataagaatatcccaaaaaaaatatcttcataaataatactaataacatgaatgtcaatttctcttactttggcgagaagaaagttcatacgagaaagtcattccatgataaagagtgaaatcaaacacaataataatgacctttcatttgattattttgcattctaatagattcctcacactcacaagtcacaaccaaacaccacctaaaatctgggtactttgcaccacatgtttttctgtaacatttcctcaaatcatttttctcacaattctttttcttcttgataaaataaatacatattccatagaaagcttatttaagtttgaatttgctctctttcctaaaaataattattatttcagctagttgacaataacaatgcacattcactttcacttatccatccttctctcctatctcactcagtcccaaatcaaaatctcactaaccctattggatatcaatccaactccatccatactcaactcagttacacactttttctacttattatgactatcacggaatgccattataccaaatatatgctaataattgttatgctctctcatgctattttactgtgtgttaacaaagataaatgctaaatcctaagcctaaaagcctaagagagtatatactcttgttcattttgatgggggtggtgtggtggggtcacaccatcatgaagaactaacaactatgtgtccttgatgagaaaaatctttaaatttcgagggcataaatgaaaggaaacacaaatttaaggtgtaaagagtaaaaccatatttttgggtaaataattaaaaacaaacaaacaaaaggttgccttgcctgcctttgaaaactatcctctcctgccctgaggttaggcactctctcgaggagagtgaaggaagaagcagggcgttcctaccgaaaaaaaaaaaaggaaaaaaaggtaaagacttggtcaatcatgacgtgacgaccatcttctccatacccgaacccaacatcattgggccaccattcgatcttccaaactcatcggagaatctaattttttcttttttctattttcttttcgttatttttaatctttcatctgatacttttttttttggctcttcgttttctttctctctaaagttttgagtttttttttttttt

SEQ ID NO: 381604 - DNA, 3519 bp, Cannabis indica
aaaaaattaaaaaatatttttaacaagtgatcatgattctgcacttataagatgtgtagctcttccttaaaatatttttggtattacttctgccatttgagtaattttttttccggcaaggtcaattattttttaagcttttagtcgccttaaattgtgtgaacttaatttggctctccaaaactaatttggaaaaagtccaaaccaacacaaaaaataaatctaagtctcttttgtttaacctaaagacattcagttgttgtgaatcctaaacacgagtcttgatttaagaaactccgtgggaaagaagatttaaacactttccttcactaatatatatagatcttccagcaaaaacatacataaaaacacatctacatatataaatataccattgtgttatatatatcttccaccaactttctttagctcctacataagcacttacaatctacataacagcaggcctaattagtctagaaatggtaacatttagcaaaatgttatctttatccatttccttggtaaccaattcaaacacacaagaatctccaggcttcaaatggttctcttttgcaaatctaggccatccaccacttaaaatcagtccacctgaagtactacacaaattcacagaccacaatttcttcccaacctgaagtgttacaactccagtctttccttgtagataactatttgcaaaatcatttggaacacgctgcagaaattcaaatcgacagtgagtgttgagaataacaaacttctactcacatttcctaaatatacagttatcatttgtaaaatcctaccttgaccttatcagaagactgccccaataccatttcaaaactgggattagattgcttggttgatcctccaaaagatttgctgtctcttgaagatgaagctgcgccattagcaacctgtccggttgagtgatccttggattttgcaccatatttcatgtttccttcaacatatgatatgaacaaagtttataattaccaaattcattaagatcataatttggagtcatttactaaccttcgcattgttggttgtttcgatcgttgcattctgtttctcggtgaatggaaacatggaacatcatttgatttttgttagtgagttcaaatatacaaacatctccaactttcaactcattctcttcaacaaattcctgccaatctcttctcgagaaagtaggcctcggtgaactgcatctatttctagtttttgtctgaagtttcacaagccaagtcttcctcatacaaggaacatacaaagtaacatcatgacaagaattatcatcgacatgtcttttccaaaattctgttagtattgcctaaaaccattaaacaaaatgaggaaattagaaaagacttatgtaactatgattctacatactatactacaagactaggaaagtgaaaaaacaaaaaacttaccatgttaaaatgatcatctacatgtgtcttttgtaatacaatcttgaaatatggatatggggatttgaagttttcagtcttagataaagctttggctttttcttcaactgtcattgtcatcgatcgcttccttttagtacaagccttaaaaagtcttgtatctataaagaggtgataattataagtaataacaaataagaaagcaaaacataatcttaagcaataacaacatgtaatttcacacaaagcaggacaaacctgttattttgagagacttgaaacactcttcatcattgtcactacttctactactactattactactactaacacaaaacttggtttttcttctattgggagttgaaaattgtgagtggctcttaaggtattcattattttctatcctctttcggggttcatcgatgatgttcggcttcaacttgtagcatatctccgaaccgtttgcatcaattatgaccacatgaaatctagattgaccttcatacctaaagagcaaagaaaatccacattgtatggagtgatgccttgcaaaatctggccaaccttcacccaaccaaacatcatgaccatcatcacatttggtcaattttactttccatgttccaccactaggaacttttaagtccactgagtttgatgtattcatattactagcatattttagcataaactctcttgggattttctacagtacacagaagaagaaaaaaagaccaatattagcttcaaataacaacaaactatataatttatatgtaaggaaggagagcttacaagcttattatcgaaaagagaatcttgtaagatcatcctatgaaagtgaggattaagtggacaaaagtttgtagattccattgctgattcagaaaaatccttgcttctatacgacattaattaattattagtccacatgcaaaaatcaaactcaaactcatcaaacccatgatgccaaacatatgagaaaggttttttccctttaacaatttccataatcttttcttgggaaaattcatgcaaatcataataacattatttatcgtttttttttcttctgtgaaatgggtaagtttattttcatgttaaaaagttaaaattcatatataaatagaagttgaaaccagttcaataagttggaaagttgtttgaatgttacaaaaaaacacttagtttattttagcataaacacataaaacatcccaatttctagctacaataccatttcaagacagtaaaatacagcagatttcaacttaaaaaacaaaaaggtagcacttttattattactaaactcggaaaatatgtacatattgtaacaaggtttttaatatagagtgataataataataataatcaggttgctctgttttggagagcttaaattaaatctaccatggttgacattaaaaataaaatcaagcaaacaagttattaggaaaccaatctgagaaagaaagggaaaaaaaagaaagtctttacagagagaacctctagtttcttcttctagttatctctgtgaaaaaacccaactttactatgagaaatggtaaaaaaaattcagaaatttaaaatacaagatactgacacttaagaacagctacacctaggcaattagcttagtcataatagcctaacattaatcttcaatcagatcactagcatgtcacatttactttaggaaaatctgcaatttactctctaaagtagggtttatcaaatcgcttacactgcacaaattacttataccgcgccacgtgtataaaaaattcaatttgaaattctttattattttgatttaatgtacacacatatggagatcctataacaataagaaaatatttttcccttctattttaaagtaaattttgaatttctactttagagatgaagaacacttgaatatcttttcccttctgtgaattttgaatttcctataacaatagggatataattttctaaatttaaaaggtaacatccattcttaatgctactaaaattaaggaaaaattagagatttaaaagaaaaagataaatgataagtaaaagatcaaaa

SEQ ID NO: 381605 - DNA, 1611 bp, Cannabis indica
ttttttcttttttgggaaatgcaggcttgactggattttcccatgctgcttttgtggtactgaattagacttctaaattcaaagattatgtattcattgtatcattttattgaatttatgcagtgaaattatttttttggttcattgtatttgtctgatggacacaggcaaggtcgattggcggctatggctttcagtgtggtattattctatttcccccctttcaactctagaacaaaaaaaatcaaagacataaatgattttttatggtggaattgattgtcaaagttggtttttaggccttgttgctgcaatttttacttctactcgttgtgggcttcaaagatacagaagaaaagatgatttggttagttatctatcatatcatatcatgtcatagtatctcatctgttgttgcaaatttgcaattagttttcttaatgttatggcttagttaagtttggtctgataatacttcttaaaaagattcattttcttctccatttgttactgtaatttatttcaattttcatcccaatccttgacactggggtgtagcgaagagatttctccaaatatttgctaattgagtgttctggaagattgcatggatacattaatttttaaaccatacatgttatgagctagggaagcgagtgatgctatgctagtattgtgacattgccagatatttttgaatgatcttcgctgtatcggaaaaaccatgaaatggctgctcaatctggagtattgtcaatataaatgatgcaataactatctcatagtgtgctcctaatgttcacacttacacttgtaccttttgatcattgcaatggcactgccgaagcaagagccatagtgtgttttgttgtggtagaatggggggagaatgtaacctgctaaatttttgtctatgccttcccgacctatattcattgataaattaagttataaattaaacttttccttgtacaatagaacattatctgatcttggatgttcttttgttgtatgatgtgaatatcatatgtttgtttctgtgtatttgcaatccctattttttcagtactcacatacattaaacagatttcttttggtccgctcaccattgtggaatgtttttaggtaaatgctcttgttgcgggagctgtagcaggggccactgttgctgccgggacacgaaacctgaagcaagtagtgggaacaacttgtctagtttctgccttcagtactgctgctgactacttcagaacaatgtgaaatgcttgttggtgtagaacccaaagccaaaggtagctaagggaagggttgtcccctttccattccatatacttcaagttcaaacaccagtctagataacaattattagtcattatttttcctcatgaataagataaattttcattaccaagaaaatttcatagaatacacatcatcattattattatttgattatttcaaatgagatatcagttgccaaatttgacctgaactgatgtgtttttgtaatgaatttattagtagccttctaaacaatctaactctttctttttttttaataaaataatatatttgttgggttatagtgtatttttaccaatctaatataaa

SEQ ID NO: 381606 - DNA, 5393 bp, Cannabis indica
tttaaatttttactagtagtcactatataattatatcatagattagttattttaggttattaatgtaaataatataaaatgttaaattttctaagtaaaatatttttattgaatgtaaataatataaaatatgaatctacaccaaattagtgtaactattagaaatattcggaagaaaatatattcatgggtagatttacttttgtttgcacagctcatagtaaaaaaaattacattaaaagataaaatattttctatttaatttaataattatagcataaaatttttaaaaaatcacacgaaattcaataaattatgataatttttacttaaagtagatttgaatattttttttaacaactaacttctcacgcaacaaaaatttaagtctgtcactaaatttattacttgtatattaagaaaattaaataataagtttacaaaaaaattaaagcaaacgtctccaatctccaaaagccgccgggtacactaagtagtaattctgtaattgtatataacaaagtataagatttaagatcccctcaaaaaaaaaaaagtaaggatttagcctattaaaaaaaaaagtgatctaagcacgtgcttcaagttaataatcaaatttatcaaggaaacacaaccggaataacgtcactttcacaatcattagtggactaaacaatcatcccaacttaatattatttgtccaccaataatgccctttaataattaaattagccttaatcatagcttaaaccatcatataatataacatagtgaaagtgattatcatgtattctagaattgcaagtatagtaaaaacaaactaatatttgagagtttttgtttttttgaaaaattacattgtatactcattttacttaatttgttttaatttttacctctatttttatatttttttagttatacctacttttatagatgatgttcctattagactccttaggttatgtaaattatatactagacttaagtagagagtgagggtatattagacaatccactaaaaaaagtgggtatattttaataaaaaaataatataaaagtatttttgattaatggatacaaaaaaaaatatttttcaatttatcccttatttttaagggtaagttttgcgagattcgctatcgcaaagatagctatatactcctttgagacatagtccatcaaatcaattttagaagaaaagtgttattgttaatttcttggattatttactccacatgaaatttttatttttttttatttttttattgtggggcggaattttttttcaaaaatattgtattttttttcaaaatattgtgtaagttttatattgtgtattgtgttaagtttttactactgctctacggttgttttttagttgttctacttttgtttttagttattctgttttgtgttctactgttgttttataaaaatacaatatttttgaaaaaatttccatgtaacagtatttttgtaaaagtttccagtatttttgtaagtcttcctaacttcttatagtaattaaattctatgtccaaaaatatatgtaagaatatttttttttacatttttttgtggcggtggtcgttaatatcacccctataaatttttaaaaattttcgagtagttttatgtttaaaataatttttatttagtaagaaattaaatatttgatttgatttgatttataaaatataattttttatttaataattaattaaaatattttaattatggtcagtttaattaacaaatatttcagttacctgatttaatttctagaattaattgttaaaatatttttacaattagtgtgacagagattttgatagaagttctcacatatatataaatataagggctcggtcctcgagctcaatactcatcctgtgaaaacagtaaatccatctagagagagtagagagagaatgaaaatccaattatccacactaatcaatttccttttcttttacagatttaaagttcgtgtgtgattaaaactcaaagaatcaatagatggagatatttcgatccttcaaatagtaacatgtatatgtttgtgatagtcaatagtctcgtgatccgtaaagggaaatactaggtaagttgtgcaagcccacattgcttgagaaaggtcaagtgtgatgattctgagactttttttttatgaaatgattctgagactttgtaggtgttgaacgagatttttgacaaccaataattagagttgtatgaagtaattaatgaatattagaagatgaaattttacgtggtcgggcattaatgagccttagtccacgagtcactgtattaataagaatatttattacagagtgtttttccgaccgatccccttttctgtatatcatttaggtatttataggctcataatggtggtaaaaagaccactattattgtgtttgattgcactatgctttgcacaatttcccaaatttgatcttaggatatgattgcctacttttatgatagattttaaactatttataggcgtttggtgggatttgacttatccttcatttatgacttgatggcccatttatacaattgtcgattgatgtatggggtctcgtgaaatcacaaaaggatgggctttaacccttaaactcgtttgttagagtaaggtgtcgaatgcttatccccataccacattaaatgtgtgtacaatattttgatacttgagtgacatgttatgtttcatcagttctcttgtacccttctctgggtagacttcactcacagagaggaaaagacaagagatactcgttgtccagcaagacccacctgaatataactgctctatcattactcctctacaataatagactccgggagtaattgatgtgatatttcttgttaggtgggtcctaccgctatctagctcactcctggtttgcaatgtattttgggagaaattctaggcaacatttacccccaagtcctttttgcaattttgcaagatgagacatgtgatgtgcctcttggagtgttgacgtcacgctgtgcatgaccattttaaatgctgctcattattttctccatttttgatgaagacgattcgatttcttaatcaattctgatgccattaattgtaggatgccagaggggcattgagtagtgtaaatgtccttttgtgcttgtccatatgccaactgcttcagttgttgcatcacatggttttcaatctttgaattaggattgttggatgatcgacgatccatgttgccttgactagtctataaaaacccctcattcttcttcttcaaaaattctactctcatatttctcagaatcctcaaaccagccaaaattctaggcagcccagattttcttttactctttctttgacattataaagctcgatttcactggtgttttgcactagcatctacaactgctcgatttcaccctatttgtatgttactagtcgcaagaatttattcttttccttgtttttttactgccacttcatttgatgatgcttgcatgaacatgttgttggcattgtattagtgattttgagggtatttcccaaggctgtcttcagttttcatctttagacaagagattcttatgttagggctagtaaaacttgctcttttccttttccatcctctgcaccattgcttttcatcatggtgcagttagcacccgatgtgtagcatatgaaatttctctattttgggatatgctagcatttggaggggccctcttctcagtggttaggggaccccattatgttttttatttagggtttgatatgagggctaactgttgggttaattcttgtctttttaaatgagcgacatcttgagcgatctccataaacacaatttctgtgccttcaacaaagagatcttagaacttcactcaaaaaactagaatgtcgaatcttgaagctcttgccccaccttcttctcaggccatggtatcatggtaccctgtggtgccagtatcagtagtgaaacagagtctagttccagtcacgaactatttacactgagccaccagttgggaggctgaggaactgcattcgcccatgggttgcattcatcacttgggttccatcgctagtaaaatggaattatgccttaggatcaatgggtcgtccaccgtttaccctaggagactaaaattctcaatcattactacggtagttttagggcatggagcaaaacacatctcgtgtctgaatagatgttctcgcttcaaaagtacttaataaattttctagtttttgtaggacttactctgcatccatggataccttaaggataccgcctactgttaagcttatttcttttttatgctttaaggggttggcctactcccaaccccactgaaattttattcctttttgaattattttcatcctaaagaagggggacacacagaaggatggtttttattccctccaagctcatctaaccaatgagactcctattctgttcaacttccaaaagaacattaaggactgtcgtcaccagattttcttctcctctagcttcaaggcttttgagcttcctaatctcttaattgagtggacccagattccttcactgctctggacaaccccaacccagctcttcttgaaccacgctgccatttttgcaactctttccaaggaggaacttaacgtagggaacatggttacaaaagccaactgtcggaggacttgacttattcaaggccaccaatcaattaaggacactaatcttttaaaagtgacgtgtctgaatgcttggaataaggaggccgagaggaagctctgagtggagtatatctaagaggatgaaaccaagtatcaagccttccagaggaggaaggagcaggaggatctcttaacatgtgcccagggtgcagtagatcaaaagatgcagaagaaggccgacaagaagttggtggctctgagaccatcatttcctttttcgtccctaactttggtactcccagagctagttcctcaggtgcccgtatgtcccctctatcctttcattatgtccctcatgttaggaattatgctcattcacagccagttggctttgataggaggctacttagagtatggaagcctcactctcggtaggcctatagggaaaaagagcattactttcccaatatcggagatttcttgggtagatcccgtatggggtatgattctccaattctaatccttctgggccatacttgccaccttaccttgagctagttcctcccttttgatagttttttaggagatgatgacaccaacaacattatttatgagtttactaggacagaattagattgtctgggtaggattagttctttctacatgtctatatctttgtgattttttgtaagtgttccttatgtttcttccattt

SEQ ID NO: 381607 - DNA, 856 bp, Cannabis indica
aaaaataaagaagtaggcctgaattaaactcatattcatttttcagttgttctgacacattagtatccttcctaattccttttaagaaaaatgtaaaacaacgctaacacaatattgtgaattaaaatcgtaaacaaagaaacttaacatcaaacatagcatcacggttccaaaaaaaaaaaaaaaaaaaaaaaaaagaacacagtaacatgatttattattgagcgcaaacaaacatccaaaagcccaaaaacaaaaaggaaagaaaagaaaggcataccactgattttggacttgacggcgaggtagcgggatcggagaaccctgcggtccttctcggcaccagattgttcatcttcagagactcgtttagtagaaggcttagtagtggtggattcgcgcttcacagccctaaccatggcaaatggtggttgggttgaggcttgagagagagagagagagagctcaagggaaataagggtttagagtttaaactataaaatggggaaaataataaaataatcctaaattggattcaaaaatattcaaacaaattaaaggaaagagaagagagggagggaaaggaaataaggaaaataatattttaagaaatcggagagcggaggagggaacagattttaaaggggtaacctttttgttttgccctcccgccgaatttatcaggtttgtgatggacggctaagatcaaactcttttcttctcacccacaaaactcactactccgcaagcaatggattaattaattattgggatttttacatcaaccaccaccaaggatctaattgtcaaaattagtggtttttaatttttccgccttatcttgatatatatatat

SEQ ID NO: 381608 - DNA, 718 bp, Cannabis indica
attagtttgttatattgagaactatataatatttaattatgaaaaagttttatgcttgttactttttaaataaatgaaaatcttgggaagtttgatgaaaatagaataaggagttacaaacttacaatcgctcctacaaagtttacaacatgcatgagatcttgaattgtaaatgcatggaataaatgatatgaaaaattactaattaattagaaagtgtcacattaatatgatattgaacaccttaacatgcttaataataatgttcttacaattaaccgagatataattttagtaaattagtaaatgatatatttggtgtaattatatttatcaataaaagttatgtcatgtgtcatattttactaattaaggtggtcatgttctcatatttgtttgattaaatttaacaatatgaatatgttattggtttttatctaatggatcttattataatgaatattgttttagcagtgcttaatgctttttaaacactactacaaaaacctccttttgagacggtttttaagcccttttagcgtcggttttggcgaaattcccaacgcacttcagggtgatgctaaagggtttttaaaaaccgacgccatttatacccttatgacgtcggttattatctaggaaccgacgccataggggtatatatggcgtcagttcctgcaaataaccgacgccataggtggcgtaggaaccgacgcca

SEQ ID NO: 381609 - DNA, 2157 bp, Cannabis indica
agtttgtttgactttattatgcttagaatttttagattttgagtttttacattattttttttgaattttttattattctttgctagatttttttgcttcttgaatattttgtaggatgtttttagtgatacaagtcgaaaccgtaacattaataaatgctttagattgttctcttaatctgttgcggaatctaattgtctaggattaaagttaaattttagagataatgatcttgataaaactcagctcactatagtgaggctgttgaacttctcatttatagcaaaggatcaatacagggaaacaatagagccagtagaaggcttacacgtagaaaaactaacaaaaagaatattgcttaaaagttaaagaaaaaggtacaacaaatcataacaaattgcagtggaaagattccctcaggattgcctcattcactatttttctcatactgtccttatcattagcacaaccatcattagtgtcatcattatggcttgatttattttctttagttccacccctcaaacaaaatggtgagggaactacattgagtttgctgatcaagaattgaaaactggttggaatgagtccctttgtcaaacggtccacaatttggtcatgagaagggacatatataatcttaagttgtttctgcaggaccttatccctcacaaagtaaatatcgagttctatgtgctttgttcttgcgtaataaacatgttagccaaagcacttgcgcttaagttatcacaccagataactagcacattctgcattttgaatctcatttcaacaagtaaactttgtagccatgtcaattaagctgctagttgagctaatgttctgtactccgactttgtactgtgttgagctaccgcagtttgtttcttagaagaacatgagattaaagattcaccaaagtaaacacaataacctgcaactgactttcgattgtttggacagcaggcccaatcagcatcagagaaactaattagtgagagactatcacttggggcaatgtgaagaccatggtgtataataccttttaggtatcttaagatgcgtttaggtgctccccaatgcacatcagtaggttgctttaggaactgactgagcttattaacaataaaggaaatgtttggtctggtgtggttgaggtattacagtgccccgatgatgcttctgtatagagttggttgagacaatggtgttccatcatgtaaggacaatgtgtttctagctgtcattggtgcaacacttggcttcgtattctccatatttttcttttgaagtaattcagtaatgtatttcccttgggataagtaaacactagtcgtgtctcgaaaaatttcaatcctaagaaaatagttcaatatcctgagatcctttagaaaaaaaggtttcatttagctttgcaatgaagtgattgagttccttggagtcactaccagtgacaatgatgtcatcgtaaaccagaaccataatcacaaaccttaaatgcttgaacaaaaagaatgaggagacaacctttgaattttcaaagaaccattctatcagtgtgtgcttcagttgttcataccaggctttcggagcctatttaaggccataaaatgacttatttaacttgcaaacatggtgaggatattggggatcttcatagccagaaggttgtgacatgaaaatatcctcgtcaagaacaccattaaagaaggcattgttgatgtcaatttgcctcacttcccactcataagtcactgttagagtgagcacaactctgactgtagcaaccttgacaatagggctaaaagtttccccaaagtctactccagggtgttggtggaatcccttggcaacaaggcgtgatttgaatctctgtagggaaccatcagaattaaatttgagtttatgaacccatttacaacaaactattttacagtgaggaagaagaggtactaagatccatgtcttatttcttttcaaggcatacatttcttaatccatggtccttgaccacccctttgttggattttgtgccctaaataaaacccatttcaatataatcagatttactaattaataaaggtcagaaatcacattttatgttgcatggttcacatgctttatttcatgattatgtttactgtataaattctatta

SEQ ID NO: 381610 - DNA, 2783 bp, Cannabis indica
aaacatgtcaagagacatgacccccattacctccgtgatgataataataataaatttataataattagttagacaaaacaaacactaaatatatatttaataatcacaaaaaattataattttgtgactaatacatttagtcataaacgttttagcagattggccctaggcataagtgggttaggtttgtatttaaagtccacctggcctaagagtccaaaaaaaaaatttcttttaaactatatattttttttattgattttaaaaaataccataattttctaaataaagaccccaaaatatttttttcctatgatttactatactttaagaccggtcatattttttagttacaatataagaataatgatttacaatattagttacaacttttttacttttagtcataaattttattgtgactaaatgtaagattattttagtgaagttttaccatattattaatatgagaaataaaggagtcaaacaccacaagaagtgacatactagttattaatacattttaatatttgattttacatattttaatttaataaataatatgaaaaaccgttaaccaattgtaaagtaccacatcgatatagtgttacagcatttccaataagaatgctataaataatacttgataacatggatatatttttttacatttttttttaaagataattactgttgaagtgaaaaagaacgtaaaagaatacctaatattgacattctttatatcttttattattattattattattattattattattattattttattataaattaagaaaaaagttaatcatttaatatgtattaaataataatataatattattttaataatttttaaaggtacttatattattagaatatttaaaaataaaaaatatattatatttttaaataatattaaaaattttgaccctgttaaagaatattatcattaaagtagtaatgctttattaatatattatatatgtcactagcttatagcatgggaactttctagcttttgtttttcaaactctttaattccacaaaatatatctatagtaataaaagttagtttccattgaatatgaaacatatccctaactatctatttattattattatttataatatttaaactattcaacaacataataaaattttgagtagaaaagcaataataaaatcaatattatggtgcaaattaattttcatctaaaaataggaatataatctcgtatatgtttgacacatggaccaagttctcgagtggaaaagaatgacgtatcagtataagactttgggagagccaacctcgcataattgaaacttggaagaaagggctaccaagactagatttagtcgtatactatgcccagcataaccgaaaaaaaaaaataagatcaagagaagttagtactggtcgtgcatatatcgattttatgtgataaacaagtgtatctcttctaggactatatataaaaactgcatctttatatacgtcttgtacaaaagataggtgcgcgaaaactcatcaagaacccacaaattctatgttgtcagtatatgaatacccaattacgcgactagggtaatcgcaggcattctgctttataagttagccctgaggctatctttggtctaaagaccttatacacaaataaaaaccgaagaacctatgagctcatatgtttagaagatgaacgaccgatttgtgactttccaagtcgcataagtttagataattaatcaagaatagtcgaaactactctttcatttattttttctttcttaattgaatataactaatgtaatgactattctatttgactggttatgtaatctaaagggacacctactttctatataaaggggctatccaaactaaatagagggaccaataaaactcttgcaaaaaaagaactaattaaacaaagctctgactgaaccactataatttattgttttatttacatttataatgtttttatttgcatacttgcatattattctctgagtattcactaccctagttgaatactcgcaattctatacaagggtactcttgtttatctcgaatactcacaatttcaggttttgtatattttcctttgacaacatttagtgctagaaggaggggatttctaatagtattctgtgattttggaggaagatcatgatggctacaatctaaaataacaatatcaatgtcaatgagaccactgctctacccaatagtagtggaactttgggtgcgaatcccgctatcgacaccatttttagggatataggacaaaccaacatcatccccctaaatttgttcccagaattctctagagctgcaagagacacaacaagtcctatggcgacttcatgttttaatttaccaccaattacaccaattcatatcgctgagggtatgcaattaactaccacacagtatataacaatacaagagcatatgtgagcattgcaagtcaaattcacaagaatgccacatacacaaaacgttccccatccccgttaacctttcgatgcataaaatgctaataatgaggtacataatcctaatattaaacgttgtggtgaaagtgttcacaggtatcattcaagaaagtagtcaattgagcacaagccagatgctcatgatctgaatcaatcagccaaggaccttgcatgaggaaagggacacgtctgttggaatatattttaccaggatctagatttactaccttgtatgttatttaacatcctaagtatgaatttctaaaacaatgtaa

SEQ ID NO: 381611 - DNA, 1054 bp, Cannabis indica
cacactcatcaacgaattgttatatttagagataatttaatattcctatttagaaaaaaataacaataatgaattaatattcaacaatctatattatgatattgatatattgatgggtgtgatatgatcattaataaaggtagagttatacgttatacttttatttatataattggttgaaagtgtctctagttaattagaattaaatattgagtttttagaggttaaatgtagtttatatattaagagcagattcaagcaagtaaaaccctagctacttggcatgtacgttattgggcttgtaaaatacgtctccttttaattacatatatatatttatttatttgtttgatggattaataaaaaaattaagcttaacatttaataaatatatatgtactgagtctttatactaatgaccaacatctgcctaaatcatcaacaaagcttaataaaaaaaatctcacttttagttaaaaaaaattagttgtgattaaaagtaaaaaatttgtaactaattataaataatatttatgtattatatatgtttttaatttagtaattatttgataattaaaataagataactattatatatatatgtataaagtcatgccttaaaatgcttaattaatagcaatgctataatgttttaggtcaaactggttggctagttctgtatatagcaatatagcatatattcatgtggctgtttccaacattaattctcaacagttttaataaggttatatggaaaatgtgatattttttataaaataatatatgaaaaatgatattactcttttctaaatttgaaccttcttttgaatcaatattattttcaaaacaaaaaaaaaaaggacccaagcataaatctggcctagtctgcatgcacaagaaagaaaccatgcatgtaatgacaaactgagtttttttaattattttataaatgactaattttgtgctctctaggtttcttataaagaattttgttgtctttcagtccctgaaataggcatgtttttttgtataattttttttatcacgtagtgta

SEQ ID NO: 381612 - DNA, 1012 bp, Cannabis indica
ttcttgaatgtgtttggctatgtattgtaggaatggaatttgtataggttttgaatttattttaaattggttttgatatttgtgatggaattagtataattggaagttgaatttgtaaatttgggcaagaattacaaacttttggtataggtttggatgatgaaaaattagtcccaccaagtgtacgatgaaattcccacgtgagaaaacaagtggtttttgtcacttgggttatttggatatgtgcaatttctttaaatttcctagtttgaatgcttgtgttgttgaattgttttgttttgattgaatacatggtatgtcaccatgtaagaactctcatggccaagaagctcaaatggcaacactccattgttaaagcactttgtcattactctaaacacatgatttttatggtagaccattgccatctcatcactagtgtcaatggtcatctccatgggcacgccgttgtgccacgtgagtgaaggttgaatgttgttgaatataaattcgtgtgagcgactccgcctatttttcataactttaggattacatatgggccccaccaaatgaaataaagacatttttatatttttattcttttctttttctcttgtgccttttcttagtttaatgggctatgtcacattttccaagaaaaataggtaatccatttcttgccaaaattactctctcgggtcctaacttctttttttattttttttaatttttcaagaacaaaaagggaagttatgggacacgaaataatttcatccaatagctatcctacgaatatagaagaattctccactatcaatccttctcctagtactagtaaaccatcctaaaaggcatgaccaagatcaaacctatgagggtatactttgaagcaagccacatcatttcctcaacatcgaaatacgaaatacattttgaatagtcgataacactggtggtaaggctagccgatacactacctgctcgaccttctcgagtatctcaaatggcccaa

SEQ ID NO: 381613 - DNA, 2604 bp, Cannabis indica
gggatgtgtgaagtagagtcaacaatccaattagtatttggatggtatgacgggtggaagtcttggcggaacatctcctctttttgccattcctcccatctttccgccaatccatccccttcgagcattctcactacctcagacatcttcggacgttcacccgctgtgccttgggtgcagagaagagccacttggattagctgctccacctcctcatccacataatttccttgtagatcggcatccaccaatgtttccaacttccgatctttcaagagtcccttaacctgtaatgccaaagatgatttcggaaaatcaaataaagatcacttgaaaaagcttctttaagcatgaaagaagttaataatgaactctgtacaaaactccatgtggtagacaggagtcacattaagttcactacagaactaaatgtagatggcagtaataaagtacatacaacaaaaaaaaaaaaaaaagttagttttaataaccacaagatatggattcaagtggtcattatgttaaaattgaactgatgttaactggtcttagacatgttccatatgatatagacattggttgaccaatcagattgattctgtggaattttcaacacaattcacgtgaaccatttatgaaaacaagacagactcttatagtatcaaaacctattacggttttggtttatatgttagacacaagtgttttgtaaagttgaagcatatagaaattatagaactcaatgtcgctattccgtcaaagggaaaagacggaaaagaaacatcaagcgcatacaacagtaaagaaaacacaatgccaagataaagcttcccttgagatcagaagggtgagataccacaaacaccaaattcaccttcccataacagccaataaatttagtcctaaagttggatttttctatcaatacatccgcagttaaggaaatacaaatttttatagcattggctaatatatatgtgtgtgtgcgtgtgtgcgtgcatgcactgcgtgtgtgtatttatagatattacttttagaaataaaagaaaaattacaataaaggtactttatgcaggcctgcaaggtgttgtactatgccactataaaactaaggtttttttcaggaaaaaccaaaaaatctagtaatctaaaatggcatacctaagattcaaaaattgagatataaatattctgtggattttaatgacatgaatgaaactttggcaagcaagataaagttttaaccttcaagctatttcctgtaataaaccttttataaacattgaatgaaactaacaatcatacttataaataaagccatattctaaccatgaagaaaacaacataacataaatagtgttaaagctttgaagaagatgacaagttcatacccaatcgagtaacatgacatcatcatcatttgcaagacgagctagatcaaaagccctttgtccagttatgagttcaagaagcataacaccatatccaaaaacatctgttttctctgaagactttccagttgagagatactccggtgctatatgtccaatggtgccgcgcacagcagtagtaacatgagtatctttataatccatgagtttagccagcccaaaatctccaacaactgcctcaaattcctcatctaacaatatgtttgcagctttgacatcacggtgaataatcctaggctcacaatgatcgtgcaaataggcaaggccccttgcagatcccaatgagatgcgttttcgtatatcccagtcaagtggggactgtgattcagggcggtctgcagtcatccacaatatattccatcagagaaagtagtttcgttaaaaatgatacaccatagttcagtatactgtacatgtaagttgtacctgctgctagcataccgataaagcaattttaatatcgtctttgaattgccttggtatgtactaagatacatagtatgggatacataactttaaataagtaggatcttaatataattctatcgattagggttattttagtgaaaagacccaagtactaactcaaaccagtagtaaatacccacaaaaaacagtagcagtaattgtagagcaataaaacagtagcaaaacactagccaaacactagaaaattgtattattgaaaataagaaagaaccaattacaatctcaagagagcccgtaggcccctagagagattactctaattctcgcataacccaaacaatagcttctcaaggcactatatggcctaaacagtacccaaaccaccccttaacaaactaccaccagctcagccctcaaatgaccaagggcccgtttggcacagcttttggaaaagctaaaagctgcttttcaaaaaagctgtgacaaaaaggtgtttggtaagcagttaaaaaacagcttattgaagaaattatggaaaagctacagctaaaagctaaagctggtacaacccaacttttagaaaaagctgttttgattaaaagactttataataaattatttttactaaaaatttatttaattatttattatatattataaaaaataaaaatattttttaaatgaaaaaatatttaaaaataaataatatttaaatttctaattt

SEQ ID NO: 381614 - DNA, 3752 bp, Cannabis indica
ttgtcaaattcattgcgagcacactaagtagcgttaggttaaagtaaatgaaaatataaaaataaattataagaatgagaatgagaatagaaatgagaatagagaatagaaatgagaataggaaaagaatacaaaattaaaacaaatataaaaaattattaatttttttaatttgatatttaaatgctctttcttccatttaaatagaataatcactcttttaaaatattggaaaattcattctataagaatgacatattctataagaattgacattttaatatttatattttattttattatttccaactaaacgttacctaaattcaaaatctaaatttttgttgcatatggacattcaaaacgaaaagggtattgaattttatttttattactgtaaaatattattaccctgcttctcttcaagaggtgaactaaattacaaatttgacacatatttagtgaatatattttaactaattacattaatttaagatgaattctattagttaaaagtgatttttcaggtaaatatatataaagtttgtgtttgatttatatgtacaattatacttctaaaactgaaaaaactacttaagggcatttttgacattttacaaaacactttaaaagtgaatcagagtgtattctactcactatttccattctaggatctttgttagcccttcttcattgtcattttttccctccattaatcccatttaaatgttttctttcactcattttcctaaatcccatttcaatgtcttctttgactaatttagtttacagacaattctcaaagaaatatttatctttatcagcaacaaaaaagttgcatgctttgattctcaagacacaactttcatgtgaccccttttatgccacccaaatggttagattgtatgccatttatggggacctttattctgctcgttacgtgtttgataaaagtcccaaccgaagtgtttacctatggaattccataattcgagctcatgctcaagctcacagatttgttcatactttttctctgttgaggagtatgttgatgagtgatattgaacctgatggctttacatttgcttgtgtggtaagagcatgttctgagagatttgatatgtatggactgaaacttgttcatggagttgctctagtttctggcttaggatttgactcaatctgtagtagtgcacttgtgacagcttattcaaagctaaactctgttgaagaagctggtaaggtgttttatggaatactagaaccagatttggtcctgtggaataccatgatttctgcttatgggaattgtggattatggtacagaggactagaactcttcattaagatgcaaaatatggggattcagccagatgggtatacatttgttggtctgcttttgagcttggttgattcaagtattggaaaagggatacatgggttttgtttgaaacatagttttgactctaatgttcatgtaggtagtgcacttgtgagcatgtattccagatgcaaatccatggattctgcatataaagtttttagtgaaatttcacaacctgatttagttacatggtctggtttgattagtggatattctcaatctggacaacatgagaatgcaattgttttctttaagaaatttactttgtcaggtaagaagccagattctatattgatagctagtgttttagcagcttctgctgaaatggtagatgtgaatcatggtagtgaaattcatgcttatgctcttaaacatggatttgatactaatgtcatggtttgctcagctctcataaacatgtactcaaagtgtggtttcttgggtttgggaattcaggtttttgagattatgccagaaaggaatattgtttcatacaatgcattgattttaggctatggtttgcatggacttgcttcccatgcctttagaaaattccaagagattttggataatggattaaccccagatgaatgcacattctctgctctgctttgctcttgttgccatgctggccttgttgaagatggaaaatacattttcagagtaatgaaagacaagttttggattcaacccaagacagaacattatgtttacatggtgagacttcttgggatgaatggagagttggaagaggcttattatatgatactgtctttgccagaaccagtagagcatgggatttggggagcactcttatcatgctgtgatgcttgtggaaattcaagactagctgaaattataggacaaaggttgattgagaataattctgaaactggttcttacaaagttatgctttctaatatttatgctggtaatgagaggtgggatgatgcaagggaactgagagactataaaggagaaaaccagatgtcaaagatgcctgggcttagctggtctgcaggctattgattattagagaagtttgatctgttttcagaaactcatatacatatgtacaatacaggtattcatttttttttaaagttgtgttctatattaagtacaatcaaaatgatgagactttgcagaagaaaaatgatcaaaattatgagaaccctcttgttaaatctagtaaataatctatattatttagggttattggatgatcttattaaaaacatattatatttattcatacacagtttagattttatagtaagtaataaaatcaagtgttagaatgaaaacccaattgaaaaactgatctaaccataatttgattaaatcatatcatgattctaaaccttaatttgattggaccagatcatcatgatttttcaaattcaattaagaaactagtgagctatcattatcaagagacataaatatagtaaacattataatttgtattattattattactaattggcatctttcttcattcttatacaaccagacaccataggacagaaacaaaggaaaaaccatagctgaaaaactctattatttaggctcatcaagaacaggtgggttgccactccttctggtgttgtgctcttctccaccttctttagtatttgttttagtatctgaagaagattgattagtgtcttgaccatgtttgggattaacagatgagaagagatgaagtggttgagagtcagcaatcttgcctccttcaagtggagttccatgcttgtaagccactcttacagcttcatcctcatttagtcttgcctgtgaagttgcatacttaatgtcatctttgctctttgccatttctttttgattagtatatcaacttatcaagttatatgtttttctttcagtataggttcttttttatctcattcatttaaagctatactcaaagtagtacgtggcagagtctttaagggatgatgacacctgtctgtttgtatgccacgtggcttgactattcctatgtatatatataatatattgtactgcaccgcactaaaatagatacagtgatacaatttctaactgtttcagcatttataaaaattttttaatctaaaatttttcatacttgtatatattataattatttaagatattttgtaaaattttgaaaaattcggaataatttataatatagaaattaatgttcaaactgtctatttcacacgcatataaaatataaaagtcacgcgtgcaataaactctttaaactttatttttaacgtgttaaaatttttcgaatttctcaaatttttatcagatgtcttaaataactaaaatatatacgactataaaaaaaatttagactaaatatttttttaga

SEQ ID NO: 381615 - DNA, 3938 bp, Cannabis indica
atatcttgtctaattatcccaaacttttaagaggaaattaaaatctttcgtgtcatttttacctctttcaattaaaactcattaatttatatacccttttttctaattattataccaattatgcttcttctgtttcatacaattaacgtgatgcctacccaacgtgaatacccactagctattaattaaggtacactacaaaaaactgttacttttaatgataatttttttaatgacaatataatttttttgtgattaaatgtgacttttaatcacaataaaaacttacttgtgactaaaatatagtatttaaatacaagttgtcactaatttagttttagttacaatacttaaaatacatttagtcacattaaattgtaattttgtgactaatatacatttagccacagtcacaacataataatgataatttataattagtcacatctttttaaagtaaaaaattttgtagtgataacatatgtaaggataaattggatagtaaacttataaaagtaggtaaatttgaatggattttaatatgtaggtatttttggttaattaataaaaaaaaagaaaaaaaaaagaaaaagaggtattcctcaaacaacaacaaaaaataacgagaaattaacaaaattacaatataaaaatacattaaaataggaccttgttaattggatagaaatagaaatagagggcataaaaatgggctatattcactaaaatatgggaaaaagaaagggagctagtttacatgtttgtgggcatataaaacttaatggagaaaattaaatatgggaacctcaacaaaaaaccataaataaatttagaagtgttcatcaaattgctcacaccgcacaaactatctgtccagcaccacattgcataaaaaatgcaatttgaaatcttttgcaatgtcgttgcagtatgtatttttttcaaactgcgcggtgcagtgcggtctgcggtttttaacaagattttttagttttgtattgttgaagctttattagttttatctgtgatatagttttgagtgtctttcgtttatgatatttctattagtcttatctctgtgaaataattttactttgtttcaatctcagcgacacgcatattgccacttaggtagttacttttcaacactttcctaacattttctagaagagaatagggtttggttatttcttaattaattggaaaataagtcgagacaaaaaaaatttggtgacattagatttgcatccttagcatataaactagtaataaataagtggtatttcgcttacgataatttataaaaatttaaaataatatatgtttatcgaataataaaattatatcaaataattttaaatatatttttataagaaaatatttactaaaaaatgataaatcaaactataaaaaaaaaattggaaaaaaatcaacatacaattttttacataaaaaagaaataagcatgcaaaaaaatatcttttaaacaactatcatcatcgtatttcacttacagtatctttaagtactcatatttatacataagtgaatcattttgctataaattaattaagtgaattatttgttattatatatgattatttatttattttttaacttttaattaattaataatctctaatttttttgacaaaattaatgatattaatcaaataaattagaataaaaataatgaattagtgatctctaattaaataaagtataatagaagaattagaaaaataagagtaattaaagaaaaatagataaaaatatttgatgcaattttaactagcatgtgaacaccttatgactcagctttatatatatactttatttttttacatgtgaagtttcctttacaaataattaacgtgaccatcttataactcagctttatatacacatatagacatatttcaattttttagtgtgaattttcctttgcaaatagttagtttaaacttaactaataatatttttatatcgactgctatggttttttgtttctaaattattagccgccaaaggttgtcttttttctctagttaggcccgttggccctctttgggcttagacgttggtcgaggtttgtggttttgctaatgcaattaggttttactactgcaattagtcttgtttgtgacatgattttgagtgtctttaatttaagttattgtgattagtcttatctttgtgatttgttttgaaattgagaataaaaagttctttgcagctgaagcggttgttagtggtgcagttatgtagcttacacaaaaattgagtactcaagttaatatgttgaacgaacatgctgcaacaatttagacagttgtgtcttctgagcagtagagaaattataggtattcttaaggttaactgtgatgctaaaatctttttcatctgattttattttagtttctttgtcaaacgatctgataattaggcggccaattaattgattcatttttctgattctaaatctggttgcgtattcaatgggagagatgtacccattagttacagactattatttcaaatgtttacttttaaaaattgcatgatttattaaaaaaaaacctaacgaactactattgactttttatttttcatttaattattcaacctaactaataattacatgatgctcaaatttaccttttcttgtttcactaatttattacaataatgactccattttttattataattacttaggttatttatcacataatcgccaatatgtgtactaagttcaaatttatatatgtacatatatgcatataaatagatgtagatttaaggaaaaacacaaactttgattaaaggtcacaacacatcataataagaaactagtgagtgaataagtgatcatcatgatcttctcatacttgctaacacccttattaaccctaaccctaattatttccattgtcgttttgtctttcaaaaccgaaaaacgacaatacaaaaacctcccaccaaccccaccctctcttcccataattggccacttacatctagtgaaaccaccaatccacagggcactccacaatctttctaccaaatacggcgaaattttcttactccggttagggtttcgccgtgtggttgtagtctcatcctctaccatagcccaagaatgtcttacaaaaaacgacattgtttttgccaaccgcccacatttcctacttgcaaagcacgtagggtacaactcctcgaacgttgtggattgttcctacggcgagcattggcgcaatcttcgcaggattggggctattgagatcttctcctcaggaagactcaacctctttattaatagccgaagagacgaggtcataagactacttaaaaagctctcttgccaagattctaacagagttgagctaaagtcaatgtttcaagagttgacttttaacatcataacaagaatggtggcgggaaaacggtattgcggtgatgacgtggcaaacgaagaggaagcaaagttgtttagggatactttgagaacttttatggagtttaatggagctgggaacgcagctgattttttgccaatcttgaattggattccaattaataattttgagaataaggtgaagagacttgggaagactatggactcactcttggaaggtttgatcaaagagcataagagtaacaaagatgagaatcggatgaatactgtgattgaacatttactctctttgcaagactctcaacctgaatattatactaatgaaattatcaaaggcttcgtaatggtatgttattacttttatttgtgttttttttaatgataatttagattatgcgttctgcaaaatgaaccaaattagggttcaattttggtctaacaattttttaatatgtcaatttgatcgaagtcgtttttggtttaatactacaaaaaactactacttttagtgataactttt

SEQ ID NO: 381616 - DNA, 1779 bp, Cannabis indica
ttcatataatttaaatataataataaaatttgtagtattgtagttagctataggtcacaatatataagttaacaaaatttccttacattaattgagaaaagtcaactttgttgaataatatcctaagtcaattttttcttattaataaatataaattatatattactaaattattgttaaaaaattattcaggtttttagacaaagcagcaactttaactgaggaagatctaagaggccccaagaatccatggagaattagcacagtaacacaagtagaggaagcaaaatgtgttttgaaaatgttacccatatggctttgcaccataatatactcagttgtgtttacacaaatggcttccctctttgtagaacaaggtgatgtaatgagaacacaagttggaaactttcacatcccggctgctagtatgtcagcttttgacatcttcagtgtcctcatatgcactggaatctatcgtcgagtccttatccccatagctggaaggctaagtggaaaccctaaaggcttaactgagcttcaaagaatgggagtagggttagtgatagggatgtttgcgatgttagtggcaggtataacagaaatagagaggcttagacatgtcacacccagtgagaagaagagctctaaaagcatattatggcaaataccacaatatgttttggttggtgcttccgaagtttttatgtatgttgggcaacttgaattttttaatgaacaatccccagatgggattaagagcttcggtagctcactttgtatggcctctatctctcttgggaattatgtgagtagtttgcttgttaacatggttatgggaatcacaactaaaggtgaaaagaatggttggatacctaacaacttgaatgatggtcacatggataggttttatttcttgattgctatcttgactgcctttgatcttgtcatttatgtgttttgtgctaagtggtataaaggtatcaatttggataatggtaatagtgataatcatcatcttgttgaagaatcagaagatcaaaatcgagttttcgaaagagtttaaagtatgtactattacgataaatcagatatttttaagatgttgaagggattattacgtcaataaaatttaaagtattttactgtagaatgagtattattatttcgatccgtatttattttccttaagagtctggaataattttgggacaatgaactagtaaccatgacctctataggtgtgattggtttatttatgttattaaggtatgaaatatttgagaaatgtaagaatttttatatatgggaaaatgatgaggaaattttgttatgtgctcaatatgggacaaactacatttggttttataattttataacataataaacaaaaatcgaaaacaaatttaaacaaaagattagtgtttgttggctttctacacatttaaactttgagaaaattacactatatactttttttttatcttaatgcttttaatttaaatttcttttttaaaatttattatgtttaactttttaatcattctactaattttacccctattacttcacgatagtttttatttttctctaattaaaattgtgtcccaattttctcacaaacctacacatctatctacagagaatacaaatctattatatttgaaatgctatcttagttatgtgagtgtgtgagaataaccatgtatgaactttggattatttttagaaattaacacaaaaataataaataaaaagaattactaaaaagtactaaattat

SEQ ID NO: 381617 - DNA, 2712 bp, Cannabis indica
gctggtaaagaatatggtgtaactagctagaccaatctatagaggggaggggaccattctactcatttttttattcaattatatatttttaattgtctgccaattgagagggttgatataataaagagtaataaattaattaatacaatttaacataattaagtgaagtttgtaaatttgttttaaatttccaattcaatagtactacaattaatcttttttggtgtgtgtctctgttgtgtgactaaatgtcgttttatagtcataattaaaaatttattgtgattaaaaagatagcacaacatttaggtgtgggtgaagtttttatatttatttttcaatttattatatattacactaataatacatttaaacttttgaagtgaaaaatataatagtctatttctttttggttctcactatcagcaaatggggtccggcatgctatcaagataagtgaagataataataataataataaggttaatttattttaatattataataataaaaccctttcatcttattgacaaaagaatatatactttgttacgtaaaaattaggaaactatatataataatatacgtagaatatatttttatatagatagtttgctctgtcctccatgtgcacttcaaatgtacttgtcgttcataatcaacgatctttattgtaaaatatttatgtataatatatttcggctccaatttgaagtacattatatatattagaattaatctattataataataaatatgaccaaaaacagtgatcagcagcgcagtgtattgaattaatatatacctatactattttttattcgagagaactcgtcgtttctttaaccaaaagaagaatctaaggtcgagtactagttaattatggatttagtaattaaagataacacaaagctcatcatgatgtaaaataaaaaaatcaaaaccaaattatacctaagtacgtacgtaatatatgtttaattaacaatagtcttgatctccattatatataattattacacgaaatatttacaaagttcggtatagtttgataaatttttactgctataagtactaaattatacattaaattgttttgtattttaaggtgccgaacacaatatatactaattaatatgatattttatatttgattaactgttactcattttattttttaacaatttgaaggtgatcttatggtgtgtacccttaaaagtgtctgttcatattttctagcatatataaatatgttacttaaatttatagatgatattatgattatgatctcacaaagtttaattactccacaagttcacatattactctttcacatttcacccacgtacggtgcatgtaggtataaaagaaagaaaaagaatttatttaattattagcttttgacttacgttgagttatgaatatttatagccctaactctagctgtaacattttctttccttttgagtcataatatctatataatcgtgtaataaaaactgacactaaaaaaagttgacagtaacattaatgacttttaatttaactaataaaaatcatcagtaattattgtaagtacaactagctagttgattatattaatcggccaaataataattcatcaaaaagatgagattatagaaaagctgatcaaaacaaatttaattcaattaagaaattgtaataatatttactcaaaaaaaaaaaatcacttcaaatttaaacagaattcatatataatgttaaacaatattcctataatattttggtacattatttgttagaaaaatcgccgtgttttttaacaagatttgaaactttttaattaccgaaaaacgggtcagcatcaccgtcagctcttaatccacctcgaaaagtgtgccgtttggtacagttagatagagtgaaattatatacaccccacaggcaaatatagcagtgtatatgtataatgtatatacatttatttattggaaaaatacacctcaggaaaaaaaaaaacaaaacttagaaacttatattggaaaaataaatattactgaagtacgtaggccccaatttctccaattccaagtcccaaaaccccacttcactcactatatctcagaccacactagtacttactaatataacacatgaacattcgttaagccttataattatacagctctccttacaaagatatatatatttttctattgtgtatagtgcatcaaaaattactatttttttacaatatttattaattattttgaattcttttatattctgacaaatgtcatgtgacggtgggttccatttatagggtttaattataaaactattaagccaaaggaaatttgatttttagtcgaagagatatattaaaaactgttcatgcaccattaacaagtagggccgaattcaattgttgaccgttgatttgtcagattttgaccttttgtgttatgatcggacggtagataaatgaaagtcccccacatgatgggcggtctctatcagatatcataaatgtattcataaatgagttcgtgagtctcttctgtatgtattcccttttgatcaattaaacaaatattagtctcaaactttaagctttactattatatgagatatacacatatatatataaatataaagctcccttcccccacttacaaagtaagagcctgttggatttcatgcttggttttctcatcatcatatatatac

SEQ ID NO: 381618 - DNA, 1360 bp, Cannabis indica
tacaactaatattctaacaacaaccaaccttgttttgtatctgatctgaccagttccattgtcactttctttctctctaaatatcaacttacagcctataactttttgttctttatggtctttttaccatagtccaagtttttcttgattaatgagcccatttcttcattgattgccatcaaccatttcttccttgttttgctttcaatggcttttgtatagctggtgggatttgtactctcaatttcttctacaacaacaaaagcaaaggttgtgcaatctgatgcagagtagtctacatagccaagtctgtatggtgcttttgtttgccttctttctctatctctagcaagttgatacctccttagattctcttgagaggcatgtgtttcatcatcagattcaatatgtgtatcttctctctcgtctttggcaaatgtgcttcttgtgtatcgattacttgtctggttccaccaggatccacctgaacttgtaccctgctaccctcttgactcatgattggttttgaataggtttcattgccatttcatcctccttgaataccacatccctactgagaatacatttcttgtaaccatcttctaaacaccacaatttgttacctttcacaccattaggataaccaaggaacatgcatttcaaggcccttggttctaatttgtcttttctgatgtgagcataggcaagggacccaaatacttttaggtgatcatagtttggcttggttcctatccaaaattcttgtggtgttttgaagtttaatgcaacagagggacatctgttaattaaatagcatgttgtttttacaactttaccccaaaagtgtttttgtaaccttgcacccttcagcatgcatctaacctatgcaaggatggtcctattcattatctcagctaatccattctattggggtgtcttgattactgatttatgtctttttattccagtgttggcacaatactctttaaattcatttgagtagtattctaacccattgtctattctttacaccttcaatttccttcttgtttgatttttcatgagcttcttccagttgttgaaggtttccaaagcctagttcttgtttctcaacatgaaaacccatacatcatcaataatactcatgaagtatttggcacccccaagagtttgtgtccttgaaggaccccatagatttgagtgaacataattgagtggttccttggtgacatgtataccagtagggaattttaccctacaacttttgcctagtgcacattcttcacaaaactccaacttaccattcaatttgttcgttaacaagccctatttttgttgcgataattttgcacacgcaagt

SEQ ID NO: 381619 - DNA, 3902 bp, Cannabis indica
gtaatttgttgtgagaaaaagaagtatataaatttcttattttaaaaactactatacttttaaattttgaaaaaagcaaattataagtatgtcattaatgcttttaaaattttattttggaattttcatttattcaaataacacttattatatgatgatgatttttttaattgtatttttagaatatattttaaattcaaaatataaatgatatttcatattatattttactaagaacattttatgcttaatgtaagctcttaaaaaaaaaaaaaaaaaaaaaaaaaaaaaaaccaacataataacactatgaaaaatatgtctaatgtttttcctagtaccacaaatacacttgttatttttttcacctatctcactatctcactcctttcctctttttgttgtacacgaacaaccctaaatcaccacaacccaaatctcatttgccccagccgacaccgaaaacctcaaatcaccactgccacagtcgacaccaacatgtccaaaatcaccttaaccgatgttgacaccaagaatactgacttcgaatgaaggcaaccataaatttgagagaactcgaccctcgaccccctacaactccgccaatgtgctctgacacccccatgactcccccaaccccgttgagacccatggccaatggcaaccctagcatcgatgaaccccatgttgacatggggatgactctgaacttgcaaggctgagagagggtgtagggcaagtgcaagatcacatgaatttcctttatcttaaccaagaagaagcaagtgttgctatggacaatgctttcgccagtagagacgcaaatttcaagaatagatggatcgacaagccgtgatcctctaagcccatcaggcggttcaatgagagagttgaatctcaggttgaagtgccacccctcataagagatcccctttgggaaaaaggtcattatgtcccaaagggaactcagcgccctatggatcatagacaaacctcacggccagggagacctaccgtatcccaaataaggtcaccatcctatcagcctaatgatgatcagatcttgtctgaaagagcatatggtaggactgaccaattctagggcttgcccaaaaacgaagaaagaaaggaagatgtgccaccaaggcaagaccgaagcaagtctcgcagtggggagtcctacctcaatccaaatgaagatagtgccactagtcacctaagtggtgagcacactaattggagaacttaaaatactgggtgcaataatggcgttccacctcagaatgctcaaacatggtctgacctgagacccatggattatgtatttgacaaaataggccttagagtagactttcagactggcttgaactgaagaagaagtgttcaggatgggtacttacccgccccataacatacaaccaatgggataggacaggccaaatcatgccaaccctaaaagggtaccacctgtcaacacaagggaggagctcgctggacaaaggtccgccagggttgatcttgtagtgcaagcacaaactggatcaactcaagagcatgatacaaggcctatctggcccaaagctgtctgacctagagctcaatagaactagaggattgcctttctctgcacacatcaatgtgttgcccataccaaccaagttcaagatgcaaactttgaagatgtatacaagaaaagaagatcccttggctcacatcaaatattttgaaatccaaatagatttgtaaaatgtggagattgatacctgttgtaggattttctcagcaaccttgtttaaaaccgcacaatagtggttcttcaaactagctgctgggaggtttgatttgtggaactctttcatagcagagttctatacccaattcttgttttccagacaaacaccgtataggttggaagacctagttgaagtcaaacagagacctgaggaacctataaaagactacctccaaagattcatgactaaagttaccaaagtcaagaatttaatgaagaacggaaggtacacaaccatcatgagtgacataatgcctttgagtgagttatggaaagatatctatcgacactcaactcaaaacatggccgacttccttgattggctagaaggcttattaagcttgaaaaagctattcgacaagcccaaactgggagacaggcaggtgctgaacaagctcacagtggcagacaaccctcatttctactcagcacacctgccagcatggacaatatcagacagtcctccaaaagttaaaataatggaggcaagcataacaacaataactatggttgaggaaatggcaaaaagggaaaatttaacaatctccgtacaccacaagactcaaaggaaggaggaaaggtttacatgctttactctcctaatagaaactcctaaaacagtttacacaactacagtctatagttctatacaaaaagcctcctcccttgaagaaagacataagtaagagggacacctctaaattctgccaattttacaattattttggccatgataccaacgagtgcaagcacttaaagttaaaaattgagttcctaattaggaggaacaatccccacctgcatcgttacttgcaagatgactagacacaggcacaaggtgcccaaaacaatgatccaatgccactgtctgtggtcggtcatttaggggtcatcattggtggatcccatattgtaggggaaacaagtaaagctatagagcgctacactcagtctctctgtcacgagcaaaactgcaacaacctagctgtggaggaaagattttccaaacagctaatgcttgaagagcttaccatctccttcacagagggagatgttgccaaagtcaaattccctcgtaatgaccattggtcataactgcttagataaggaacacgacagttgtcaagtgcatgatcgataatggagcttcctcaaacatactatttaagtcaacttatgagaatataaggctctaattgacagatagcaccttacacgtgtaaattccgtagtaaaaaaaactatcatgtataaaaaacttaatgataaatgcattgaatttttaaatcccattagtataacaagctcattgtcattcaaggttatttaactaattaccaatttaaaatattgtcttaatatggtttcacataataatgataattatcttacattacaatcatattcttgcaagaaaaaaacacaaataattaatggtggactgagttggagaaagataagtcaactatggagtttggacgaatggtgtgattcatttcatacatttggactgacttttatgtccatcaatttttctaacccattattcacccaattccaaactccatagtgtgttaaaatgtaccattgatatctactactatttataatgttatgttaagtattaaatctctcataatttaatttaaaagctattatgagatgtcattatttatttacaatatactatatatctaagtagtgttagtaatcttcgaaaaagaatcacaccctttattgtgttgctttctaactatggaaccttattacactgcaatgagaattaagataacttagaatagaaaattcatgaagtatgaattgcatgttttgtttaatatggtaaataaaagtaacaacataagtaatacccggaaaaattgagctaaaatcttaaaaagatgaggtgaaaaacaatttttttttatagagaaagaagacaattgggttggaaacattaatattaatagagcaatttgcggcgaaacccccttatgttttgatttttatacacttaacccccttatctttatttttggtggcaaaaccctcttatgttttaatttttatacacttaacccccttatctttttttttttttgtggcaaaa

SEQ ID NO: 381620 - DNA, 2352 bp, Cannabis indica
aaaaaaaacacctaccttggttgtttttattgagtgatcagtcgagattgcgctctctcagcagatacacacggaccacgaaaattaaggtgctagataaaggttttttttttctttctttcttgagtttgctgaacaattttcataataattaatacattcaacaaccatatggtccaggtattgttcaaaaagaaaataataataaccatatagggaacccaacacagtagagaatttaatgataacaaagataatttcataaatttttattttagaagcgacttattgaaacaagtttttctaggacaaatatttttagcaaatttgttctttgtgaacgaaaaaaaaagggttattattattttagactatgtattttgtaaaagttattgatttgaccctctattattgattagaccttctattttgttaaatgataaaacagactatatattttctaaaattgtataaataggaccctgagcttaatttttgacaatttattttaggataatttcacaaatacacaaaaacaataaaaaataacaaaaatatggttttacagaattttaaacaattctacgaattttttgattttatttacagaaaatacggtctttttatgttgtattcatgttaatttgttgttgattttttgttatttgtatgttattttttgttgttattttgatgttatttagatgttattttcatgttacttttatgtagttttattgttttcgtgttgtttttacgggataaccgtaaaaatgtaaaaaaaaaataaaaaatcattaaacgtaaaaatgtaattttttttttacaaaaaatggtgtcttatgtaattattccattttttaatataaccaacttgaagacaattattaacacaaacagttgcagtaaatgtaacaagttctttataacatctctaaatcgagttattattaagttttattttgacagaaaattagtttaggatactatttagtactattttgaaaaatagaggtctaatttatcatttaccaaagtaaaggattaattctgtaacttttacaaaatacagaatccaaaatgatattcaccaaaaagaaaaaaagagagaaagagaaattcaagttttaagcatcatgatatgtttattattataaaactttattaatagttataggaatgttatgtaagctcttattttaacattagatcaaaatacaatcatattctcatttaataattatagaaaagctatgagtaatcgatttaaaccttcaaaatcaaattttattaggaccaataattatgtgtggaaaaatatactttgaggcaaagaactctttgatcttgtggctatttgtcaggttggtaatggtaaaacaattttgatattcaaagataagtgggttccatgatcacagaccttcttcgctctccgttggggttgcttagtgaagcagctactgtttcagagctttgtcatgctacacgcggctagaatctaaccctcatccatgagctcttttctgtggagatggctacaactattttctctattccttggccgttgcaagatgttctagacaaacttgtttggagttttgaaaagcatgggttctacacagttaaaaatggttattggctagctcttcgtaatgtaaaagacaacttagcatcaacctcaaatggtatatccttttggtggcaaaccttatggaatttaaaattacctctcaagcttaaaagttttgcttggaggttgtcgtttaactggattcctactaagattaatctccaaagacatggtcttctcaatgaaaatttgtgtcctatttgtactagtgatttagaaactactcatcatgctctttggagttgtagcaagcttgcctccattcgaaagctttgttcttttaagcttggtaatccaaatatgattgtaagggacattttcgagttcgttagcaattatattttgcagctctctcaaagtgatatagagttgatcctagtaacttggtggcttatttagtatcgtcagaacaaacaagttcacgagcagtctattattccaccagaaatcattggaccttgggatgtcgactatttgttttctttccagaaagcaacccggagggagtctgacaaccttcagacgctgttgacttcacttttagccaacgacaatgagtcttttaataagcgataaacgatatgtcgtaataagaatacgtaataaagcaaataataataataagaagacacagaaattttatagaggttcagctccaagcagttcggtaatagcctaatcctcgttagttgtattgacttaagaataaggaagaagat

SEQ ID NO: 381621 - DNA, 3727 bp, Cannabis indica
ttatgaattactaggactcttgttttgactccaaattgttaagctagcagagaagttattaataaaataacaaaatttataaataaataaataaatttattttattgtttttttaatatactataaatcacaattaaataagtttcattaagaaattaatatcaataattgtcaacgtccaaagatcatagtggtcggtgattagtgattaaattgaaaattatttaataaactcattaattaattaactcagggatttcaaaatattaattaataataataataataataataataataataataatatttttgtatcaaccgaataaaagagaaaaatagaagaaaaataaattaaaataaataaatagtgtcaggaatgtgaagctgaaacatatatgagtagtcttgctgtattgaagtgtgtaataatattaataataagataataaaaccaaaatattatatgtaactaattaagaagtttgaaactgagttttgttatattctatatttgacatttttgtgcttgttgtttatgtcacagcacacaattttggatcaaatttttgtcactctcaacaacttgaaaatataatatatattatattaattctatctagtatatatatatatataatacatttccaaatattgaaacctactttgtcacctacttcccataaacataataaataaattgaccataatttagaaagggataacacttttatgatataatatagttatatataggggataataatgtttaattattagggggaaaaatatgagtgtaattttcacaggttctataaaaaattctaggtaagttattggcttttagtgtatgaattaagagtgatatataatattgtattaattattattactattttatggggtgtatgataatatcttgataaagtagtaagacatactaatccctttttatgtcttatatatacaatgagaatcttaatttggtttgtttctttcttttgtaaaaatatatacaataatgtaaaatatattgtagaatatttatatttctatatataacgtgttaacgatcgtaagaaaaaatattgagtaagctatagaattttatattgtttgagaaaaattaagtgtgatgctctaaaattttgtaagtatgagattattagatagtgaaagatgacttaaatgaatttgtgagtattatttatattaacaagatatatttttttttttagtaactccattacttaagaactctaaaatttagtaattgacctagagcaatttttaaatgaatgacattttgggaagttttataaaaaaaaaatattcgagtgaggacgaaatatgctaaaaaaactcgtgttggtttgtagggtcagtcatcaaacataatcgtgttactataggtatgaaaccttaataaattttggtattatgggtaataatgattaagtaattttgagttattttattgtccatatattttaatagcatgtccttattatattattcataatttattagatagaatatattttttacttaacattcttaattttttaatatttacccctaataaggttaacccctttaaaataaaatatacatattttgtttggaaagaagaaaaatgttaaatgttgatatacattattttaagcatatagtagagtattatataaaaataaaatatgagaaaataatattattgcctcttttaattagctatatgaccttaatttttaaatggcatgcattgtcccacacttttttatacacattttcaattattcttttattgttattatttttaaagtttgacgatttaaatatccatattaaataaggtttaactaataataaacttcttagttaaaccctaataatatacttaaaaaattgacaaagaatgatcatattctataattggaaactaattaacatgaaagtcaaattattgttttcttgctttaaatatgagtaactaaacctcatttgattgattttatatgttgctaaatttagagaaacccaacttcacttattaattatattactaatattaattgaatccctattaaaataaaataatatataaatattaggctacaaataaagtaatgcaatggtatattttttcttttttttttaaaaagaaaaataaataaataataaacttttccacaatctaataggtaaggatacatgtgaagtaatagaataattttttataagaaaatgacttaataatacatagcattatttagggaatatattttggaaattaagcaactccttaccaccttgaaacggcattaagagggcctttaaactttcatactaactatatgagccatactaaaaaggggccattttcattgggtttatatatgtatgagaataaacaaattgtactcttaattataaaattaatggacaagattatcaatatctaatacttatttacgaaagagtataataacaacaacaacaacaaacatgccactaccataagtgtgtagtgtagtgattggaatgctttgcataaagtctctcatttagttgtcttctgaaatttgattccctatgatgctactaatctcgtcgcgctcttttgggagttatgcaggtgcatgtgtgtgggcccttttatgtgaaaatggaatcaggtggtgtacattatatttctaatttttttggcgtaatatcaatcccgaaaattactgaggaataagttaggtagttcctaagatggtttccagttgaggcctctcccacacaaagaactattcgatttatatatgaatgagaacatacaaattgtactctgataaatctaatacttatttagggagagtacaacaacaacaaacatgctactactactgagtgtgtgatgtaatagttaagatgctttgcatgcataaagttcctcatttagttgtcttctagagttcgattctcccttggtgctacttatcctgagtcttaaacttggcactcttttgaaacttatgcagagtctgtgggccctttgggtaagttatagtttcctatatgagaagggtctcagctaacaaccatcttaagaactttatagcctcatctttactccttgttggttgtactttatatttaatctaaatttagtacatgtttatatatataaaggtaacaactcatttaaaaagatattgtgcttaattaatattattcatagctaatattttgaattaattgtcatgaatataatggtgagatgtagagaagacatgaaaaatggaaaccggagctttcatctctttatattaattacccataacaatgtaagaattgaattgacatatattacattgttttgaccaataatactattgtccttttcacattatctcaattaagtcattgtcaagcacaaattagtatgcacttgcaatgggtgtggtcacacctagtagaaagtggccatgtggttttacttttatttttaaataatagaattatgagagagagaaaaaaatatatttattattactattagtctccactaatatcctacattattactgattttttctttgaaattaattttttcacaatttttccccattttacaattcctccctttctcaataatcatgacttaacatttcactaggagttaataatttttatagaaattattaaaaaaattacaataataacaatataatactttaag

SEQ ID NO: 381622 - DNA, 2745 bp, Cannabis indica
tatacataaatgtgtaacctttaatgggttggctttaaaaggatcaaagataatgaatttaacttagtattatattgtttatttattcttcattatttttttttcttctaaatttgattaatttatttgtcttgtaataataggatcaatgaaatgtttttatgatatatcataaaaaagcaacaatggagcattcatcagctatgaaatttccagttaatcctgaagattataagctgtatgaagaagtgggtcaaggtgttagtgccactgtgtatagagctctctgtgtcccattgaatgagattgttgctatcaaaattttggacttggaaaagtgcaacagtgacttggtatgtacctgttatgtattaacatttggtagaatatatgtgaatctgtgattgctttactagttttggttagacttgtatctattgtgttgctttttctttcagtgatagattttttatttttgaaacaaaacaacatttcttagtttattgatttcagtattatgatccatctttcatcatgactgaggttgttataagtttatagttatgcagttatcagtactgtatcttttgttgattttgtttttgcttgtgcatggatgttattgtccgaacaggatgtcattcgtcgcgaatcccaaactatgagcttgctcgatcatccaaatctactgaaagcacactgctctttcacagctggtgctagtctttggattgtgactccatatatggccagtggatcatgtgttcacataatgaaatccgttcaaccaaatggttttgatcagcctatcatcgccacgttgttacttggagttctcaaagctcttgcatatttacattcccatggactcattcatagagatgttaaggtacctgttttgctatctgtaggaacttttgcagctatctttaactaactgcattgctgtagttaaacagtaattagctactgagaaatgaaacacaaattcatatagcttgtgagcctcgagcactgactgctgtagtaaaatgcgtttggtattttcacttgcttatgtgtgaaaatttcataaaatcctgtcatgtgaaatttatccatgtttatttgatatctgttattgttggtcctttatactcaagcattcattattataccttactactttcatatctgcaggctgggaatatattgatcgatgcaaagggatcagttaagctagcagacttcggtgtttcagcaagtttgtttgataatggtgatagacggcatgcaagaaatacttttgttggaacaccatgctggtatgaattacaccaatctacttaatataattatgtatatttatactgaattactgtgcttaatgcattggactcaaccccaaatttgagccttattcttattaatttttttctacttatgtcttcaaacactatccacaggatggctcctgaagttatgcagcaattgcatggatatgattttaagtaagtatatcattcatgtaatgtaccccttgtacaccatttggagagcaatgtacatttagccgtgcaggaatttaccattcagtagagttttatgcataaacatatggtgcttatatattttaacatccataaatcggaaaactgaagatcaccgtcaataaaagtggtgatattttgatttcagtgaatgaacacaaattttcctatcatgcatgaatttcagatgatgtgactatgtttggtttacttactaggtttatcttgtagcattcaaagtgtctaaggtttgttttacatatatgaatatcattatctatttcatttatacagagcagacatttggtcattcggaataacagctcttgaacttgctcatggtcatgctccactgtccaattatccaccaatgaaggtacatttcacgattctctgaaatatttcatattacttattacccgtgtatgcctaacatatgaacttcaataacaaaagtaaataatgcttctgaacaataatataataatgcatatcatgtacttgcaaatcgataaattgtgtggtcttttcttctaattttgttaatttattctttggatatattgttgtgtaagtgtgccattaatgctttgttctttcaaaatctctcttcatatgcttttaatttgtgctccacagtttgctgaaatgatttaggcaaaattttcatacttagtttggaatgatgtttgcttttgagtaaaaattattttgcttatctaaatcatgccttttttttctgcaggttttactgatgacccttcaaaatggaccacctggccttgattatgaaagggacaagaagttttcaagtgtaattcccatttaatctgaaactttattgaaatgctgaattggtcactatactgagataactaatctattgcagtcctttagagagatggtaactgcgtgcttattaaaggatccaaagaagcgtccaacatcagagaaacttttaaattatcgtttcttcaaacaggcacgttcaagagagtatgtagctcagaccattcttcatggccttcctccacttggtgatcggtttaggatggtgaaggttgatgctgctatatttcaattttactgagtatttatggcattgtattttatattatcttgcatgtattaacctatatctgttttccaggaaaatgaggctgctcttcttgcacaaaaaaaggctatggttggagatgagcaggttttttttttt

SEQ ID NO: 381623 - DNA, 846 bp, Cannabis indica
aagaagttagtgaactctaagcttgaatgaatgtttcagggagccacttaaaatgctctagctaattgtatgttaaattcaaactataatggaaaatcatatagcaattaatgtatcaattatacactcataagtcataaccaaaagagtataatgtatgttatgtttgagtttggccatagtttttttttttctcttcttttgacattgggggtatccgaatcgaatttgggacctcctctgtcatagttgcatctgtgattttcttatttaagcatttttattctttattttctcaagcaatatgttgactgatcaattttgttgttgccttactttgttgcagattcagattcagattcgataaatcttgaagtcccgccatctttaacatcatcgtcaaagatcataatccttgtttgtacatttcttagccattaatcttttattcctgatgctattttccagagtatatttcactgatcatagagggcttgttagagagatgttgttcgtgtagttatgattatattttactcatgttgttctgtttcttttggtttaggtggcaagcgctggttatggtgtagatcacatgctagcagttgatattctaaagaaaataagatccgcaaatgggtttactgttgctattgtcttggagccattcaactttgaaggacagaggcggcttgatgaggttgtatgaatgaagttagaaataagttgcttgctaaggaaatgcattattgaaattatatttgtattgtatctgtgaatataatcttttcttttgatgtattatcttggtgacaatttttacagtagtgcattgttggtattgta

SEQ ID NO: 381624 - DNA, 3107 bp, Cannabis indica
tatgcagattacagagcttccctattaccagctccttccccatctgaggtgatttgctggaagcctccccctcatggctggattaaacttaattgtgacgtgaaagtggggctggatagcatgtatgctgcagttgtggctcgaaaccatctgggggtggtggaaagaattcagtcttctagtttggctttctgtgatgcgctttgtggagaggcgactgcttgttgcttggctttggaggtggctaaagaggcaggctggaaatttatcattatagagagtgattctagagtggttatcaattcaatcaacggtttggatgtttgttggggaattgaaaattactctaatttttgtttaagactctctcgactgtttgatggttgtaatttctcttttgttagtagatgttgtaactttatggctcataatgtggccaaatggactttcacgaactaccggtttggtagattgagtgattcgtctttcccgaacaatattttatgtaacgaccgtgaggtctaatttgctatttataaacgtttttactttcaaaaagaagctgtggtacgagtgtatatgatgtgtttcctaactaaatattgcaattcaaataagtaatgttaagattttttttaactactattagacttaaatatatatatattttaaaacaattagaattaaatatatataatattctacaatatacttttgcaatgtttttttttggtaaaaatccttaatcacaattaaatgataattttaaagtaaataaaacatgccttttaagtcaattttgcttgttatatagaagaaggtgggtgaaagtgtcataagtcataatcggtttcgcaacttcccacctttaattcccacattttataattattattaattattaattttataaataattcttcaattccctctgtttcatattttgaaaaaaataaataaaaattgtaagacttagcaagtgttcttgttgggtgggagagaagatcgccactctcttgatctcttcccatttccatttttattgttttggttattttattggctattcgcgattttcgcaccaaccctgattcgaaaatctcttctccttcgtccacctttctctgtcttgtctgtcacacaacgcacattccaatattcatatccattcaaatttgagataaccttattgtttgttaacttttcgggttttggttggattccgccttctatttttggcttttcagcagcaattcgaaacagaaaattttggctggtacctgtattctctcctttactgttccttttgtattgattttcattgccctgacaaattctcattcttgatcctagcatactcctcaaatttggatctgggctatcttccttttatgacttgggttttggggtcgtcctttgaccgccaatacctgtaattggtgatccgggttcttaaggtttcagttttggtccgaggctttggcatttggggatctgggttctttcccatttgaagacttgagttgctgccgtaaaaaaactgtggaaggagggaaatttcttttgaagggttggatcattactcaacttcaattgtgccacaagataatacatagaaagaaaaagaagttgtcttttgtttcaggatcggagtgattttctagtttctcatttggcaattggagctatggagtagctttgtttggaattatgggctgcatttgctcgaaagggttagcgaaacagtatgacgcggagaataatgggagaaataaggaagcgaatccaaataagcatttgaagaagaagcggttagaagctcatgcaggcattgacaatagtgggaatgatgctactgcccggttgatttcaaatccaagaacagaagaaaatgttgggtttgctcctgttttatcagatgaggttgggaaaagggcagtcgtcgttagtgagaacctcacaagaccccagcttccaaaacaaccttcatctatagaagttggagggggcaacgggggacaggtacatcccagggtgtctcgggcatcaagcgtcaccaatggggaaaaaggagctcaggttattgctggatggccttcatggctaactgctgtggctggagaagctatcagtgggtgggttcctcgcaaggcagactcgtttgagaagttggaaaaggtcaatttatttccccatttaattttacattttgttgttgttgttgttggttcgatcgtttgattatctatgttctttcattccattttattagtagtggatcgtacggtagtacttgtagtcatgttttcctagttaaattattacaacaatttgtttgctaaatctctttccttttgtccttccatcacattctaatgaatggttttatcaaaatgacatataattcactaattgccttacatttgtccataccaagatgtctactctctatatgtaatagtcaggcgtctttttaatatttacaagaattaattttctacctgtttgttggaatctagattaatgagattcttttctgggctcgtctagtcaggcgccatgacattgccgtatttcatggtgctttgttaatcataattgtgcatgatggattttaatagatgttggcagcagtgttggattagatctcacaacatgttggaagcaatgtaggattaggtctcacaaatgaaaattattattttaaatggctatggtccactacattgtatactgtgcttgttttttttttgaaagcgtatgtttttatgtgggcctacatttatgtgttttgaattgtagctgactttaaggattatctttcaaatcaagtattgaatttgaaggatagggagcatgcagcaggcactacttgattacgctttaaatgttgttatagcttttgagtaaatgcgaagggtacttattttttgcaccttaatgtgggatgcaggcactacttaatttgcatgatgttggataatttttcacccacacattatctcagaatgtgggacactgggactaaattatttacaattgtgtggttagaatagaaactgtgatgcatcacttagcgccatttgtgtttttctttcttttttttt

SEQ ID NO: 381625 - DNA, 1784 bp, Cannabis indica
tcatgattagtggttttttttttcttttctgttgtaaggatatgattagtgcatattacttccaaagttagttttatatatacgtatctatatgtctttgtatattaagggtaattaacagatgttaattttaacattttttttcctaatgagtattagtcttaatcaattaattaatctagaatcattcaaactcctatactctcaaaccaaaaaactaggttatcttcatcattttgcagccattgcagttactagttaggaattaagtgagaaacaagcctctccatattgtcaaggaacaataatgtaattctagcttcatttcttttttagttttcttaagagaaaagtttaggttggttatgtgtttttgtgtagaagcctttgtaggtttgggatgtttcctagactaatttaggactgtttaagacctattagagtggctgtaggtgtttgaagtgggtgttgagcaagtttgagtttatgaactcaaatttggctcaaaaataacaatttgggattctttgagttatgcttgttgttgcttgatgaaacatatttattttggtctaaataggtgttctagagagtttgataaggttgggttagaattgaggttgaaaaaccatattttttttttgtgctgtagaaacgatcactatttgccattttgaaacttttcaggacggccaaaattcgtattttgaccataatttttcactcggatatctattttagtcgttctataaatcgtttcaaagcgcttgagaaactcttcagcatgagatatattttagagccaaaaatatttgatttattttaggatattttcatcgcatagttcgataggaaaccctaaagtatttactaatattagaaagtattctagagtaaacacttatctattttacgctattgtgacttaggaccactaatcatcgagcaccaattttcactcaggttgaccaatatacttgaatttagaattgaggtaaaattagcataatatacatatggacatgattatgtttgccaataatatgattatgctagtaagtttgttaaaggaaatacatgtgagtgcatattacatgttatgaatgtatgaattattgctatcatcactagtgtagttacagtacgttgtgcatatggtatagttcattacataattgagagaatacaacatagtagcgttgcctacactaatactggaagggtactgagtgcatgtgtaaaacaaacatctatatcccacactagtaccggacgggtatgaattataaagaaagtataacatagtagcgttatccacacaagtatcgaacgagtacgaagtacatatgtataacgaacaattgtacttatagtacaaacaaaccctactaataccaattctaaaaggttactgggtacatgtggtatagaggtcatactatcgttaagaacattcaagactcataaaaggcgttggacgcaaacatacttataaccaggtgtatgagcgcttgggttatgagataagctatacatatatgacattcttgatttatctattatgacttgttgataggtgtatggatgcctagtctatgtttatgtttaatgctttttttactgaatttgtcgactcacaaatgctatgttatgtgccggtaagagcttgtcttatactgattaatgtaacgtccctgcttcaagcctccattgggcccatacacccacggactaatgactcttatacacgagtacgccactctggctgcttcctggattgatga

SEQ ID NO: 381626 - DNA, 5078 bp, Cannabis indica
aaaaaaaaaaaaaacaaatagcacagtatatatgaaaagttacaattttcaaacatttgtcaaccatgaataactttcaagagtacccaatttagtaatttaaattatattcattttcataccttggttgttcccacatggagtagcagttttgtgcagggtgatctttcaagatgcagcttctacagagaagaagcaattgaagcaattctagtagctttggattgtcaagaatgtcatgaaaaggttcaagagcaatcagctaaagctctcctagtgctaggtgggcggttctcttacacgggtgaggcttcaattgaaagttggctcttagaacaagcaggttttcacgagtgttcgactttagggagctcttatcagagaccggaaaatgtaagcctatcagaacaactctttagtgtttccctagttttacatgtttaatgaatggtttgttttctgtgtttttaaactggttagagagaagaggaagatgcagcagaaaagttgcaaaggaaagcagctgctgtcttgttcaagagtggccacaagagattactggctgccctttcggattgtataatgaatggaatcccttgtttagccagagccagtcttattacagtttcatggatgtgccaccttctacatttgatcaaaaatgaaaatatgcagacgatggcatggtcagttcttgtgccacagttggtagcatccttggatttcgataaagatgtagaggaaagagtgcttgcatcattttctttactaaatcttaccaagagttcaggtatgtccatatacttatgttcaattctacatccaacatatgctagaacaaatcgtttaggcctcagttaaaaaatcttcttttgttggaaaatttgcagctgaatgtaaatcaacgctcatatcaatggagaaaggtaagttggtcagccatctaaaacaccttcgtttggtaacatggactgccgaggagcttcttttgatcatctcaagctgattaagctcattacaatgcatagattgggatattttattatccctgaaatttaaagatttaccttttagttgttatttagataagtgtgttttattctttgactttacccaataagaagattgaaatctcaatgtatcatatggtttacttaagtaatataagtcacgtatttgtgtactttctcttgggaccatcttatcctgaacaaatattcccattttacatacatacataaatatagatatattagtgacaaattgccaaaagttagggtaaaacttagattaattaatagagatggcgttaagaatgtggacaaataactaagggaatgcaattggtgaggttatatactaaatcactttttgtgcagacagctcaagttccaattctatggcagaaagaacaatcttccatccaattattttttggttacgttcaatatttacaaagaactgcaacaatctactgtcgtgagctttaactttaaatctaaaaggtccccactcccactagattcttgctaccatcaggaaaaagacaatggccatgtgtcattaccattgccttgttaaaattcgtttctcattctcgcttggattttgataaaggaaatgaaaggttaaagaaacggtaaaaaaaaataaacgtgttaaacgtaaaaaagcactaactcatcagtcaccaccaccatccatccaaatggtaaaaacattcaggtggagtttggttggcaatgaaaacatagaattagaaataagaataaaaataaaaataaaaataattaaaaaataaaaataattaaatttaaaatgtaataaaaaaaattatttaaattttttcacatcttgcaattcaaaatagaattagttttttttttactaaaatattaaaaaaaaattattctattgaaatgatattctaatactttaaaatacaaacaaatataaaaaaaatggaataaatagagaaagtggatgagagaggagggttataaatagagattgttattccaaggagaagacttctctcaagtgagatttatagtgtaatttagtttgtacagttacactttgtaacacactccactttatagctctccatttaatcaatgaagatatcaaccattaggtttgttctggctggggatgttgggcaaagtgaagtgattcatcttgttggaaccttgtaatgtatttgtgttcattttactttcaattctgtcttttatttagttaattaattattgttttatgtgtttgattccaattgtaaatctatcataactattcttgtttggtttgtctttgtttttgcatctcatagacctcattcttacaacaagtggtacgagagctttaggttcatagaacaagaacagaaccaaaaacgactcaagaatggcttatgttcgattcgaggttgacaagtttacaggtgccaatgattttagcttttggagaatcaaaataaaggctttcttggtgcatcaaggaatctcgaaagcaattaacagtgaagagttgtccactcttgcagatgataagaagaaactaaaataggtgcagatcaaggcgcataatgcaatattgttaagtttaggagatgatgttttgagggaagtttctaataaagatgcaacattggggttatggaataaattggcagcaattcattcaagatatctcttgcaagttatacctgaagaagaaactgtatacaatggagatggatgaaaccaaggaacttaggaagcattttgatgaattcaatcagatcatattagatctcaataatattacagtcaaaattaaaaaaagaagatcaagatttactcagttctttaccaaaagcttatgagcattttgtacatacaatactctatggaaaagacacctagacaatgtttaaggtcaaggcagccttgaatatagaagaaatctattgagaaatctggcagcaatggggaaggcttgtttgttcaaggaagatctaaaactagagactcaaaataagggaattcaagtctacttgtaagggaaaaacgacaaaggtggtcaaaacacaaatcaagttccaggagtgagaagcaatgttactacttcaagaaagagggtcattatagagatgattgcaatgaattaaaggaaaaactatagagagataaaagtaatgaaaggggcgatgctaaagttgcatctgttggttatgattctgatgatgtgttggtggttttaagtcaagaaactggtgatgtttacatgagaaatagtcctaatgacgtggacatcaatgtttgacacgtggcaagaaaaagaaaatatcccaaaaagaaaatatcccagagtttagtgtcctaggtcgtagcagtcaacctaggaggggtccctagccttgttaagtttactttaagaactccagaatgggtgtttggatcccgccaagttgtttcgaactcactatctttcaatattttgtaccataaagagatgaagaatccaagtccaaagcctagaaactgaaaggactcaaaatcagaaccctacaagccaacttaggcacttagggtttcacacaatgcccaagttgacaacccaattagggttttggctttcgggattgacttaataaaaatgacccacaattttcacttagataagaattagacatctcatgaacatatttgaggcatcagaatcagattctgagcactttcagttttaagcacccagagaaccaggtgccccaggcacccagcacccatgttaacatattatcaacctgtggcacttccaacaaccataccgaagaaggatctcaagaattttctttgtctttatacaaagtgaggaaacactgcttaaacgaagccacttgggggtcagatatgggacccagcgcccaggtaacctagtgctgggcccaacgcccatgttgacactttgtcaacctaggccatttccaaggagtttttctgaaatgtcttccgggcatattttctgttttcatcaaagattaagatacaattatttttgagaatgaaacagagtcatctggtggccaaaaactagacccattacacaagttaacattttaccaacatggcatatttctagccattctttcaaaaaaaatgttccaagaatttttttttcatcagaaataatgtagatacaagtgaacttggggagaaaatgagaatcccaaagggccaagaactgagcccaacatccaggttgaggtggtgctaggcctagggcctaggttgacaatcaacatggtgcactggtttctgtcctcaaataaaaaattttctctaggcattctatctggcatggtcaaaaaaaggtaagagaccttgtcctcaatttttaagacattggaagcatcaaaacgacatcttggaagctccaaaaagggcacttagcgcccaagttgacgaatgacctggtgcgatggattctgctaatttattttgatttcttgtcaagtatttgtctagtttttcacggtaaattagatctatgaacttagaaaagtcaaattcacaaattcatatttttccttttctgggcaaagtgaactagtcacaaattgagtattttcgagtctctcaatttttcgaaacaacaacatatccgagaactggtgaacgactaagtaatgtcaaaatatcacttaggcatcaaaaaatacacccataacatgttttctcacacacctagcatttaggttgacatcatatgtcaacctgcacggtaaatgtcaacctaggcgttgggctgtcaacctgggcatcggtattagagcaacctttaggaaaatagacataactcactcaaaattgatttgattaatgcaattcaactttacttttgatgttatttaaatgctctattaaattatgcctcacactcaaatcgtaattctatagatttcaggtacaaatttcatctacaagagagttacgaattttgactacaactaacccgaaaaaggtcttgtagatgggatttaagctccaaaaattgacgatagacctctggattcaattttaccattagatcatcat

SEQ ID NO: 381627 - DNA, 4694 bp, Cannabis indica
ggattgaaccaatctagaccgaaaaatggaaagttggatttttatgagggaaaaatcgaccaaaccgaccaatgcttagtcctatttggacctcaacctcgtccttcctcgaccccgaccttgactctgactcccgacctcgtaccccgccccagaatcgtggtctaccctggacccggacctggacctagccttaatcccggcttcagatccagatctggacccgacttaaatagaatcaacaaatgaaaataaaaataaaatttacacaacacacttttatttttaaaatttaaaaataaatgcggttatagaatacatttttaatttttaaaaaaaaaaagttttttttttttttgagaaaaaagaaacctgaactttactaagaagagatcaagactacaaaacgcttaggctaaaatggaaggtaaggaaccattcgaacacactcattatttaaccctaaagctgctttagcataattatgagctaatttgttatactcccttggaacatgagttataagcaggtttggactgaacaacaatggtatcttaatacatttgataatatcactaagaacagaattattacaataaaaattattaattttatccacaacactcttacaatttgattcaacaatagagattgggagcttggctgcttgaatccagtaaatagcagcaagaattgctttagctttagcaacttcaagagaaatcacacctgcaactggaataactaacccagcctttatgttgtcacagtcatccctagccataactccaaagttatgttttttttgaagcaatgtcaatggcagcatctgtgtcgattctccaatgtccagaagcaagccaaggtacctattcacctatttcttgcccttcaggatgcaatttaaaatcaagatgatgagcattttcatattcatttaaatagttaacaacatgatcaaaaagctccaaaggggaaatggttcttttattgtgaaaaaggttgttacgttgattccatatcatccaaattagacataataacacaaccaaattatgtttattatacagttcaaatgctttggcaatgtacatatcaatatcatgatctttattttccatataaaaggtggagaaacagagtgtttccaagcttttttttttttttttttggttttttggtcatttgaacattccagggtagcatgtttcactgtctccaatttcagttggcaaagaggacaggtaggcgaggggatgatgtgtcaagagaacatagaagaggaacctgggatggaatgagaaagtacacaccacaccaaatgcttaactttaggtggtgcagtgaacatctaaattttttactagaattgtttacttacattaaatgaagaagaagagggcagaccctagacttgagtgtaagatgataaactgttttaacattaaagagacctgagaggtcatgaccccaaattaactcatccttacagctattacctgaaattggcacattaaggatgttatctacaacttgaacatcaaagtagtgatgaagcttagttggatctgaggcactagacggggagataaaaaaagataaattgggttcaaaagggggaagagatgagtacgatttgagcctaaaatcaggaagccaatgatactctatggtttgaatttccttgccatcacccaccttccatataagtccctgtttcatcaaatttcagccccaaagaatgcttcgccaagagaatgaaggactatggccaggagcagcctcaaggatcgaagtgttagggaagtatcaggctttaagagttagactgagcaaagaatcaggacacttaaaaattctccaggcttgtttagcaagcatggcttgattgaagtgggttaaagatctaaaacctaaactgcccacaaacttggattgacaaataaaactccaatttttccaatggattttacgagtgggttaaagattcaattcttttacaaatctttgtaggtatacgaaaataagccatagcacaagaagggataacttacaggacaaccttgataagagtttttttgcccgctttattccaagagtggatgattgaggaaattctatccttgagaaaggtaaaagtaggatatttggcacgagagagacattgtggtagaccaatatatttggtgataaaaggtctattttcgaattgaaaggtatgaaagaaaaggtccctgatagtagtttgagtgttaagagaaaacaaaatagaggacttggcaaaattaataacctgtcctaatgcttttgaatagatagtaagtgcatgatttaaagcttcacatgagttgtgatcagcaaaacaaaacaaaatgctctcatcaacaaagaggagatgagatatgggaggggaatttttagcaatggcaatacctcgaagaagacccttgtcttgataattcataagaattgttgaaagaccttcagatcaaagaatgaacaaatagggagagaggggatcgccctgtctaaggcttctagtgggtttcacagcacctcggacatggccattgatggagaaagagatggatgctgtagagaggaatttcaggatgagagtgacaaagcgaacaaggaagttgaagtgaaacatgagattcctaagaaagtcccattcaacacgaccgaaagcttcatccatgtcaagctttagaacagtccaccctctcttaccaatttttctactggtaatggcatgaacaagctcattagcaatgataatattatcataaatgacaagacccaagacatacgcactcttaatgggagagataattttatcaagaatcaatttgagcctattagcaagggtctttcagatgaatttataaaatgtagtacaaacgttgataggtcaaaaatccattggcatattaacatgctgctttttgggaattgaaacaattagggtagaattaacatcagtgaaatcaatttccttatagagacaatctaaaactgcattagtaaaatccctacccaaaataacctaggtttttatataaaaataggcattaagcccacctaagcctacaaccttgtcccaagaaagctgaaagacatatttccttacttcattagcagtgaaatcctaatctaaagccctaatatcttgttcctcaagaccaggtcccatgaaatcaaagattgaagcaggagcttcaatatcactcccctaagaagaaaagatgtcagaaagataggaggttatcaaatcaacaatgccgacctgtgtgttaatcacagtacaatcctcagtcttaagatacttaatactattagatttcttacgaaaggaagcatgcttgtggaaaaattttgtattcttatctccagccttaagccattaaactctagcccgttatttccaataaatttcctcttttacaacatcgcatctagcatagattgcagctgagagaggccatttttatcattatcactgattataaccttattctggatattattaatatcatgagtaaggtattgaattctagttttaaagaggtggttgttgcttttattccaagtcgtgagagaagagatacattgatttttcttagagatgaaactatgaaaatggttattaggctaactcgaggcaggacaagtattccaggctatatcaacaagcctgtaaaaattagggtcttcaagccaattattttcaaatctaaatctcttattcactaaattaacaggattgagacttgtagaagctaaaacgagcttttaaagtacgatgatctgaaccatagaaccataaatggcgaagactattattaggatagagatcacactaagactccaaaactacagcccggtctaatcgctcactgatagttttattagtccaggtgtacttatttccaacataaggaagagagaacatcacaaactcactgagaaaattggcaaaaaaaaagtaagttagtcagggagattcccaccaaacttatcactattgaaaagaaaactattaaaattgcccacaatcaaccaaagcagattaggagcattataaaagagatcatgtaataacttccaagtaaaatgccatgagaattaacaggagaaccataaaaacaagtaaaatgacgcatatcattaacattaaagccaacagtacaatctatatgattagaggaataatttaaattattaacataaacatcagtcctccacaaaagaagaagtcccccaccaaaatgctgcctatagggacctcaaaaccacattcaaaacctaaagacctcttaaacctatctacaaagtgaggcttaagcctggttttcatcaaaaaagaagagtgggcctatgagtcttaacaaggagagaaagctgatcgaatgctaaggattccctagacctcaaccattctaactcagaagactcattattctgggctggtgtgctcagcatcactcgcctgttcaagatcatcagcagaaggtggagcatcaaagtctctgtcgccagccctagcacgcttgagctgttggaaatattttaccaggatctagatttactaacaagtatgtttcattaacaacctaatatgaattctaaaacaatgaaataaacacataagagtttaagaaaaccttgcattgggtgcagcggaatattat

SEQ ID NO: 381628 - DNA, 3560 bp, Cannabis indica
agagagagagaggacaaaatgaagcttcaaaagaagttacatttgaaaaaactttgtagtactgtgaaaaatttaatgacctattgaaattattttttggattttgttttaaaaattatttaaaaataagataaatataacagtgtttgtagttttcaaaaaaaaaaaatgtttggttaatgtttctaaaaaatttagaattatttaagaataaacttcaatgaaaataaataatatatttataaaaagataaatattttaaagtttatagtaatagtgatataaattaatttgaaataaaaagttatgaaaactctacaaaatacttgttcgcaatttttcctttttggtaactaattggtaaccaaaaaataaaaagttatgaaaactctacaaaatgtgttcttattttattgggaaaagaatcacttgttttctttttttattttcttttcatatagagagaatttctggattttccatccaataccgaaccatttaatattagttaagatacttttaattaagggacaatcaagaatagaaagattagaatagattaattaaagtactagagatgaaatggggtatactaaacatcatttcaaatctaaaagctatataaaaacaactacaaactaaaaatgtatatacaaacccactttacatttcactaaactttttgcttttttgttctttaaaccaccaaaattaatatcaaagaaagtgaatattattatgacaagtgtcacttgtaatcatcctataactaatgtcccttcaattttaagagaaatgctaaaaggcatcagtaccaagcactctcttacgtgtcaatatcgttattggtgcaatttagtatgatgtctcatatagtttaatataatagcttttagggagtatcgctagtcaattgtaaggcgacacgtcttaagggtgctaggcaccattggtgcccaataacaatgctcatagtccttagtactatttaaaaatatcatataggtattaattagtataattaagttcttaggaaaaaaaatagcttaattaaatattgtgtctcatataatttaataattattataaaataacactaattattaattatctaaaacatatatatgattgaaaaatattaaagggtgcacaatataactatgaatgtattataatattattgtttttaatggttaaaccattctaactatcgtgttaattatacttgatcctccaagctcaaaatttagttgtaaaaccttccaaattactgaacagatagcaaatttaacggttaactgccaccataatctgcttatgtgtacactcttatatatgtggcacgtttatattgatatacacttaatattattatttcaaagtttattttaaaattaaataaaatgataaaaataaaaataaaatattacaattttgaaattatttttataatttttaaataataatattaactgtaccaatataaacacgttatgtgtataagagtgtacacataagcagtctatgttgacagttaactgtaaaaaatagataacactttaaatttactaacagttgagtagtttggacggttttactaccaaaatttaagatttaaaagttaagtgcaagtcgaataatagttaagatggtttagctgcaaaaaaaattctattattattgatataattaagtatatatgttttacatatctaagtttaatgattgtcataaaaaattactaaacattcataatgaatatatattcaatcatatcgtaatttagatgtctgctaataaaagtgaatgaaattgaatgaaaattcttaaatccacaataattttagtagttcaagaagaatttttaaaagtattcagtaacacaatatgacacatgtcgaaaaaaatcatagttaacctaaaatttattatttagatatattgttgatatttatttttttttttaaagaattttatcgaaataattaattgttactattaaagcggagttgaagtatgcatgctcgagattgagttgtgaagagaattttcagcaaagaccagaattcataggaaatacgacagcgtaaaacatggccaagcatggcctcagaaatagagtttaaaagccaacataaaatggcttggtcagtgcgaacctagagagtaaattgggaatttacttgctgctgctacaggtcggggttaacttcatctggaacttcgatgtactgaggcggaaccgatattgtgccaaagagaaatccatctagatcgtgagcacggacggctgggacgacttgtgaacgccagtagggatagttatctctgtttaggtgaatgctgatgggtgccaaaggttgcagcaagggcacgggctgtgctggagcagctggtgcaggagctggagcttgaggaggagcttcgacagcttgagatctcgcattgttgactaaagaatcgtctggagataccaaacctggctctgatactaatctaaaatacaggaacaaaaataaaaacagagtatagcagaggtagagtattgcagcaaaatatggtaagtatattttgtgtattgatttctcagtgcctttacagtgaataaaagaatgtatatatatagtacaaggaatggaatattttccgtaacaataaaatattcccttgtctaatgattggttgctgtacaaaagggaatctcaagattttaagagatttcataacagctcatgattgaggaataatctagaattcaaaaataccagcacaccatattcagacaataattgggtgcggtagagatcactctcaattttaacaaaagtaaatgaagtgtatttgaagaacttctagaataaaaatattatatttatatttaacaaataaatagtatatatttaaatattagttgttgaatggaattaatcgaatcttcttattgaacaacctgaaaagatttgattatatgggatatcaagtaggtttgattaagtgtcttgcttatcttcttataattacatcattttaaatccaaaacataaaataataaattaagatcatgaactaatatatgtaatagttacaaacccactttacatcatcatcatcatctaacaataagatcggctttgactaaattaactttattttcttggacctaaacattgtaattatgacaagtaacacttaaaaatatcccataacaaataggtacaacaccttaattacctaattaatggtgatgattgaatattatcctaattattattaagtataatatattggttataacaagaatgagtgtaacaaaaaacaataaaacctaactaaaccgatggaattgaaaccaataataaactaaaacaaacaccaagagaaagatctatatctatacacaatacacaaattaaaataatttcaaaaataaaaaatatatatatatttatattatcaacctatttctcaattccttaaggtcaaaaccaaaagtttcattatattatagttaaatatacatagaattaattaattgtcaatccaatatatatatatatatt

SEQ ID NO: 381629 - DNA, 2305 bp, Cannabis indica
aaaaagtctaccaaaataaatcttcagaaagggaatagcaaaaaaccctatttactattccaagcagcccccacggccagggaaaattaatattgtctttacaacttgaaaagtgtagcaaaaggaagatatataaaaaaagagaacaaacaaacaacaatttaagaaagggcctgttgaagttcaagactgggcagcactagatgggttggaggactctgctccaaacaatcgctccaccgtctcctggtaaatgtcatgaacgaccctcataccccatatgtggcgagtctgttgagcgtagttggcctcgagtaactgattttccttcttcaagccttcaatctgaagcttggcctcagtgagctcagccaaaagggttttgttggcattgtgcaagtcacggttgtccccttaacttgctctagctctgtcactagcgtactggcctccttggcagttctctcagccagtaaggccacctgtcgaaataggctaaggtaaagaagctaaatatcaaaataaggggcataacataacaaaaaagaaagaaaagaggaagaaaatgtcttggggccttacccgaccgcctgctgcttgccagagttggccagtacaaagatgtccacgctgctgcatgatgctcagctctccatgggcagctctgaagcattgccagccacttgatccagaagctcggtggcaaaggggcagcttcactctctaccttaaaagctaggcacttttccaaggcttcaacctccacagttggcctagcaaagggcaaggtgtgcatgtcgtccaaaattttagccttacagaccgctgagagcacagtggcccttctacgaacttgtaacttttccgcctccaagtgtcccttcagggccttgttcacttccctctccttcttcatgttaagaggattaaaaggaatggtcttccttgggaaagtgaatcccactaagggtatttttggaatgtccgaaggatggtgtgacttagactgccccagcctaagtggtggatcatgatgctgggggtgggcccccattttagaagtggctacctcaagcctttgcctttttctgtcagaggcactgccccatgccgctttagaagaatcgatcctctccattgcagacctaatgtacttgtcaggcactggtacgaaagcaaaatggctccacacagcataggaccccagtactctctaagactccaagcacggtgttaatattcccagggcaggtagtcccatgcaacatgcacccttatgactccctaagaattctacaataagtaaatggtgaagaaacttaccagttattaagaggagatgaggctggtgatcctggtgttgcctcttggccggcggaatgcatgcctgggtatggagttattaagactatcttgccaggcagaagaagggatgaaaccaaatgttaagaactctagtacaataggcagaaaaattgtaaggtatgaaatggctgctgaaagtatttattgggtaccacaaagaggcgccttccacgaggagcaaacggttcaactcgatcgcccaaagggcatctgctggttggataagtgggaagctaggaaggtgtatcacctcccaacggttggcttccatcattgcatgcatcgtgaaaagtgctcgacaaatggaaagtttgctcaaatctaatcaccgtcgtttttaatcatcccacagatacgggcctagtatgcgcgcaaaactcaaaagtcaacatttaaagccctgaagagaaaacgaaggtaataataccttctagatagtgacacttcagttagcgactaatgacgtaccgtaataaagagcttgtcataaattccacgtgctcgaaatcactcagtagaagacactgtaagcccccggaccatggtacgccctggaagcttatggttaaatgttattcatattatcgtaatcatgacatgtggattttaatcaagaaagactaagaagtcattagcggaccaacttcctcatttaatgctccagtaagataagggccataaatttgcgggaagagtttccatgatagggagttccctaattgatagcaacaccgagggtatccgtgagccaaagtctcccttcgttctaggaaccaaagccatatgctcccgagaagagtatggattttccctacagggccaaggcatttcaaggatgcgctaaattgggctacgccgttggcccatggaagctttgcccatacgtgtcagactatagtttatgtgatcaggctttttcaggtacgacatcagaggttgt

SEQ ID NO: 381630 - DNA, 5921 bp, Cannabis indica
acatacatactcaaataaaaattcaggtcattccaatatcaataaaatgccaatataaaatcccaaaaatgtattttggccccgaactagattcgacctgaaatacacaattgtgactataccgcgctgacttgtcagaaaatacctgcagaaggacaaaacaagtatactatataataatatagtccataagcacgtcataatatttaaattacagttttacccttctcaggtcaaaattacaaaaatacccctggctcaccaacggggtcttaacatgtcatttatcaaattaattcacatataataaattatataataatataattccatataaatatacatttaactagttaaggtttgcttatccgttttactaatgttaggatattacatattatctcgccaatatttaacgggggaatagttattattcttatctcgcatttgcttatgtgacaatgagtttgaatatttctatcaaccataatttattgaaatgagttacttaagttgcattaaataatgcaatttaacactacaattattgagctgattcatattcctcctgaagtacacgtgttagcttctggttgatagctgaattttaggtataacaattgtcccctaaaaagtactttttaattagaaaggactttttaaatgtcttcaagggtattatcgtattttttcatttaaaatttgcatgcttagaatttggcagttcaaaactttgaggcacatcatttctcttttaatgctcagactgttattcttttcttgtacaattcccatccgtttgatcagattacacttaatcgaacggttgccaccttttagatataaattcgaaattatgcaccattttttccattttaatcttacgaaccttcaaggcttcgaaaaaatctcaaccaccttctaatctaaatttgcatgccctctctgtctctcacatttttcttgcaaatctcgtccgattatactcattttcttaaaaatcaccacaacccatcctttcgattataagaaattccatcacgaagttcttttttacgcaaaatatctcatgaaaccagtaagtggtatttctctttactgattttttttatgctttcagtttcaattcttggtatgggtatctcttgtctgcattgttttgatgcttgggtagtttgattttgagtgttggtatttctagggctagaaaatttaaggttatacgattcacagattttttggattttattggtgctctattttttccaggaattggggcattatttttattatcatgtcccaatttatccctgaatttgcaatcccagaatctttagaatcagcttgtcctcaattttatgccatagaatataggcccgaacctcgaggaccccagaccatacttgcaattaatgatgagaaaattaggaatcacctcattaaatccaatcaagaagaaacctctagccgtcataggcaatttttgcaagaagttattgagggtaggcgtcagtatttgcgagaagcagcttggcttgaaccctcaaacttagttgatatacccttagcgaggcctatgtttttacctcaagtcactgttgctttttcgccaggtgacttagactttgagataatggctcagaaagctcgtaaatcaaagacacttcaggaccccacagtcacctttgaagctgagtcaatagagtccaaagttaggtccattggaccttatgttggagatgttttaaggtcatatggaaacaagaatgagcagggatgtcgcattaggtctattgctaagggggagttcagctgttatccccctgaatgtctagtcctagatgaatgttgcaacaccagtgagccttctagaatagacgcttagacctacgaggatataagagttggggcagttcttcctcttaaagactacttcaatgacttctgtaactacctcagtattgccccttctagctggcaccaaactaatgtaggatattggcatgtttaaagtctctctaccatattctgaggtgggagtgtccgaccccactaaaaattctttgttttattactgttaaagcctaccctgcaaggaaacgaggtgcgagaggtttctactatctcaggacccacactaatgatcataagatcgttgtgagattacccaacaaaaaggagttcaacgatgacttcttttgcatcactggtcttttccccatcaacacaataaaatttcaaattatacataagtatagctcttctcaaaaacttaaatttgagttttagttcatatatattttccatactttactttactaattcctgggatttcacaaatagggttaatctcataattcactttcccataatcatataattagcatttcagttacacataaacatacagagctcagaacgagctttccaacgatatacggaacatcccaaacagagttcggattcaagagttatgaataaaataagtttaacacccaatctacctagaaaaccctaggcgcactgcgacattcacagcccatgccgcgaaacctgggttaaaaacccataaactccaataggcgggtcgcgacatgcaaagtccatgccgcaccatctgggtagaaaacccaaaaataccaattttaagccaaatatcaccccaaactcatttcaaagcattgataaactcaaattcattctaaaaccagtcaattaatcatagagaactcacatcatcagcaattatgctcaaaataccaaatcaaagttcacttaaaaaatatgatcaaacataatcaacataattcctcaacatcacatacttgaataccaagtttcacaccaactataaattccccaaaaaatacagagttaaactcagagttctagcacaaactacaaccctaaaatctcccaaaaatcaagctagaggtaattcacataaacctactagcttaaacaacacaaaaaccactatatttcatcccaattttcatcaagatgcattcaactctaagcaaacaccaaaaacatataaaatcaaactcaagaaacattccaatatcagaatttgaacataaacaaaaaagggtttaaaggcttaccacaaatcacaagcttcaagcacaaaaatcaccaaaaaatcactctaatccaagccttagattctattttaactaattttgaagaagatggtaaagagagataaagagggggtcgactaggggatatacaaccagaaaatggatttctatattttacaaaattgattttcttggtaaaaatattatggatggtcaaatgactaaattgccctcaaggcataataatgacataaacaatccacaaggttaaaattgacttccagtcacaaatataacacttaatttttttcaggtcttctcagttatcccaaaattccaaaattaaatcccaaaaatgtattttgggccccaaatcggttcggcctaaaatacgcggttgtgactgtactacttagacttaataaaaaacacctacaaatagatagaataaatatattatataaaaatatagctcatacgcacgatatatcatacaaattacgattttacccttctcgggtcaaaattacgaaaatacccctggctcaccaacgaggtcttaaaatgtcatttatcagtataattcatgtaataaattatataataatataatttttcattaatacatatttaattagtcagggtttgctaatctaatttcttaatcttaggatattacaatagcgatcacttggagacccgtttcaactcctaagatcgagaaaaggcatagggttctccttggccttccttatggactgggagtggctgatttcctgctacatgagaacaatttgatggcttgtgcccttcttggtggatagcagtctaccaatgatttcaaggtcccaaaattttctaactagtagcaagttccagggcctgccgacgaggagtaccgggactatgtggctcgcagccattatatgaggaatgtgatgcctcgggaagctgaagatggtgcctcctgaggtaataactttagtacttgtggatggtccctaatcgttcttaggattgagcgaacaacactagtttaatttagagatagccaatataacttctacatctagaactgtgtataccttatctctcacaggtttagttggtaccctaaacaccacatgcaattgagctgtaatagttcttattttgggatcgctaactagtacgacactaactttgataggactagacattcagattgggacatgtctccacttaatccctttgaccttttcatgattactagttctttggaatttagtaattattatagctcttcttccttgtctgatgattatggtaatattcttaagtgggagtttaactcaccctattttctgttttaattatacaactgtttgatatttcatcttttatctcgcatatatggatctagattttgaggatgtcttatgcagcccctctggttcctccaagcaaaccaagaagcgcacaacttcatcaaaaactgcctcggggtcaaatttagagcctttgaagagggtaaaaaagtctgccaacaaaaagcgtgccttgacccaacttacaattgacttagagaagaccccagacacttcctctatccctgctgctgtgagctatggtgaacaagccctagggcctgttcaccaagttaaattctctgtatcccaactcgagatggcattcttggagccctcttacccctacccacctttgcaggtattgagggctcacaagtatgctcgctgcatgctactaacagttggcatcattataagacttttcgacaggactactaggatttgatcaataggggtgattttcaaagtctaacagtgaggagtgttgatctcgtgcattcagttagtccccttttatttggaattgatataatatttcttttatgtaccttcccctgatctcgctttttgcaggcatctcttttatcctttgtagctcaacaaaggggcctccagaacatcaaccagcttaacactgagcttcacaaatccaatgatcaacgcaagttttggctagggaatggaatgactctcagtttgagatttctaggttaaagaaggatgttaaagagaaaaagaaagcccacaaggctgagcttgaggctgctcagaaaaaagccaaagatctccttgatgcaaactagaaggcccgggaaacgatggatgaagttaacaagaagctcgagaaagccaaggctgatgctaaggctagagtaaacatgatcgccaagtgatccatttatcgagcttggttagcaaatctcaaaatggacctgagattcttgggagccaaaactgaagagatgcatgctttctatgagcagactaagaaggatgaggtagaaaatgttgaagatgaagaggccaaagaagaagaaggacccactaagtctccaaccatgtagacttagtttttattattttaattcccgaacaatggcctttaagccgagacaatggtttgccccttgtggcatattgtaatatcatttaaactttgctttattggatggccaacattgctatttatatatatatatatttacttttttgccattttatcttgcttttctcgagttattaatgtttgtctattgcgttttcattcacaacaaaatacttttctcgatttagcttgggatattttttagggttacatgtttacttaattaagtgcatgtttgtatactaattagttattaccctgttatttcatatgtgagcatttaatattttgctgtgttatccgcgaacagttaatattctgctaagcttttcgtgagcagttaatactaccatattaagagcaaactttaaatattttgaa

SEQ ID NO: 381631 - DNA, 4608 bp, Cannabis indica
ctttctactatcatctctgtatcgttccatgaatttggccatgctcttgcggctgcaaggtctctcaatctttctctattccaagtgttttctcaacccaattcagcttcgataacttctctattttgttttgcagtgaaggcgttgagatggagtacattgccatcttcatagcgttcgtgtttcctggtgctttggtggctttcaaccacaacttgctccaatcattgacacattttgcttctctccgtatatattgtgctggcatttggcacaatgcagttgtaagatatcatataacacaatcgtgttttcgatttgtaagttgtttcctaacacacatgcaatgttctactttgtctctttgtttagtgctgttcactttgtggattgacattattcctcctgccttggattttatttcccttttaccaacatactggaatccctatggtacttcccttatcacacttatatctgtttttcttctatcaaaattcaaatgcccatgcttattgtgtgtttacctcaatttcctagaataggttttggctgtaccttcttcttcacctctctctggctacttatcccctggtgatcttattgtctcaatggatggtgccaccatcaaaagtccccaccaatggataaagatggctgatttcataaataaattggcgattcgtaatatgaatcattctagatatgccaaaggcattgggatagtcaatagtggaaaggggtactgtgttcctcattctctattagaagagagcatcaagatgcaactagaagatcattctggttgtcctgatgatctggctgcatttgcaactattccctgtttcgataaaaccatattcgatgaccaaattcactgcctgaatgctaagcaagttgtgaagcatggtaaatgtggtgacggttgggtgacagccaaagcagatcctaacagttgcatatgttcacaggtttgaattcttaacaaaattctattactcctattttcttatgactgaccttaatgatttctttctataggataggacttgctcaagtccaattcaaagaccaggcatgatatgggttgaagtttcatatttaaggccttattctgaggaatgcttgcaacatcagagtaaagtagttgtggattcaaggggttccgacattgtagaatctaattgtggtgggactattgtttttgttggtgatgtgatctctatggcaagctcggttcaactaacagcgtatcaacctcgttggccatattttggtgcctatcttcctaacatcctagaaaagatctttgtatgcactttccatgtctctataacacttgctcttctcaacagtctgccggtcagttttattttattgtattaccttttacataactttttcctcattaaatctgtcatacatttcgttttatttcccaacaacttggcttactaatgtaaactataatgaagagattactagtaataaattgaaaaatgctagcagaagagtctatttacttcatttctcttggctttatactttgagaattgtggttaagacatattaaagctgttatacaacatgataaaatattttgttgtgattgatcacaattcaaacaagaacaagaatcagagaatgaatcaactattactaaacaagaattcaatcaccaaagtaataatcaaaacagtaaagaaaaaataacaccagaaattgtgcagactaatctataaaactatgtgtttcatgatcagaactacaaagaatcgaactcactagagtagactaactagattacagatgcatctcacatgaaggaattcatttcaagaatgaacaatccctttaacaaccctgattacctagttagctttctatgaagtttgtgaacattaacatagcctgattaccctttgatggttatcttaacaccgaaaaagttacaaatctactctgttttgggtctaacttaaaactcattgtgatgtttattaggtgtattttctggatggagaatctgttttagaagggacactctgccatttcacatcgctgggttcaaacaagcggggaaaaattcttcgattgtgtttgttgggtgggacactcatctccttgcttacccttttcaggattttctttaaatttttgtagtctaaaggtaaatttgttcttccttattcataacatatacaagtttaattgactttacatctcatttagattgaattttgaattgcctaaaagctaaccggtataaatttgtgagtttacatgttcaaattggtgtaaactgtacgggattcgaaaataaaaattcagttgcaataattgtatcaacatttggtataaaagtagagagacttgtaacgtaatcatattccttcattcatattatgcaattctaaaacacagtacattatgtaatgatggttaagtcaatgatttagtttgttaagacctttttcattgcagcatgcttaatgttggtgtttgtgttaacaatgaatttatcaatcaatccttaattccatcagtgttaaaaaaagaggtgatatggatggaaagtaagatatgtctagcaaagattggtttgggaaagaatgaagatgatgagtttggtttgtctatatggaattgtggggtagtaggtttgtgttagctttttagattaggttacaggtggcagagattaagggaaggaatatgatacgttgctgttgttgttgattgtttatagtatttttgataagttgtatatgatgatatgaagagacagaagtgaagataaaatagtgagatgcgatttgtctatcactattattgttgttgtttgtaatgtatgaattaagagtatgtacgtggttggattgttggagttgatcaagatatgatatgataatgataaagtagtaatagtagaagtgggttgttgggtgagtgatgagtggggttggtttttgtttttgtgaaatggtattttggatatataatgggaaaaaggaaaggaaacatgtggtgtgtttgtgggtttttgtgttgtgtgtgtatgagtcaaagtctcgtcattcgtaaagaaaaagatcggaattgtgcaatctcacgttgtttgaggaaggttaaatgtgatgattctaagacttttgtaagtatgagactacacagttgaacaacgcttaaatagattaattagtactacttatatcaataagatacattttattttcggtagcccatcataaaaaaagaactataaagttaaacgtgcttgatttggagtagttttataatgggtaatctcttaggaagttttctcatgaaacaggctacattgaaaagctcgtgttagtttgtgaggttagttatcatttcatgaaataactaaaaatgacgtacccgtgtataagagttattagtctttggaggaaaacttaataaaaacttaaagcgggaacgttatagtgtgagtctacaactactactacaaacataggctttatgtgcatgtgcatgagcatgaaatagatgaagaagggttttatgtgttctgtgctctgttcaaagtcactcaacatagaatactaatttgtattatttacttaaagaattaattaatagtagtttattattagattagacccttaaatcacgtacatcaaacaataataataataataataataataaagtgatcctgtttctccaattaacttacttccattttctactcttcgtcttctccaataattctcacatcacttcaccatgttcaaatctaccaaatattaaaaacatgaaataaataataaatacatataaatatttatatataatgatgatgagtttgtgtatatatatatatatatatatgtcattgtgtcttttttgttttttgttgggccaaccggcagaggggaagaaattaatagaatcaaaacatatgctattgctattgctattgctactgttgggcttgtgaccatttattcttgattaattatattattattaatttctatgtatgtttttcttattacagtgatgatgagtactatataatattaataatttaataatgcctgctccatttgagaccatatgcatcttctatgtatagtatatatatataaagcaaggacatatatatgaatatggccacatatatatatatatgtatatattcagatttattttattaattgtatgtatgaaatatacgtatgggacctgggattacataattattaatacgtacgtacacataaattcaaatgcatgcatacagaacctggtgaacagttgtatatatatttattatatgaagaagcacatcacactgtttgtatatgtatgtaaataatgtaataatgtaccaactgcttataattaagaagattaattacccttaattttgtgtttaatttgttctaatgaatattattgtgtaatatatatttgatatatgtttatgtataattatcaagcattaatccttatcagtctgaaaagatttaatgtataggctgaaaattgggaaatttgaaaaactatacattaaaaaccctaatattttatgcttaaatcaatacatttcaaaat

SEQ ID NO: 381632 - DNA, 2239 bp, Cannabis indica
aagcatcaaaattttagcaaggtgctttcgatgaggtgataaggtggagtctctttctcatgcacttttttcttgttcttttgctacgaattgttgaaatattacaaattggaccatatagttgcactttgaagatgctttattaagaatgttaagtgagccgtctaatatcgatgttgttgttgtgtacgtatcgatctgtaatttgaacaaaataaatacaagcaacgggaagctacacatgatcctactagtgttcgtgactcacctggagctttgctatgagtatcaggagagctctttttggtctcttgataaatgccttttcaaggacccaaatagatcagtggttcatcctctcaaagtggctgcttcggctaataatcaagatatgggtcccagtcaaagtgatcaacgtggggttcaaatatggaagctacatgatgttggatcctttaaactaaatgttgaagcgattgcttgtgttggacgtgggctcattgtgataggtgctacaatacgtaatcatcagcatggcaggatgattcgatctctgtaatttagttagtgcacttcccaaactccttatacagcagagttgattgcttgcgtggaggctctaaaatggtgttatcggaagagcataatagtggcatttctgtggaatgtggattatcttattgttggtgatatccaacattttctgtctagatgcaatgttggctcttgcctctttgttcctcgtgaggagaatcaagtggcccatatataagaaaaacttgatattcatgatgataaattgttgttatccattgatgataattctcattgtattattgtccattgggtagatgttgatatggtttcttaatttataaagaacaccctttcagataaaaaaagatgcatgttgatctataaaagcttaaaaagaaactgaggtaatagcaacataccttgatcattggatagtcatctggacatacaacgtagccaccaaccaccattacatacattccaattttccaaggttgaacacgagagtctgcaaggggagagagttggataaggccagtgccatcatcgaggagcaagtgatcgccattgttagagacagagacgagaacaccctgtaaccaagcacgttggaagagaatgccacctatactcattgttttctgtgaaggtgatgagatctcatgtgccttctttagatgctcgcaaaaaacctttagtgctgctaattcataattcatctctctccctatcaaaaaacatataacaaaacataaatgagattcttagaccatacattaaaaaatttaagttcgggctttttgcacatttagagctcgtttagaacgttgtattgggtcttattgtattgtattatatatcatattttatataatactatgttaaactttaatttatactaaaatattatatatttaagtacccataaaagttaattccacatatagttttacataaaaaatattgcataaaatacaattcaatataatactatacaatacaatacagtgtaatagtaccaaacgaatccatagtgtgtcaagtcaaataatagctaatcaaattattgaagtccacggtgtaaagcgcacctgaggatgtgtctttcactacgccaagacttctaaacttttttttttttgctaaggcaagacttctagactttgttacagtctatgattatagtgatgtgacttcttccaaaattaacattaaagcagtcttctaatagttttttttcgcttattttctgttaagatgagatccagctactcctggaaaatacatgtcatattgatagttacagtgatacaaagatcctcttgattatgattagaaagtaatagtaagtttggaactatgatttagacgattagcttttctttatatgctctctagtttgaaaataatctgcacaaaatttcttgaaaaactggacatactaattgaaaaactttggttgaatcatccatagtttcgactatggaatgagacatccaatggaatcacgttattggttttgatgtcacagaccttcataacaagacctaagattttcaaacaagaagttttgtctgtataggtttagtggtgcaaataactttgttcaacgttggaaagaaataaataaataaggctaattaagaattttatcccccgaactttgatatgtaccaaatcatgccccttgaacttttaaagt

SEQ ID NO: 381633 - DNA, 857 bp, Cannabis indica
aatattttactattacaaaatcaaattctgaaagtggtgtagcttagtcagacatgtacaactgccaatgaaatattgtttaaaatgtcacacatgtttgtgtaatttggttcgtatgtcattggtatctagtaatggaattttaatgaagtctctttccaacgaatttattctcaaatactattcagtcaaccaacaaattttgtactttttaagctaattttttttggtaacaagataaaagttaaataacaaaggtaacaaaaattacacaaaaaaataagaggtttcttgcatttaaaaaagttcattgtctatcctaaaagcatgcttagctaatttactaatatataaaatgtacttgcagtttgaaaattggttagtcataaatagcaatatatatcaagtatagacctactaactaaaactatctcaaatgaagtgctaaaataggggtatattttaacattttttaaaaagaattagctttccaagtttgttaaatagtgcaatgtcaaaagttgtggaaaattttgcacaatatataatattgtactaaatttgtacacaataaatgcacattgtttaattatagttttttcattaatcattaatgataaaattttaatacacatttttttaattataatattgttattaattaatttttaaatattttaaattattgatgtcattaatgctattttattttttgttataatttacatcataaaaagttatattgtaacaaatgcatttgttggttttttgttgtttgtcatcaaaagaatggtctaactagtccatttctaaacgaaaaatttgctataacgtattaactggtgcctatttcttag

SEQ ID NO: 381634 - DNA, 1429 bp, Cannabis indica
gatcttaaatagagctgaataaaagaacaattcagatgcatggatcatcttaaccttgtcaaatcaattacatacattgtaaatgaatataaataagcataatttaagtttccaatcgaagaatgagcaaaagggtacgcttaattttcataggaaacccagaaacgtgacaatatgaacaacttagaagtcgtaaatcaagaatccaagcaaccaaatcagcaaaagggcatgcctaaattcattagaaaaaccaaaaacttcacaatttaatgaacctagaattcacatcaagtactcaagcaaccaaatcagcaaaagggtatacataaaatgaaccagaaaaggcaaaaaaagaaagaaagaaagaaagaaaaatcacagcaatgaaaggaacttaccaaccaataaggaatggatgtaacagtttcgctaacagcgagccacaaaacaccatagccaaagaaacaagccaaaccaccaatcaacaaaacaacccacggagctaacttgttgctaacgatgcccggaacgaggccaacgttttcacctatgtcattagcaactccaagcatagtgagctggcgctggttgaaacccagaaccgttttgagtgagtgagagtacaagggaaaggtgtaagcgttccctgaagcaatctgaacccaaacggcagctcctaaaccaacccatggtggtctggtccctcccttcacattcaccattgatgagcacccctgattctaagctcacaactccaagtctgtgtctttactctctagatgattcttttaacaagagaatctttatatataagagatttatagagaatcaaaaaaacgtaactttcacaaaatcatggcatgagaagacaacaaggcatttaaacatttctgatctcgggcagttttgccctctcttttcctagttgccttttagttgttctatttggactaaagtgaagtcacgagatatatacccaaaatatgaatatattattttttttattttttcatttttttcaaatttaaggtttgaattttattcagtcatttttatgtggattgttatacaattcatagttacaattaagttgttctgttagttacatatgaatttttatgtaaaattctgtaaaaatatataaagtataattaaagccttaatattttttttttataattataaagtatatttttttttttttttagtaaaataaagtatatttcttaagtacacattgttgttatctataaatttaactaaaaaaacttaaaaataattaaaggtcccgaaacttaaagtttaaataagtttgttgtcttttattttattacagtttaaagttaattttgtgtattaaaaaaataatgaatttataaaatttaagtactatatataaaataaagactaattaatctaaataatc

SEQ ID NO: 381635 - DNA, 1358 bp, Cannabis indica
aaaaattatatattattatttactttgtctcccaatatttctgattcgaatcctataacgtttcatgttgttcatcttaaaaagttagatgtgaaaatcttattaatcgccatataatttgttaaatgactaattagcatgcagtaagataaactttaagtggccgaataaccttaaagaaagaaaatagaggaaacagaaaatatattttgggatttttaataacagaaaatgctaatttggttcattgaaatttgactttataaggtttatatgaatatgattaatatttttattttgcgaaaatgaattttaattaaattagtttgtatataaaatgcacgtttggtatgagaaaaggtataaaattgctctgttaataaagcgaagaagaaaaaataaaataaaacattattctccattagaacatgatatggtatatgttatcttaatttgtttataaataaggtggtaattaatatgtataccgattaaagaagccacataagttttttttttcattgttcatagccaccattataaaaatttgtgactaaaagtattaatcacaaaaatcacatttgttgtgactatatatatttttagtcacaacaagtattgtaactaaaattaaattagtgacaacttgtatttaaacattatgttttagttacaagtaattttttgttatgactaaaaatcacatttaatcacaaaaaaaaatcatattgtgactaaaaggttatcactaaaattatatttttttggtagtgacaacattttgtcaattaaatgatcataatatacgaaccaaattattatatagtgttcacaaattatgataataaacaatttgactcttactaaaaatacatttcttttccttttttttttcctcattaaagaaagagaaatgagaaataattaatatgtactgctggaaataaaaaagaaaacgtggagagaaaataattataattttaatttgctttttcaaattagtcggttggtttttttgaacaatatatattgtagagattgggtttgggttattatgacaagactataggattagatctgaatatagaaaaaggttagatgcagaaagccatttgtattttcccttttacatatttgatcccatttgagaaaaagagtgataattttcaagacttcaggtgggattgtccccttagaagttggttagtcttatcataagtcatcacttccaagtatcacccaaacctatctctaaatttgtcaaattacttacttttcatcaacaaaaattactgtaaaattgttacttagacaattttttattatttaagttattttcgactttttttttttttttt

SEQ ID NO: 381636 - DNA, 3310 bp, Cannabis indica
gtagaatttcaagtcttagtacatcctaatagtactagctttgtaacgatttaaggagtgatgtaagttctcctaaagtctctcttatgagctcacactatccgagacacaaacttgagtttattaacgaaacatcctgtgatctgacactaagaattatctgatttggcaagcttaaaacttctttttgagttttcactaagttgtatccacaaattgagcacttctatttttgtctaataaatctagttaaagtgctaacttactgagtttacccaagcaaactctaaacttaacctgaccatgataatcgttaactgaggagaaatcatgattatactgaaaacccgcctgagacattttctacctcgggttccatctgctagattggtcttccctgggtaattatttttttccccttcatagagatagttttgtcaaaacctaaaagtgaaatcaccaccacaagttttaggtggtaaattggttaacgttacttatgctccttcaattgacaagaagaataagcgataaccccaacattttccattataatgcactctagatcctaactgggtgtctcacaatgcaccctgagtttccttgatatgatgcctaagctaacactgagatcgtaatcaattattgcttcagctttcaaatctaatttcatatttgtttggctatacaaacaatcatttcttcttgattaacccttggtgactattcttggccttagccaatctttatcggataattcttttttagataatatgtgatcccatgtttaccaataatgtgccttagaaaggcactcgataactaaaattcatagttcttattttgatatacacagtctatacttcaatggtcgctagaaaaccatctatagatgttactcatactttgcttctgcttgaaaatacacaatgttatcatcgatatttactatagcacatccatcgagaaaatctatgagtactctgaacaccaaatccttaagagctaccaaagcattggttagtctccaaagacataaccagagattcataatgaccatatataatatgatagttctaatctaatgatagcccgagtgtggatcagtctatctttctttaaagtcaatcaaaccaaccgtcgatcctaagtagagggtacttattcttttttattaacctatttaattcttgataacaaatgcacatatgaaatgagccatactttttcttaacgaacaacactggaactttctagggcgatacacagggtcgagtaaactctaaatcaagcatctcctaaaatcataactttaattccttaaattttgttggagttactttgaagggtgccctagaacccacctatactccaatagctaaagtaataataaagtctatctttattatagtggtaatcctaaaagctcttctagaattacgatcaagaacacttgtaccactctaatatccataggtcaaaatacctcagctaggtggtatctaataccatcgttagaaattctatacatccatgccacaaaaggtctctaaattttatcatcatgatactaggagtttgagtacttcagtccaatatcgtaacacaaatgatccttcttcttcagttaatagttaccatcttccacttacaaacaatactagcgatgtactcatacaaaaaatccattttaagtaatatcttaaactctactataccgaaagctacgagatcagtgttcaacttctattcttaactctaattggtatagacctttggagataactaattctctgccaggtaacagggttctaaaccctatttcatatctatctcaaggccacccaatttatcaattatccaaactaccacatattaatgtgtagctccaaaattaattaacatagagtaattagagtagttgactagaaactgacctaacacccctgaaggactatcttcagtattgattcgggtaatgacaaacacccaaacttggagtgggttttgcctcttattctggttccgtcttctgcagttgtgggcagtttctcttatagtgccctaccaaactacattagaaatatgtcttacgattacactcttatggatgattcttcttgcatcgagggcattctagataagtatatgacctccaaggtcaccctaaccaggttttctatgaaacctcttatgctgactcaagcccactgatggagttttcctcttttgactattcaaggaactagtaccacctctgacaagattggaagcaagagaagtagtatccctatcaacaataaaagttcctcgagattcctaagcaagctctgtactgctcgcggtttgaggggtattcatcatatctttatgtcccaaagtaaccaaaggtttttgcattcgataatttccatacaagggtcctttttgggtaccaaccctaaactgttctatcgacaactctagaattaaagtgacgatacttgaggtgatgacatagcagagatccatgttgtttcaatctcttaatctcctcctctaactgttgaatcttaacttccatctctgcgaatatttgctccaattttagcggagcctgcagtggattttcataaccacttccataagtcctttctcggcctgaacttcgaccttgggaactagggggatcctaatctctccattcaccataagtgccaactaaatcatcccaactcctcctatttcgctaggcatccatttaaaggacaagcctacaaattcatgagttcgctagattaggaagcaattgaaattgtagtctacttatcgtaaacatgggaacttagtacttatacctattcaactattaatttgctaacatgctccctatcatgccttttctaatcacgcatatcagctaaaattactaaaacatgtagaaccttactgaaccgagagtcaagcttatccttgatgatgattgtacatatcttgacaatcttcggagaacaacctagcggctctgaaaccaaattgtaacaccctactaaattagaggtgttcataattgttgtgcacacctttgctaatcagagagtttattgaaacacatggataattaaaattttcttaaataactcaaactttaaaaataaatataatttatctaagtgttggatcccgttaaaattttcataagtttacaaagcacttgtgttacaaaagttgtcttttatatgattactaaaacggtgagcctaaactatcttgaagaccctaaacgctccaggtctaaccgtcttgatatgtacaatcttcaccctagctt

SEQ ID NO: 381637 - DNA, 2169 bp, Cannabis indica
aaaaaaaaaaaaaaaaaagccctcacttgtgcaatatataaattcataaataaacgccttataaaattataagctctttttaataccaacaaaagataaaaatgaactattttagaagacttgctataaaagaatgctaagggacaccttacaatgtcaaacaccacaagatgtgatatatcgttattaatgcaaattaatatcggtaaaaaaattaatttaataaataatataagaaactactaactaatcacaatgcgtcccatcggtatagtgttgagcactatatagtacctaatatcaatgttctttactaaccatacgtgttatgtgatgtagtgatagagaattctttattggcatatttcttccttacctaagtcaagggttcgaatctcatcacgctttttattaaaaaggattatgcttagccctatagctgacacgtgatccacacgtggtaattcttaatgagataaaaactatcgtgatgtatcataaaatacataacgataacttaataaaggtaaaatgagatataagatttctataactaatttttgaaatggtcaaaaactattgaagaaaaaacgaggaaggaatctacaccacattttttttttttcaagcaaaaaagaaaaacaaaaaagaaaacataaatatataaaggggtttgtgggggcaaaatggtcaaacggtgtaattgatgatctagcattgcattgcattgcacctaccgccaccaaagcatgtcaatcaaatcgaatcacaccgcccccgaattgtgttcacacttgcccccttttaacttctcatcatttctttatttatttattttatttatcccaattttattttttattattatttttttaaatttttattgacactttttctctttctctattcacaaaaagtcaacaattgtttggccatcttcaattttgtgttcacaccacttttccaatgtagttgactcatcatcattctttctatttatctcattttgatttgacccattaattgtgataatatttcttcccattaaaaaaaaattacattttttatgtttttgggatttattaatgggaaaataaatttcaatttatttataataaagaaggaatttaccccaaacaacaatgggaatttaattgaagtgactacaatccaaagtaaatttaatgttttttgaaaaatgttacattatattaaatatgaatactgactaaaattaaatagctcctaataatgagcactagattttttttttcttctatataaaaaagggcttttcataaatatcctacttttatattaatttttatttttatcacaattagtatatttgtatatatcacatttttttaatttagaaattaaccataaaaaacttcaacaaaaattactaatacaataactaaagtgaactatagactatttatcaaatatatttttacattttaaagtaactttttatatatttttattaaaatttatataacaacccacataaaaattactgaatcaactaccaaaataatcaaaactgtaaattaaaaaaaattacaaaataatatataaaataactttccttcttaataattaataaattagacaaaatatttattgttaattcctttctttttctcaattgttaaataacaaacaaaaaaattaagggagtaatcatgcttttttttttccccaaataataagttaaaattaataataaaacaatataaagtttgacttaagtgtagatacccccaaatttccccaatttcttatatatattaaataaataaataaaagaatgcaaattagtacacgcatacaatagaagcaacctccctaatattttttattggagaaatctcacattttaattttatacatttcacttttagaaaaatttattttataatgcatatatttttatctactttagtatttaaaataatttgtaagttaaatttttttcatgataatgtaaattatagttatttaaactatttgtaaaattttaagaaattcaaaaaaatttaacacgctgaaaactacattcaaacaatgtgtagtacgcatgattattttactttatacacgtgtaaaataaacagtttgaatattattttttatattgtaaattattttaaatttcttaaa

SEQ ID NO: 381638 - DNA, 1721 bp, Cannabis indica
atttaaaattattaagttgtcatcaaactattgaattgtaatgtatagtaaaaaatttattaatcctttttttttctataataattttttattatttagttttataataataaatgttatattagagttatacaatagctcctacaagaaaaaataataacaaataaagaagaaaaaaaaattattgtaaattaaaaattcagcgtcattattgaaattaagattgtaaaaaaggttgttgatgtaaattactatcttatttttgaatatattgaataatagttattaaaattaaaacattcaaatattaattacaccaattaacacctcttaataatggtagacaataaattaagaatcaatgttaaccaatccgagggtagctccaactccatcactctactagtagtactacctaactaacctaacttgaatattaccattttgcccctatacaattttcacgtacatatgacatgcatatgctaagaaggagggtatataagtccaactttacgcaaaaatcactcctttgggttccgtcgtcaaagatgtacgaacactcttcggagtttccaaagtcccaatatataaaaaccaacgtaaacacgaaaaggaacagttcaatttcttatctgggttttctaaaaactctgcctttttctttgtacaaagcccacaacaatcttcggaactatatatcccatggctgccattgctggatcaaacgttgtagtttccaaatcaaccagaatttccagctcattctttgaccggaaagccccacattttcggcagtggtcccccatttccggtggccaatcactccgccactccatctcccttcagtgcaaatccaagagttcctccggtggtacgattacttgtttttcttaatgggtttgggatttcgatgatggtagttcctcttcttcttcttcttcttcaggtgttgttaaagctcagggagcaagtcttgaagaaacaagcgccggagtaggccaaaatgtggaggctccggtggtcattgtgactggtgcctctagaggtattggaaaagctactgcattggctttgggaaaagctggttgtaaggtttgtggttttccccttttaccaattcattgagatgatatttgtttttttttttattagcaatattgatgatctttgttgtgtgtaatttgttttttctttttctgatatagtgctatactattactataggtccttgttaattatgctagatcatcaaaggaggctgaggaagtttccaaagaggtgagttccatcaagttctattcatgtttgtgttatccctttcaatataaaatataaatatatatatactgtgcttcgcggttcgcggcgggcggatgtataaagtattttaaattatatataaaaaataaattgtatattttacttaaaaataattacttattaaaattatattaaaattttgaatttactattaaaaaatttgtgaccttaaaatattaaatttgttgctaataaatatcgaaatttgaaaaatagtagcataaattttcatttatggtttaatttttattctaatatgtgtgtttttaatgttttagttttagtgttttactggggttctaatatttgagtttgtgtttatgagatatgtttttatttatttatgtatttatttttataaattttgaaaacttgaaacttgatgttgtttctattaa

SEQ ID NO: 381639 - DNA, 3079 bp, Cannabis indica
caatgatgttttatggccaaaaagaataagaagaagcaatgcaagcctcaccttgcccccaggaaggcctccttttccaagcacacgaacagggggacaatccgtaccatgaaaacaatcaacatctgcaccaagctgcttaagaccagtcaccaaatctccaataggtcgttctctcattcgaggaacaccatcaagtacgtagctgagatatagaagttaagagattactgagaaaatgtgataacagcatacgaaataatttatgatatgtgctaattcatttccaacatgtaatttctagcataaccacatctatgaaacacaatcctaaagcattacctacatcaaagtaaagagggaagtataaatggtggttattgttagcaaaagtgactttctttactcaaaatgtaagagttactcggcgagtaaagaaaaacaagagcataaattcactgcattagaggtactttattttcaaaagcaattgcaatgaagacaaacctagcatttccaccagcaacagtcaccgcagctgtgagtggacgcattgctgttccagcatttccaaggaaaagttgaacttcgtcaacagattctttacctgcaggaaactgacccccacaaccttccacaattgctcgcttgctttccttgtccgcttcaacacgaagaccaagggtttccaaggcaccaagcatgtagtgaatgtcatcactatctaacaagttgtccacaacagttgtcccctgaataatcataacaaaaaaaacagttacttcccaccgctcaaaatattttatagggcaaaaaactcaagtacatgaaaataacatgaactgtaacgataagtagtagcgccaaaatatggggaggaaatagagaaagagtatatggagaatgaacagctacaaattctagatgactcaaacactaatagtacaactttattctaaatcccacattctaaaatttagggagttcaggtgagacaatgcatcaacggaacacctcatatataatgtaacagaagcgtagagttatgaaattctcataaataattaacaaaataaactgtaaggactccgaatctctccgcagagtggagctctagactaaagttgtaaaagcacaaatgagaccagaaatataacttcagtaatccagttgagttgcattttttatttccatcgtattcttacgaatttaaccaaaatatcatattactttactccatttctctcaattttcctcccaattaagggcatgagttcagcttaaatgaacactactcatttacaccaataaagtaaaaatgctaagcattactctccattttcttgaaaaaaaaaaacattccatcgctacaaactcttaacataaaactaaaagaaaattgctcataaaaagcacaatctttgtatacctcaaaaatacttttcaaatttgtggataacaaaggaagaattccatgcaattacatggtttaccagttgggcagtcgatgctgatcatggttcagatcttgctaatgtaactaactacagtttccagccacacaatccattggaactaattttagtgggaatgagggaaattacaaggaatatgaaagcagttgacaaaataattacgatatagtattttatagctgtggagcttgagataggaaagtagagtatggcatagcatgacatgatttgagagcttagcctagttttggttcattttcgtattgatgttccatatttttactctcttatctttgtatatacagaaaacttcctcgacaaaaataaatgtttgaagttttaaaaaattgaaatatacctcagaaagagcagccaggagcagaatccgattggatagtgacttggaacccggcaacttgacagtgccagagatatctttaatgggctgcaacacaatctccggtacctttgaaggcttctccgctgtgacagctgaagccatgactggaccagccatagctttaccaaccgtagaacaaccccaaattcagttccaatcttcaaactcaaagagttagatgaacccaaaaacggtgatctcaacgaaactgaatttagggatcttggtgtatgagacttagaaatatttgggagagtaaggatagtttgagctccattgctacagattttgctcacttgggccatttttttttctttctctctctctctgaaacccaaagcttctctgattctctctatacaaataaaggttggatttttggtggcaatggtaacgttaatggatgctgttgtaggtcgacattgactctctttcaattttcaaagagggtaggagggcttaccaaccatccaagcccaaaatcgtctctttcaccaagaaatttgggccaaaatgttgaatttccaaaacttagtcaccttaatttaatatccaaaaagttgagggacccatttgaccggtagtagttggtggtctttgatgcaagtctgtgcttgtacgttgtgctaacaatgtagtactctacagtagtttgggggtataaaagaaaagaaaagttgatcttggggttttttggaaaaaagtgatgagtccaattctctcaccaacccattacaatttagtttagtggggtcgaagccaccaaagggggtaggtaggtctaatacacttgcactgcatttgcaattttaataggcattcttatttcttaaagtgtgttattattaaataaaataaattatttcacaattaataatggtctgcaattacattgtacaatctattcaagtttattattatctacataatttagtggtggcttttaagtgtgtgccggggtgtaacacaatcaagaccacttgtgttattcatgttcacctaatcatttatcatctaatatatatattttttggaactttataatattagtatacttaaatttagtatctgcacatttctattaagcaaaaccattaagtggatggtacatgtttagcaatattatattgatatgttaaattaaattatataaaactcagtatcacacttcacatttaaataattaaactactttttagcattt

SEQ ID NO: 381640 - DNA, 2238 bp, Cannabis indica
actagaaaaaaaaatacaaaacttagcagattacaatgtcaatttttactaacaagaaaatttataaagaagattacaagactccatattgatatgatatcaagtaggaaagttgatacttatttgagagttggaacacagtactgatgttatgacatgaagcattacacgtactgatgttacactaagcaaaaatcagcatcttattagattgctgtcagacatgatttccttagtcattaatgaaacgtattgacatgtggagttgttatggaccatctaagtataaggtggttatgatatgtacatcatcacaataatacagcagcctcatattaacaaatggctgttatattttctcaatccatgggcatgtgggcttgtccatggatttgtagctctaaattttaatggacaaaatgtcatggaaaagagaaaaaaaagatatagaataaatgcttgtaatttttttaaaaaataatattaaaaaaactgatataaagaattacacttattatatttatatttatatataaagataaaaaattagtatgagaaaaaaataaaagagagaagagaaaaaaatgaaaaagagatgaaaataaaagtcagtgttatgtgtttggggtgtgtcaaagtggttcacccaataatagttaacaaagcaccaatccaagtgttctttaatcgtatccacacctaaccaatttttaatccatgtgaaagggtccccttcgcatggggtttcatgaagcgagcaatgatctagagcctttcaaaagccttccatttgttgctcatttctaaggcagccacctgatttgttattgttagaaaggatttcattaaaatctccaattgctagcaatggttgaaggggagaaacatcagcaaaccattttaaaagtgtccaacaatcagctctgttttgaccatttggggcaccatataagtctgtaaaatgaaagctagcttcaccatctgccatcacaacaataaaaaaagttatgtccatagttaagaagagtaacatcaacactatcatgccagagaagcattatgccaccgcttgagaccaatttggggtgattcaagaccattattgagattaagggactgtcaaaaataggaaattgagttaacaggaagtttcgttttcataagaaacaaaacatgggttgattattatttgacaagcaattgaagatgtctaaatcactcgggttccccaaaccccgtgcattctaactcaagatttttatgatgagtcgtgggattgcaaagcaatcttcgtggagttttcaacaaagccatctcaatccatgtcctcataggaaacaaaatgacttaaaccttctccttgtgacatgggagaagcatcaatggtggagtgttgattacgacaccgtttaaggaatcgtctcattgttagagacttgttgtctctttggtaagttggagggtgggacattttccttatccattgatagtgtaaaaacttgtgtagttgtgatcaaaggggtaattgttagtaaggtgtcttggtggaaatattgtttgagatatttattgctgtcggggttggaggataggtggctatagggaaaataggacttgttgctgtcccaatttctggtgtgaaaatgttagaaaggttagtggttggtgattggctattgtcgtggccaatggttctgttctagtgtaaagttgtagtgcaatggcttgttaaagaggagggaagagtggaaggcttgttttgtgaaattgttgggtgagaattggtgtccaaagtgtgtattgcagatcgtggaggtgcaatttgagaagggggaaccagggtcaaagatggctctcccctaagcaagactttaggctgtggttgggcagcagtgtgtaaacggggtatagttgaattaagagtggttcgtgcaaggcgtatcaatagaggctaagcatttcttttagtaaaactagttatatacttgtcgtatcccgtagtaggtagtttggcttctttcatccaaggtctatataaaaagtcaagtgtcattacccatatccatgtgctccatgaatctaatacatttagggtgcgtttggaagtaactgtgtaattactaggtagagtaattactagggtggtaattacacagtgtagtaattacactatattttaaaatgcaaggtatgtttggatatgatgtggtaattacatatgaattcctaatatcttgt

SEQ ID NO: 381641 - DNA, 2539 bp, Cannabis indica
ttcaatttccagacccaatgttgatggtttaatacaattttattgtttagtgtgccaatcaaccttctattgtttagatttgaacttagaacctcttagttgttagttgttaagctaataaaactatcagtaggctatagcacatatttagtaattaagagtattattatttattttattactaattatattttattttattttaatttttttttttgaaataggagcctgagcggtggggggcctaaggcggccgcctccttcgtctcaccttagggctggccctaagaccgagtgatatttttaggcagtcttaagttcttttgtctaaatttttagaataacttaatcttatacaagttgttttattttaaagcgatttgtatactgactttgtattaattttagttaagcaattgacttgttaattgaaagtctctcagcgtgacattttgttctattgtaattcacattactctataaaaaaagataataataaaaaaaaaacttcaccacaatattccttagtggtaattttggtgcaccactcaatactattactcatcatgctaagaaaaaggggataaacttttaaatttctctcatctttttcttagaccccacttgaaatttgacaaacaaaacaaattaattgttataataaacttttcttaatcttcatatataaattttcattattttgttcttaagtaattagctggtttccatattaagtatagcaaaatatatagggcttgtcaataggactagtaacattttatttatttttcttatttaagtacatgagaatttatcataacaattccaaagattgaaatttaacttatatatatccttatataataataattaaaaataaataaaagaggaggaaactcacataaagtccaaacatatacatataaatatttatttatttacttattttacttaaaaatgttcattgtgtaaagaaatgggcatagtaagaaaaaatgttaaaagcaattaaagatacatgtacttatttcttcaaatgttggaacaaaactattaagttctttattcatgattagaaattgagaaagcttaaaatgtttatttgtaattgtcatattcatttattgctagcaaaaatcatgttgtgtgttctattgggtacaatagtattattaatgttcattgggtacaaatacaataatattaattaattggacttttactaattataacaaaaatattagggcaaatatttatgtaaactctttttcttttatactaataaaagttagaaatatacaaatctgccaacctgattaaacagtagtgctttagcaaaatgaatttggatctaaagtttggtggtgggtctgcatatataaaagatatatatataatatatgtatatacacacatatagaggaagctcaaagaaacataaatttatagtaaaaaaaaaaaggcttggttggaaagtcaaaaccaccataaagaataaagaagaagcttattgagcatgtttgtccccaaggaaatattttgggttgattcagtgtggtccaaaataatcaatctatatgtatatatagtttttgtgtgtccaaatcttatacaattaattgattaaatttcattcaaattcaagattgggtttttagggggtcctccaatctccataattaagaggcatatttacttaaatgccatatatattacatcatgtttatttatatgttatattattgttttgacatgtgtattatataggttaattaattatttttttttatttcttcaatattagaattgaattatatttttaaaattttcaagttgttaaaaaaaaaaatttgaatagttgagattattagatttatttaacggaaatatgatgtgaataaaaatttaaaagacacgatttgatacatgtcagggtgtacgatttgatacaaaatagttattatgttagaaaatttgaacgaaattggatagaattcttcaaatcagataattttaatagtttttctttttttttttttgtgagaaataattttaatagttcgatatgaaaattttatacaatctaaaaaatttgaggacataatttaatacatatcaaaatttagaccaacaaaaaataattaacctattatatataggggcatgtgaacttattgtacatatatttttgagaaaaaaaataatatatatatgtgggtgtgaaaaatggattagttagatattctacagctgaaaattctgactaatgagcaccacaatggatttaacgtggttgactaaaagaagagacaaaatttaccactaacatatagttgttaaaaatatatatatatatatatataatatataaatattataaaccctaattccccaaaaaaccacattatgcatatctttatggttagattaggagttcacatcaagctgttacagaatgaacaagtttgaactaaagagagtgtagagaattggaaaaaaggctaaatcaaatacagtcttaattagtgtaacggtcatc

SEQ ID NO: 381642 - DNA, 777 bp, Cannabis indica
caataccaaacatgctctatatatttactgactctatttttgaaaccttatgaacaatcaaaacattctttttttttccttcttcaatcagcataaatcataatatttttttccaaaagttactaatgtgtaaattatagtaaacaacaaccaaaacctacaaattctaactaatactaaaaaaaaaatagaaaacattgtcgaaaaatagcaaggtggatatcaaccttatggtttctgtcctttagtttttcttatttaaatttaaattgagtataattattaggcactattaatattcaataccatcatgagatgatacattgcaaatgatcaataatttttcatactaattattaaattaaaatgtataagattggatacttaattatataattatataaataataatatgacataagttatgataaaattttgcataatgtttaaaatatctaatctatctcacatttttatatagcataatattgtaaaatatatttgcactaagaaaatgaatgtgctttgtgttttgtagcttggataggaatctaagtagtattttcttttaaagggaatccatgtgtatttatatctttatatattaaaagtgcctatttaacggcaattcttagtttaacgattatttttaacggagctttttttttaataaaaacatacggaacattaacaggacgttaaccatctctccctgctcctcgtttgtttgttagtttcaaaatccaaactaatttgttgagttttgcgattttttgg

SEQ ID NO: 381643 - DNA, 2226 bp, Cannabis indica
ctataactaaaactaaaaaaaaaaaaaaaaaagaaaaaaacattatatttacctgatcatagaataatcaatcaaatttgatttgcacgattcaatttatttcaattcgtaaagtgcgaatatttatatttatgtgtagattgaatttgaaaaaatctaagatccatatacggattagatattgattcacatataaaagtaaccgaactaattcaatcaacacattcatatattttaaaacatactagtaatttaaaattcaatacatacgatacaaattaatatattttagaatttaatatatcaaatgtatatttgatacttataatttaaaaaaaaatataatctaaaataaaatgaaatatttttttttacatataattttttttcattaaatttattatttgttgtatatcttattttaatttgttgttgaaaatatataaaacaaacatatatttattttattttgttgtaaattatgtgaaaaaaatatatatttaataaatattaaacaattcaatactagaaagtaataaatttaaaataactgatcaaattttccaatctacactattttaaattagattaaacccaaaatacaaaattcacactttgcgaaattataagtaaagtagtgtatattagattagaaggacactcctatacgattttgttgcagccgtactttattttttggcactcaagtgtcaacttagaaacacgtaacgatatattattagactagacgtattaaattagttaaataaatatgttgtatcatgtttctgagcatgcacttaatggacttaattaacacttagtcaaaatgcctgcaacaaaattataagataaagtacttttattgttactttttatgattagtcatatgtgtaacaattataaatattaaaggaattttgccacaaatattctctacaaataatcctaattacaaagataaggtcaccgccactctttgttagatggttagtgagagtacgtaattagttcccatatagaattagttgattattttaaacccagaaacaaacacattataatttccaataacggatgtctcatatatttttttcccttgtaataataatgttaagaaactatatgcaaacaatttcatggttgatttaaatcaacacaatattaacatggttgcatgtacaaaaagggataaaatattatgtatatgtacatatttccaaataaatgtactgcaagtaaataaatatatagtaaatagtagttgaaagtgttgagtaacgagtactaaagaaagttttgaaggaaaagagatatagaagtaataataataataataatttgtagaaagtaagcctagaatcgttttgttccccaaatgtgttacagctcaggccaaactaggaaaaattaggcaacttttttgaacagtacaactttactctgataggaactaaaaatggctagctaccactactactaatactagtactagtacactactatatagtatactactattgactatatctatataataataggaattaattagttattggttgtaggtttagattattggttgtctcaatcaaataaatatataaatattaattttagggttttttagattccaaatgcaggaaccatgtttcttactcgaagtggaatgccctatactttccttttcattacacatatataatttatatatttttgtgtgcaatccaaattaagcttgggatatacaaaaattaattattaaaatattatttgttattttaataataattactattgacgagacagttttgctcacaaataccatgacatatatagataatttttgtatttcatgcaaatttctctgcaatataatgcttcgttatatcatatcatatcatatatttaagttttgttttttcaaagcatagcatatattaacgtgtatatattatataaatttcactagacattaaaaagaataagtaggcaggacgattattcttgattaagacagctaacaaaatattactattacgtacttttttttttcatataaaatcaaacttagtaaaacgctaacaaaactactcataattaatccatgcctattattattatattaggtgatttttacgtgccaagccacgtagtgttagttttatttaatattttagttttttattttaattaataattaaaatagtataattatttgaacga

SEQ ID NO: 381644 - DNA, 3230 bp, Cannabis indica
taatgtagccccctcagctatagcataatgcaattgtgagacatactttatgttgatacaaatatgtggttttttgttttgtaattccataacttcagattgtgactaaacaaagccggagttaacttaaatctccataacaaagatgggcctggtggttcaagaaacttgggatcactcactgtccatgcagaggaatcaattgcttcacgaagtgttgttgatgttgtatttcgttgtaccaacttggataacaaagacctcttttctaaaagtgtatgtctgtataacagcttgattgagaattgtttttcttccttttgttggtacgatgtctccattagttttcagttgttttgttcacctttaatatcttatgtctactttaggatccattcttaagaatttccagaattgttgagagtggaggctccgttccaatttgcaagacagaagtaatggacaataacttaaaccccatctggaaaccattatcattaaatatgcaacaatttggaagcaaggtaagctgtcaactcattattctgagctaaaacatttagtgttaattattattattattattattattattattattattattattattatttcttgtgattattgactgacgacatgctctgaattgatacaggataacccattgattatcgagtgttttgattttaatagcaacgggaatcacgtactcattgggtaattaattatatttatcatcccatcttatggagtttataatttgattaattgttatggttttaatgcatggagaaaggaaacagaaaaagaaagagatttgatgtttaagttcaattctccaggaaactccaaaagtcagtggcacaattggaaaaactttaccaagaaagaactggtgtaaacttcgtcttgacatccaacagtggtcatgaaaaggtgatttttcatgccatcattatacttgaagttttcttattacttcttttgttttttagtaattgaactcaataatctatttacataggtactgaagggtcagctgtttgtggaccgatttcatgagaaggagcagttcagctttcttgattacatttctagtggatttgagctcaactttatggttgctgttgattttacaggttataaattctattaacattttctctaaatgtttaagcacttaaaggagttcatatatgtagataatattatgaaggacgggtcttctcttttctagtctaatcatattgactaggaaagtatggtctaaagacgataacaattatttgttttccagcttcaaataagaatccccgacagcctgattctctgcactacattgatcctagtggccggttaaattcttaccagcgagtatgcctttcttgtagttgtgtattatggtttctaacaaatgaaaagttgtgagaataaacatttattgattagagtaccgaataaactcattgcaggcaataatagaggtcggagaagttattcagttttatgatactgataagcgctttcctgcctggggatttggagggaggaaaccagatggtaccgtatctcactgttttaacttgagtggaaatgaaacggagtttgaggtaataagaaataaaccattgccgtttgtttcatctctgcttaaactgtcatatgtttataatttaatgttttaaattacaggttggaggaattgaaggtatcatgactgcctatgccagtgctttgcgcaacgtttctctttcaggacccactttgtttggccaagttgtcgacagggccgcgcaaattgccggccattctctctcatatcaagaaaacaaatactatgtcttgctcattataacggtaaaacaagagcatagtttctgaatatctatgaaatatctttgttcttgtttgctaaatgtgttgttactaggatggagtcctttcagaccttcaagaaactaaaaacgcattggtgaaggcatcagatcttcctctttcggttcttatagttggggttggagatgcagatttttcacaaatggaggtacttaattaagtttgtatgatatagatcttaattaagttgatctagtaatggagttggtattaattgaatttggcagattcttgatgctgataatggaaatcggttggaaagtagcacaggtcgtatggctacacgagacattgtacagtttgttcccatgcgagaagttcaaagtgagtttcataaatgattaatacactaaaactaagataatagtaaactaaagataagatttatagtgtaacaaagtcaaataataatgtgaataagtgttatgattgaatgaataggaggagaagtgtcagttgttcaagcccttttggaagagctgcctgggcagtttttgagttacgttcgtagtagagatatcaagccctgcaacttacctggagcccacgcttctctctctaagtctaactagttcttacttcttttcatcgatttccaactgtacagtgtacagatatatacgtacataaaacgtatgtatatattacaattacttgcaataaatttggtcgatttatttaggaaaatgacaaaaaaatttactttttcacccaacaacgattcttttacaaaaatatagtgttgttctttttggtgttttcacattgttggaaaaaataaaaacaacattttttttttctgaaaataaaaaacaagtgtaaaacctataaaaaaaaaacagaattcgaaaaaaaaaaatctaattttaagtgctctatttataaggacataaaaggaagagagaaaatgaatgtcatttgaataattttgttattaggagttctatcacataaataaatggaatttttacacacggcttaaattgacatttttattatcaaaatgctattacatgggatttttaatttttatgcaattttatttatatatttttattattttaaagttttataattataaatatatggtcatttcatttctttattttttttttctacaaaattttcactttatttacactcttaagccatgatggcaattagctcttgcctcccgttgttgcttgcctcttggcccctgctaacgtagacctcgtcccaaaccctctgtcatcgtgtagattacatccacagacactattgttcagaaataagacctctactaaaattcctagagagcttttttctttgagagaaataagaggaataca

SEQ ID NO: 381645 - DNA, 4261 bp, Cannabis indica
cctgctaccccaaagatcaaacacttcatgtctaccgccccaatatgtacaatcttcatctgtcacactcactgctactgagccttagctttgtcgttccctacacatgtacacaataattgtgagtcaacagactcagtaagaaatgcataatcataacataacacaaactagatcattagtaggcatccatacacccaattataatcctatcatgcatcccacgcatactgagtcttgaacgttcgtaggatagtactatttaccataatattagcctatagtcggtactctaagcgtaccaatgtgacagcatcaatcagtacttatgccaaacatatatcctttgatatccagtgtaactctatgtacattatcaccgccattactgatatattaactaacaggcattcataaatatgcacactaaacatgtaatcacacatgatattattatactaatcttaccttaattctaaatttaggcgtgtcagtcaacttgagtgaaaattgttgctcgatggtttacaggcccctagccactcagtacttttcctcttagtgtaatctgtaggtactatacctgaggctaatttggccagtcgctcaaacctggtcgtatactccatcactgacattgattctcttgaccattttgcaactctccattttgcactaaagcaatctatatatacttggagttaaatagatcctagaattcatcccaggtcatacaagtgacattccatgtgagcgacattaactcccagcatactaggtcatcttcctggaactaaaatatggcacaggccactctgtcatcaccgcttactctgataaaattcagtatttggttcataatggttaaccattactttactttcatacatcagggtctcccagaaagaccagaggtctctatttccaaaactgctcttacagtggtacaaacctgttacaagctacaagatattttgctcgcaacattgatactggagtaataccaatttgaggaagaggagaaacatgagggccttgttgccttagcctaacaatcaccttatcttgttgttgtattcttgcctgcaactcaccaagcctttgctcccactcttgtggagcttgtgggggattaacatgatccacaccacgagcccatccactggctctaccttggccttggagatgagggggatcctggtggccttgaccgccaccaattctgaccacattaccccgacttcgtacattatgttgggtatccatatggtactagcatgaaaacccataagacaatttaatcaagcaatgatcaacataataacctttggaccacatacataggatcttagacacacacatagttaatgaatatatcactaacatgtttctatcatacttttctaattataataagctactaaaacgtgtaaaagcttactgaacaatgagtcaagcttatctctgatcatgattgtacatatcttgacggtgtttagtagataacctagcaactttgataccaaaattgtaacagcctactaacttaggcatgctacagtacttttctcagtcactgtgaaacctttgctaatcaaagattttaataaaaacgtgatttaatttaaaaaataaattgctctacatttataaattttgggatatcgtatctatattttttcaactgtacataatcaaaagatgtcgcatagtgactacaaaattatgagtcttagctgtcccaaagatccaacactccaggttcaactgtctcgatatgtagactcattatctagctccaaactcacttttgttcaacaacagatttgcctttacctacacaaaacataacatttgtgagtcgatcaagaaaaaaaaaaagaataaaacataatatataattgacctgcggctaagggcccatacacctatcaataagtcataagccattttaaacacgtataagtgtgtctcaaacgttcttgaccgtagtaaaattgatcatcaattcatattataagtataactagccataataccacatgtactcagtactctggcatactagtgttggtagcactagttcatacattcaaaagtataaccaaccataataccacatgcacttagtaatttggcatactagtgttggtagcattggtccatactttccaaatttcgaaacacatatatttacggtatcaagatgccatcatatatataccaactatcattctaatttatatgtcatacatatggcaaaataaacatgtacatatgtatgtgtgttatactagtctgacctcaattttaatttcaagagtgtcggtcaacctgagtggaaatagttactggtaatcggaggccccaagtcacaattctataaaaataaaaaagtgttaccctaacactttcgaggacttaaattcaaaactaaaagttttcctgctatacgtagcatggaaataccctaagtatcgagaaaaaactcgattggagtcttcaaaaaagtctcaaaacagacagtttgttttaaaaatagacccccaaattctacctaaattatacggtccgaaactccactgcccaattttaaaacttgcataactcattcaattctaagcaaaaacttaccaaattttttagggtacctaaaacatcataatgaacatttttcatcaagaaacttcaactaaattctcaacagaaatcaaattaggtcgtcctaatgccaagatcaatcatggtatgaaaattatgactaatgatgctaccatgtatgcactaatagtatagaaggctctccgagcagaaagtgcaatacaatttttgcatgagccttgagggacttagggttctagtggagtcgttgctcctcctccttttggtttgggtagaagttgtagagatttagttttcgatttaaagaggaagactcctttcacaccgagcagttctagacaaaagaagaggttccgcgggaaccaaggtcagagtggtggtcgtcagggtgaatttatgtactcgaaatgtcctcgttgtaagaaacatcacataggagaatgtaacaagaattcttgcttctagtgtggtcagatgagatactttaagagtgactgctctcagttaaggagggaagagccaaaggaggagttcatatccactcctactcaggtatttaccatcacacatgtagatgttgaggcaattccattagttattacaggttagctttttataaaaaaaactcctattatactgtattatttgactcggaggctacacactcttacgtggtgtcaagagtaattgataaactggatagcccctgttataattatgatttaggatttggcaccctttacctagtggggagatagttatctctaggcggtggattagggctataccaatcacagtggatggtagggagttaagtactaatcttatcgagttatttctagcaaactttgatattattttggggatggacttcttatccaataatgcaactagtattgactacatgagaaagatggtgacttttcaaccgataagtaaggaaccatttgtatatatgggagcagttcaaggttcctgaattcccatcatattggtgttgggagctagagagttattatatgatgggtgtataggttatttagcggtagtgatcgatactagtagactcaaagtagttaggcttgaaaatgtgagagcggtcaaagagtttctagatgtgtttcttgaggaattacttggtttaccaccgtaatgggaaatagattttattattgatctaatatcgagagcagagcccttttctaaagtaccatacaagatggctccatctgaacttaaggaattgaaagttcaacttcaggggatgccagacattgagtttacccgacccaaggtatcaccctgggaagcttcggtattgtttgtcaagaagaagtatggatcccttcggatgtgtatcaattaccagaagttgaacacgcttacgttgaagaacaagtatccattgcaaagaattgatgatttgtttgatcagcttaaagggaagcagtcctctcaaagatcgatcttcgctcaagttatcattagttgagaattcgagaggaatacatttctaagactgcattttgtacgaggtacgaacataatgagtttctagtgatgtcgtttggattgactaatactctggtgttgtttaccaaaatggtacgttttacatttatcaactcgcaagcgcacg

SEQ ID NO: 381646 - DNA, 2746 bp, Cannabis indica
aaagaaaataacaaaaaaaaaaagcttcactggattaaaaaaagaaaaatcatcaatgacgaatatggtagtacaagtacaacagtggagacccgccttatcaactttccctccaaattcaaaatcaactttactcttcttctctcccaaactccaacaccatcatcatcttcaacctctccccaaattttctcgcagagacctagcttccctctcatttctggctcttcttccttctctcagtacacccgcacctgccaccgctttctcaatcggcatttgtttagttttttttttttttttttttttaaattccttcaatttttctgttttctttctgattttctcgcgttgtttaagctaaatccctaatttcatgatgattgatccatacgcagcaggaccaaaggattggttgaaggatcaaaagaagaagtcctctaagtttctattagctccaatcgatgcctcgcgagagagtctccgttccgcttatctcttactcagtacctctctctactcatatatggaatacactggatatatgtatttgtttctgtaactttcttataatgtaacatgtatgtgtcttaccactatcagagttaatttgttttgtttccgacagatgctaaggattcggattattcagaaaaggacatggaggaaatccagagtctgttgagatctgctgccagagattgcgttatagaagagaggaattcgtttgttgcgtttcaagccaatacaggagtggaggttattccttactgtcatcttcatatcgttttataatgccttttttttttcctctcaaaattaaagtgtttcaatagaataattatgcagttatactcagtttacgcctttcaaattgaaagacaattttttttgaagaattattgaaaaattcaattttatatggatgcacaggtttgcacatttcgtttgatagtgaagaatgcagcctcgttgttaggcgataaggatcctcttaagctagaggccgaggctatattgacggaccttataaggtaatgactgttaatatatgccatgctactgaatatatgctatatatgactgttaatatatgctatattgacctcattgttactaactactgagcctttcactgccttttatattatgatatgaatatgattacttagacgttccatcttgactgcgattgttcatcagcaatttagacaattactctgggtgggtaggatgttggtgtggagtttcaaacaacacaatatcgtgttatcacaacaacaaataataaagtaaaagtatagtcctagagagaaactcaaataataaaaaatctgccatctttctcactagttacttgtttctaagggggcgtcagtgacacttaacaatttcagtcactagtttcttgtaacgttagactttgggtctactcttggattatgaaataaaggatgagacataacaaagaaagaaagttaactattttttttttatttgacaaaaaagaaagttaacatttatgtaaactcataatcaatacgttcaagggacaccattcaacccagccaacccaacccaatcctttacttttttgaatatacaagtggtagacagaggttgcggtttttggagaattgcataaaggcatgtaaccgaagataagagtcaagggtctaggaaaatggtggggtgattattggtagtgctcaaacggaagaggtgttgggcaaagatgtttatggtggttgggggttaaggaagtgaattcttaaacccaattcattctttattcctttttttttcttctttatagaagtaagacaacattgtgacataaggtcatgacacttagcccatgacttggaaaactaggaattttacaacgtgtcgcactattgcgacacattagaagctattgcgatacgtaagaatacgacatgttttggtgtcgcgatgcttaagtgaaggtgttggtgtcgtggtagctaaatagacttgcttcttttatcaaaacataaaacaatgaaaacaaagaaactaaagaaaagaccttggcttgcctcctaagaagcaccttatttagcgtcgttggcttgacgtactattgagaatgtctaggttcttcctttgatatcatcaatcaccaattagttggactcttgcattcttcaaattcttgatgcttgtcattgaagttctctctgacaatcatatatgtatggtgtaattaggccatgtttgtcctccccatatgctttacacgatatcctatcactttttctttggtaactgtgggtgtctaggccaacttcgcacaccttgacttatcccatgggccttgatgcatcgagtgggagtctgccacaatggcctcaaatattgacgcctaataacttatcccaggtaagaccctttaccactaggccaaccctttgaggtttaggggaatagacattacactcaatggtatcaagtgagtgctcaagacttcttttatcctccaccatatctacttacatacaagtattaagtttgggctttgatgaaaaacgtgaaatttttcattctcacatgtcacttccatttttgagttgccactactggttgggtgcaagaattgctacattctgagttgctaagaatgatttgacccaaaattattagcatatttgattattctccatatctattttttttgaacaaagggaagattttattcaaaaacagaacaaaacaaaacaag

SEQ ID NO: 381647 - DNA, 2943 bp, Cannabis indica
gaggaagtcgctcatggacatgtttcctctgcctctttttaaaatatatatatatatataagagcttatgacaaaatttacctgctacgagaaaaacatataacatataacagaaatagtttatgacaaaatttacctgcaaagaaaccttgctaatttcaaagtagcctcaagttcaaaggttatgggtgagactctgcacagaacaaaatacagaactataagagcttctggattaatgtaatgaaagtgaaatcataatcttaatcatttattaaagaaacgcacacacacaaagtagcctcaagcttaaaggttatgggagagattctacacagaactataagagcttttgatttaatgtaataaaagacacacacaccaaatgaatcagtgcatagtaatgaatgaaacatgagtacacttgagacataactcaattaagattttaccaatagaaagaaaatgaagtggaggaggtaaaaattctcttttattggcagtcagtgtccaaatttcaggctctagcattgtagattacaacattacattacaagatttaagagggaaaagataatcagatacagtacatcattcagagaaaaaacaatcagtcaataaatcattttttaggaaaaagcttgcctctgagcattttcttgtataaatgacttcctgtagtgtacaatgacactttggtaccgatacctaacctcatcttccaaaactgagtcccgttggcccattcgatcaatctataaggtataagcacaagcaggtgtcaaaaataaatgtgatcaaatgtcatcttccagtaaaaattagagcattgaaggtggaacacaagaataaccatcatgtcgaaacataaagagacctgaaattatatctattcaaaacttaagaagcaattacaaaagaatacagcctctgcattgcttacctaaagggttcctcatggaattccacagtttctagcaacacaaaaaactcatactttttagctacgtaccgacccaaggacaactcaaattcacaaaaaaataagaactcatatactaattaccctaagcaataagtcactctcaactgcaaatctccatttcagtcattaagattgctcttaaagcaaaaccccaaaagcacaccatattattatcacatattgctgtttagcccatcctaacatacaagggaatttagtcgttcaagctgggatggaacattatagatatatcatatagagaaaaactaccagtaatgcacacacaccgccctccagtgccccagccaaccagaaaaaatccccagtcaaccttgaaagttctaaagcagtggtgtaatgtgcattggcatcaacaggtgatcctgccaacagacaataatcacctatggtcttctgtgcacggccaagtcttcgttttttggccttgataacctggcatttgcaaatccgaatgttacttggagcagttattaagatgaataagtaacatctaactcaaagactatttaaactatcaatgaagtcccagtaagtatctaaatagacatttaagaaaaagaagaaaaaggaaaaagaaaaatcagactaaaattattcaaatgctttagaacacctaaaaataaacctcctctgagctgagactagactgggaatctaaaggcgtcttgagaatagtcccagtagactctgcctgaagaacccatttctcaaacttcatcagcagagacgcggcaatgtcctgcatcattgtctgcaagtgcaactcctgcgtatcgcggtcagctggcggaaacagcatcaggttaccccctttcctactcccatcctccaactacaacatcaaattcgaaattggaaaatctgagtttccctcaacgaattatgacaggaaaaagaaaaaaaaagtataatcgaacctgtgaatccccagggcagaaagcaaagcaacgctccacaagtgccgaagagaaacccttgcaagcggcactgaactggctgacaacggtgtccagatccggggaggaagggcagtggcagataccaataatggcaaggatcttgcgattggattggaaatcctcccaaggtgagggtggagcaccaccgaggataaacttgaatcgaaggctgccggaatcccatggctgatgagcgaagggcgacttctggtgctccgtgtagaaggagcttatggctgagagtaggattgtctgatagcggagcagcatggagaagtagtcccgcaaaagggtaggtggtacctcgccgatcggcagcaccgccacacggatcatggaactcgtctcgatactcacgccgggctccattgtcgagatcggatcggacgacgctaatgtaagggttttaactgcccggatttgatcagagtttcagaaagcaagccataaaaattgaggattcacttatgccacggttaataattgtaattcgaattgggaataaatgaaatggagaaatcaaaaagaataaaaattgagcattctacttatgccacggttactaaattgtaattgtaaacttaattgactagaaagtcaatgagaataatttaattttgtttagataattagaaaaagtaatagaaatactaaatataaatatttaatttttaattaatttattataaaattaagtaaataaattccgaaataaatatatactataattaatatttattttttaattaataatattacaattgacaatataaaatataactaaaaaatatgtattaaaaatttaatatattttataaacaaacataatattactcgagaaaaaaaaaccataaacattttattagaataaaaatataactaaatattaaaataagctccttacagaaaaaaaaaaaatgatgttctaatttgttcaacaaaaatgcaaatatctaatgattaaatgattatgtatcg

SEQ ID NO: 381648 - DNA, 5277 bp, Cannabis indica
ataagccatccttttgtcaaagcaattgtcaaaactaccctaataatgacaggtttaactactggactaaaagtcttagtaaagtcaaattcgtgttcttgatgaaaccccttagcaacaagccttgccttatgttcaaggactgatccatctggattttccttgatcttgtatacccatttataaccaattgctttccttcctagtagtgatttgacaagagtataagtttttttttctgacaaaagctaaaacctcatcattcatacctctgttccaaacaatctgactgagtgtttcttgaagtgatgttggttccctggtaactaatagggctttaggcttgtgtataccaggcttggatctggttctgatgttgtgtgtgttgttctggtttggaggtttgtgatagccagaaacagcagccttgtgagttgcagaaccaggagcaatatcagtgttatctatgacggatatgctggcactattaacaatactaggattgtctgcaacttggacagtggtttcaccagaagtctcaaaagtatttggaatgtgtgtgtccaaatgctaatcaatttaaggaccagggaccagttctgttatgtgaggaagagcctactccacatgttcctgttggtgaaggaagtggagtagacgttgtggcatctgatatttcagcatgctgtccaaaagattgtcctacatcaaaaacagatggttaacttggcagccaactattagtagcagaaaccaaataaggtgtgacagtatttgttaaagcattttgatcaatctcaagttgtcgacttatcagatcagacatggaatatgaacaatgatgatgagaacaggtggggactatagcagaaacacttggaaacttgtcttgtttttatgtggaagatgttttttgacagagtgtttcatagggaaatgataattcctcaaagacaatatccctagagatatacaatttcccatttgtatttagacacttgtatcctttgtggtttaggctataacccaagaagatgcatggtgttgacctatactcaagctattgtatggtctgattttgggaaagcacctacacctaaatgttttaaaggctgtataatcaggttgaattttgaatagaacctcaacaggggatttattgcctagaactgacgtggaagaagtgttaaacttctcctttttgccactatttcttccagaattgtttgttgttgcgcttgctactagtgttcttaccactggaggtttgggcagagttgctggtatctacctgtgcgcctggcaagtcatggggttgtaggatactttgtgtctgactattgctgacttgccttgtctgggcttgtcaaatagcttcttttagtttgataaagtcgttagctctatcgagaaactctttcatgttgttagttgagatcctctagatatcttttcagaagtaactcaatggaaggatgccccccagtatggccgtatatcgaccttcttctgtaaggcctttgaccttggtggcctcggccatgaacctctggatgtaatccttcaaaggttctccttgtcattgtttgactttgacaagctcttctagctgtgatggtataagccttgaggaaaagagttgagtgtagcattctcgtgaaaactcattttaagaattgaatcttcatggggcaagcttaaagtaccattattgagttgtttcgaaaaaagttgctgacaatatgcgacaccgcacatcaccagtaaccttctggagatcgagctgcatctcaaagtacttgatgtgtgccagtggatcttctcgctcggtataatacatcttccataccggtatcttaaacttgggcaagggcaaagcatttatgtatgtcgataatggtgatccttttgaccagtctagctcaaggtctgaaggtttcgaactagctaattaagcccttgatcatatcccttatttggtcaaactgtgcttgcacaaaagaattcgttgtaaattaatagaaatttcttaatgattaattatcgatattttaagtgatatgtaaaacacatacttaattgatggattaacttttctttagaaatagttgtaaaatagaaagtaaaaaaagtattacttcatttaaataaattttaaaattgtcttatataattggttttattttaattatcttctttcttttgaaagattattttaattatcttttaaaatacttaaaatcgaagcatcttctccacataatgatatatgaatatgaatgttaaattaaaaacatcgatttcaaaatctaataggcgatcattggtaataagctgatgatttcatgaagaaaaaaaaataatatcaaatagccaaaccctaaagtaaaaagctcataaatttgtcgacctatataaaataaaattttcaagtatataattctctcattatatctatttctcttacgttctctggttcttagacgcaaaacgaagaaccaagtaaaacaaaaccctgtaaagcacagcccaacccaacattatgacaacattttcccacttcttattagatcctaaatcactatcaatcccgagactcttcaatatactctgtccattcacaggtgtcccatcactcggattgattccaaacacgacggtgttctggtactgattcatcagcagaccttcgtaaggataagtcatggttgagatcttattcatccatttccagtaaacaggaatatcatgactgttcaaaaaatacccacaaaacaagaaaaacagagctgtgaaagctatcacagccgcgtaacccaatatgtagttgggcacgattgagctaacgaagacgacaaaagaattggtggagagcaaagcaacgtagagaacaatgtagaaatagagaaaagggccgtcgagtttaagggcgaaccagacgatgagagcgtagacgagtgcttggagagcaagaaaaggaaggtaggttatgaggccggctatggtgtaggaagaggcgcggtaggcgttgtaagaggtttcgcgaacgaagacgaagcgttcttgaatgaaggctgggacggcgtcgtttgaggagaagaagaagagacatactgtgaagatgaagaaactgattctgtttgttatgccttggagtgtttttggtgggtctttgaacattgtggccatcatgaaacccatgacggttaggaccacgagtcgtgataggaagagttctggtgttctgcggatgttgatgaagttgcggcggattaaggtccatgtttctgggaagaatgagtttgagaatttgggaccgtagttgatgatggagctgtctagcacacctggtgtcatgtaatcgttctcgtttactgtgtagtcactgctgtgtggggttggtgtgcctggtaggatctcgcttgagtaggcgtaatatcccggtgatgaactgaaaaaacacacaattaattaattgtaacttattccctatctcatataattattgcttgtatatgttcattgtgtggaaatatctagatgtgtaaatggtgcatgcatgaaatctttgtacattttagatatgatgataatcatcatcatcatttgaaaatacatataaatatatatgatgaaaaatcagttactgaaatttcataattagcactacaattttgttttgttactttactagtcaaactctaggaaattaagctaggaattggttaaaataagttactgaaatatgcattgattgataagagtataactaagcacaaatgcctaacaaaataaaagttacctattttatatattattgtttgattctcaaatagtattcaaaaaaacgacatgacattgtaatgctaaagtttcttttaacgtttctctaatgtcatatatttttaagggcatgataaagttgtgttatatagtaaactagatttctccttaaaataacagatctcaacttccattttctttcttctccaaatatccaaaagaaaaagaatctttaaaactatttctttaatttattttcaatttattatactgcttaattattacctcatagggttgcctgcagctttttgatgagcagtattcttgggccgaggtggagtaaactttagtttctccaccacaccactatggctagcagcccacgaccttgacgtggaattattattataagggctcctcacactacgatcaaaatccgaagcattatctttactagcatgcaagtgaagccttttattgcctcccctcgcaacaccatcacgactccctcggcgaggtagtgctgttggtgatgatggcactactgttgaaataaccgaaacatctatttcccttaacttggcgggtttcacgcccgtgcgcgcaaattcagctacagcctcaactcccaattcagactgatcatactcttgaataacatctataagattctctaaggagctctctccattaggcacttttcgccccattctattgaggtagccagtgacatccttgggtgggccttgaaacatgagttgccctcgagccaaaactataaggtggtcaagaagctgcacgattcgtgaggagggttggtgaatggtgaggatcacggtgctgcccgatcgtgctatgtcgtgaactttttctatgacgctgtgagcactggttgagtccaaccccgaggttggctcgtcgaggaaaagcagagatggaccgtgaatgatgtcaacacctatagaaactcttcgcctctcaccgcccgacactcccctacttccctcgtcacctatgaaggtgttgcgagctgactagaggaaaatgcagaaaaaaaaaacaaaattagatttaagccggtaccatgttactagctagtatatatcattttgatgtatattgattaatgcagttaatagaatattgttgtccaacacaatattatatattctaaatattggatcaatcgaaattttatagtattgtacacttccatacataacaaatgttttagcattttaaggtttgatgtcaattgattaacaattttttatattatttgttaaaattgaaggtgtgatgtaccaatagcaatatattattatttattaaatttaaatatgtgacctgatattaaaatacaacaatagcaatatattatcttgtggtgttctcttagagtatctctagtggtaatattttttaaaaatgttaaaaatttacatattatttaaaaatataatattttattttatctctcttccacattatttt

SEQ ID NO: 381649 - DNA, 4161 bp, Cannabis indica
aaaaaaccaagtttcgacatctccaaacatgataaattatagctgtcaacactaaaacagatacctttttcttgaaaggagaaaatcagttctgcttcagccatacatatcaacaacaattttaggttagattcctgaatattccagcccacccaatctttgataacttggaaacatctcttgctataaagacattcaaaaaatagatactcaattaattcagtataacatccacagattagacaaacttgattcgtacaaacttttaaatgaaatagtttgtcttttgtttacagacattccaaaactgccaagtagaggataattcaatgtttagggatattaaaacgtccccacacttgaccataccaactcacatctcctcccttgtactcaacacttcataaccaaaactgatagaatatttacattgcagtagttggtattcagacatataaagtttcattttgttttttacattcacaatttgacaccaattcatgcaggtctaatgtaacaatagaattataatatctttgtttcgatccaattcgttccaagggcatatttaggcttcaattgcaaggaatggtttcttaccttggaactttacactatggtcatactgaccacaatcagagaaatgaatcttggagatttctgcgcctgatgaatgactctcttgttgggccttggatttgtattagggatttcaatgagattattttcaatagtgaaaaaaatggggaagagaaagaagttgggctgctatgaaaaacttttgaactgcaattgactattgcaaactggtggattttagcaatatcaaagataccttcacttggagtaatatacaacaaaatggaaaaaaaaatgagaggttagaccgtggcctgtgcaatttagagtggctccaaaacttcccaaatgcgaagatctttgtccttgactggtggaactccgatcatagagctttagttgttgattgcccgagccttggtactaataataagtgtggtttggtgaagaggaaaagtcgtttccactttgaggaagcctggtgtgggaattcaaaaagtgatgtgattgttggtcactcgtgggattccatttgtggcaatggcacgacttctgatgtgaagagagaactggttaggtgcgactttaatctcaatagttggaataaaaggaaaagaaaaagagttaaagaaagaaatggaagactcaaagaagaggctcaaaggcctttctaaatgtaatgatcttggtatatatgtggacttagttgaagaatgaagaaaagaagcttaattgtcttttggaaaaagatgagaagtattggaagcaaagaagttgggcggagaggctaaggtagggggatcgtaattcatgctattttcatcacaaagcttcgacccgaaggaagaaaaatgaaattagagggttaagagataagtttggggtttggcaagatgagaaaaatattatggaaaagatcattataaactacttttcgaaacttttttctacctcctcccctcaaaatgaagtcatccagatactaaaaccattcctcataagattaccactgccatgaatgattttctgcttgcagatttctctcctgatgatatcataaaggctgtgaattatatgaatcctacaaaagcccatgggtgatggtctcctggttttattctaccagaaatattagaagatagttgggaaggatgtaactgctgcttagccttgtcgatgagctcaacgagaccttaattgcttttattccaaaagttgagaagccataaagaatggaagagttcatacccataagcctttgtaatgttgcttacaaaattgtcttgaaatgtttggcaaatagacttagaacaacacatcctgaggtgatttcagagtcgcaaagtgcttttgtggagaaaagagtaacctttgataatgcaattactgggtttgaaggcctccattatatatatgaggaagaatcaattcaaaaatagctcaaaacttgacctcaaacttgacatgaccaaggcgtataatagagttgaatggagattcattgaagaaatcatgttaaagcttggttatgatggaagatgggtaaggagttgattatgaaaggttgtagatggagaattggagatggtaattcagtaagggtgcttaaagatccttagaatggaagacgaaaaatttcaagatcttcgacaagctgtgcattccaagacaaatatatgtgattgatcttaattaagcatgacaatagagaatgggataccgcctttatcaataaagtgtttaacgaagatgatgctaatgtaattctatctattccctcttccaacgagcaccttagtgataaagtgttggggcattacacaactaatggggaatatagtgtcaaaaatggatacaaattggcttttgattcaattgaaaagactaaggcttcagatatgttgggaactgagttgctttggaatgagttatggaagtcgagaattccttacaatattaaacactttttacggaaattgagccactcttggctccctactaaccatgttttgttttgtaggaaatttcaaattaacccctcttatcctagatgtggtggaagttctaatgaggataatgttcatgcaatatggagatgttctgccactatagctacttagaagaaaagtgacttctgggaaaaaaatcaaagactataataccaatcatccgttggatttcttggagcatatgaaaggtactttctctcaaatggagttcaattactatcatttattggcatacttggaactgtaggaataaatggatccatggtgagccctctccaagaacggatgtgctgtcgagtggtgtgctaattttcttgctgagttccagtcctcatttgaaagagaccacatggtgagcagggatgattcaatttagagatggcaccctcctgagttgaacaaccttaaaattaatgttgatgcaggagtgttctccaaggataaatgttacagcacctaaaccacttggggcaagtgctcgggagtaaaattgatctttgcacacaagccctttcatcaattgttgcggaactccttgccataaaatctagccttcatcttagggttgtgcatgggttgcgttggccgggttgaggctattttagtgggccaacccaatgagatcggcctattaaatcctaacccattcatatcaagttttaattataacccaacccattattattactcgggctgggttgggttacaacctttaattttttgcaattaaaattttttaagttgaattttctcattaaaaaattgagttgaataattaaataaatataaagttaaggtaaaatcataaaaaaaatcaaaaataaaaaataattattacagtcatccaaattcaaaatgagtattaaaattaattaaattgtctaaaataattaccaacttaaaaaaaaatcaatgttcaacataaattaagaatgacaatattcttcacttttagtgatgctttgaccttttctttattgcctacaattcaaaaattaacttactcaaattatttaaattaaattagcataataaaataaaataacattattaatttataaaccaatcattataagataaaacaattataccttcttcaacttacatgtccattacatctataaatataccaaaatttatgcatgtatctatataaaaaaccaacaacaaaacaaccacagattaaagaaacaccaagtatcacaacatataatactattttatttatcactcaaatcaaaaaaagtatcattacatagtattaataactagaaaagtcataatatagggagtaaaacatatgttatatatatacactattataatagcaaattacattagccaaaaattataatcaacttaatagaagctaaaaatcagtttatattcaaatttatttttatttaaattataatcaacataccattcaagatcatagaaaaatctaataatagaaaaaagggtaaataccattttcgaccatgtgttttgcaaaagttacagattggaccctgtgttttgttaaatgacaaaatggaccctgtattttctaaaatagtaaaaataggaccct

SEQ ID NO: 381650 - DNA, 2797 bp, Cannabis indica
atccaacccttttaaatagttgcagtaagctagctgttatttatttatttaaagttccaaaaaaaaaaaaaaaaactgctgcgtacatatttaatttagatatagattattacagaaataactatgaaggttattatttttcaaaaaggaagattcagttagaacttgtacagatttgtagctagctcgatttagcaaaaattgctttgtattccattcaatttaaattcaaaaataactacttagaaagaagaaccatccaataatacagtcttcgaccatgcacgccgaaccgaaaggtacacgtttcagaaaagtagcacattataactataaagtaggaaaaaacacattataatattaccatatcttcaaaaagaattagataagtgccatattttagaaacttataaactaccatccccaaaccagccaaaggtaaggtaataatcatttgttttgcttaatgccgagagactagtgaatagtgatgcccttgcctacgttgaatgtgttaatttatattaaaaaagaatgagtacaaagagacgagacgaccatttagattgtgttatttttgtaatggcctacgtaagatgttgccttgtttcgtaatagctctgttttatttttcttttttgggttacttatgacatttcgtatgtatgtataatacgtaccttgttgctttttactttgtcatcagtcaaaagtcaaaatggtttcaaaaaccatattatttaattattattattttaaattgggagaataaggagcacaaattttaaaaaccgtgtctgcctgcacaacaattatcctgattcctgatgatggatcccaccgtacacgtggctcgcagttaaaaattattgggaacatcatctcattgtgggtcccactttctccaccaattatataatcttaatttgaccaacctccccgtgacgtctctacagtcaacagtccaatccagcccctaatttccacacatccaacgatacttaatccatcccccatcttctcatcctcggtttttattcttctttcattgctaatgggcccaccgaaccctgtttaacactcaattaaaatgtgccacgtggaaggtgcaccgtaatatgggtccgagtacgcatactggaatacttcgtagaagttaaaaagtggaaatgtgagagagaagagggtgatgtgctgtgtgaagaagccaagtaagcgaatgttagagaagactgtaagaacaagcttttggcttaccgtctgaggaatcaaagaatctttttttttcctgggcggtgaagaagggagctgaagaagtggtacacttactgggatttgcttagatttctttcttgtgcatgaggtatgcttttttttctgttcttagtgatttcatggttttgttcttgaaatctgagatttattttgcttgttttgtactgggttccttttctttttgacttttaattgctcatttagctgaaatggtagggaaatcttgtttggtgattgaaaaatgttgtctttttctgtagttaatctagtttaagcgtaatgctaggtttggagagaggttatttttaatgttaggtattgtgtcagagagttcttgtaaaagttggggattttagatggttttagtacatgggtttctcttagatgtacattttgactaatgggtatgctcatgtaggagagatttgtaatgttgttattgctttagtatagataatagttttggtggtgtttaaatgagatgtttgccttatctgttttgtttcactatagaaattcttgagatagattccctggctgttactgaaaattagcgccaactagctcacaacacgactatgaaaaacagcacagcagttgtttgtaggagaaaggcatttctgttgctacaatgagtgaagcaatggaatgcattttctaaaaagagtctgattctcactattgtatgaatttagtgaacttctaaaccaatctgatctaaaagtttatggacaggaaaattcatttggattgtttttagctaattatttaccataattctaattcacagaacacaaaaggaaagttaattcacatggtttatttattgtatttggcaacggccaagggttacaaactcatatatggaaaggaatcatttttattaatgagaaaattggactgctttctgttgggtatggatgatttatcttgcattttcatgtttctgcagcaaatgttaactgtcttggaattatgtaatttgaagagatcatctcctgggtagtcatttgaacaggatattggacatgagtatgctggtggggacatgctcgagccaagggaagctgatatacctgccctgtttctgtttttggttgtgctccctttggttgcttatgtcttacttggaaaatggagtgaatctgctaagaagagagataggataaatttacttgctgagattgctgctgaagaagctcgtagagcagaagcaatggctgttgctgatgttattcctcttgtggcttcaacaaaaaatggaaaccatgcatgtgcaaggtgctttagtccagctacaactcgctgctccaagtgcaagtctgttagatattggtaagctctagtccttttatgaggccacaaagataacatactaacatactatttgctatagattgttattgtctcattgtaaggttctcaacaaagcaagtttgaagtaaatatattattatatagaatctgaatttatatatagatatatttatttatatgtataaaagaatattgaaataaatat

SEQ ID NO: 381651 - DNA, 1143 bp, Cannabis indica
gagaaatgccatttgtttcttcatttttttgggggtcattttcttggtgcattgctattttttttaggagtattttggatgttttcataaccaaaatcttgaacttaccgttcctttaacttggcatatatttggagaagaatccaatgttatttagtgataattctttacttaataaacaagttagaaaagtgaggagaaaggaagtaaagatatgaatgctcataaagcagtaccggtagcatttagaacgccacaacacccatctctagggacaaacaattggggtggcgcttctcccttgttggcaagagacatttcgaaggaatcacttgagcaaagatatgttaggctcaactcaactcgaactcgagatgagatctttcctgtgttcgaggatgatctagattgggcaccctcggagaataaggctaagcaagatgttcattatggctcaaaaacagcgagcatgatcagaggactcttaccgaaatttgttatgtttcgaaggaaggaaaaagagagttcaaagaaaaagagatggtttcttcctagattagatcctcacaataggtggcctcagggctggtgttagttttttacttgagttttgacaaagcaaaagttgtgaaactaaggcatgtttggcatgaattttttcatccttaagagaaaaaaatgagtatgaaaagagattagaatgatggtcaaggtcatttttccaatgttcatttttttgcaatataagtatgttttttttaagtagtaaaacttcaacttcttgtaagtttttcctctgttctttctttcttcaaatatattgctttttattccttttgtatctataagcaaaatccatgaaaaaagtaaatccttaaaaacaaagaagctaggtagaataatatgcatgaagatatgagaaataaatgataaatttctgagttattactaaatactagattataatttcaaactcaatgaattaaaggttagaacaactcatggtacaaaactgtattactagtttgtggcatgacaaattgtatagttaaagtaattttgattttactaacataaaaaaatataggctaattagtaatttttcccctgaactttaacgtgtactaaaccgtgccccttgaa

SEQ ID NO: 381652 - DNA, 2471 bp, Cannabis indica
atggtcttattgttttctatacatgagaccaatatctatataagagctctaatcttctacctcttgtgattgttccacacacttcaaagggttatcgaatagatcctttggagtagccgttagctgcagattcacgccctttatttcattcaattattgagaaaaactcagtacccttctcttcataatagatcacaattgaataattagaagtaggagtcataaataaattttatgtaaataaatcaactcccataaaatttgagatatacaccagctaaaaagcagtagctgtagatagattgactttaagcaaatcttgatagatctatgaaactaagcaatatcagagttattctgaaactctcttttcttttcatttaaaactctaaattcagtagctgtagagaaacaaaaaaatgttcaaagctaacagtcataaatcaagacttaccaaacaacaaagtttacatgtgtatcatatcagcaataattcgaactcagtaatggtcatggcaccataacttgacctttgatgagaaacctggatgagtaatcaagtttttaaaagaaattacctccttgggaacgctatgataggctgagaatatagcgggcatacatgaagcaacataggcaatggtcttattgtatcagtacatgagagaccaatatcgccataagagctctaaatcttccacctctttgattatcaaacagatcctttggggtagccgttagctgcagattcacacctttgatttcattcgattattgagataacccttcacttcatgtgaaactgcttttgctctctaatctaaaacccaccatccgatcaaaaaaagctctttaaacattaagctatataaacttccaaattaagtagctgcaaagaaataaaaaatgctcaaagctataatatcatacaactaatgagatatttattctaaaaatacaattatgcaataaagatcacattattatcattagagttaaaaacacggtttcaattttcaactcatattgcttgaacaatcctcccacttatttccttttatttaaaagtttggaatttatgttaaattgagaaaactttgggaaaattcatatttgtatgtatgaatatatgaacatatgtataatgtatgtatataagagatttgagttgatgcagagtgataagaaagaaaagaaaaatatgttataccaaaagttgagttgtctactacgccgcataagaattcatctgttattgattgttcggtctacacaactgaatgatctagattgcaaaaattagcattggattgaagataacttcaattaagaacctaatgaacatcaattgaaacagtaatcaacatcttccgaaaagacaaattcagattttagactttaaaaaagagttgattttgcatcacacgagacatcaacaatacattcataatcaacatctgaactgaaattcaagaaaaactcacatgaaatacaactgggtgaatgtatatagctttccctcttgaatatatgaacttctctcccattggacaaatcagagctacaacaactgcattccacaatattaaatacttcataattaccaaaaacacaaaagtaataatctttaacaatggactgaaattacatgagacgtacaacaaatcgagttaattctggagacgacaaaaaataaaaaataaatatataactattattaaaaattgatcaaagggaatgaatgaatgaaattaggggtggtttaaactcaaagttgaatgaaattgatcaaacagaatgaatgaatgaatgaaattagttaaaccattatgttatataaacactttaaatatataaagataacttatattatttaacacttaatgtatcaataaatatatattaaattaaaatcatcaatatgattatatttatattagtgtattgttatttgaaatttcatcataattatagttattgggtactttaaaggtatttctaatttattaagaggctaaattaaaaatacttaaaattaataaccaagctatacattatatattggtagtagtcccaaaaaacaggagtaactctattttcattttctttcatcaagagataaaattaaaaaactttataagtcttatatttttggaagattattactcaaaatcaccacaaaaatcatctctacaagatgaattaagatcatcactatatatggattgaggtacgctttcgctatttgacttcttctctttgaatgaacaaaggtattttttaaatctatggtatacacttataataatatgtaatatgtttagggaaacttacaaaaatactggattttgactcaatctttacaaaaatactgccatacggcaaaaataacttttatactgccttggaactttttttttcttttataatgtaaacatcgaaaataaaaaacgaggtctccatcttccaca

SEQ ID NO: 381653 - DNA, 4207 bp, Cannabis indica
  modified_base (33)..(33): a, c, t, g, unknown or other
  modified_base (35)..(35): a, c, t, g, unknown or other
  modified_base (37)..(37): a, c, t, g, unknown or other
gagagagagagagagagagagagagagagaganananagagagagagagaacacgcacgccgtttcgaatcaataatttttgttgttagtatttggcgtctatcatatatttgtatgacagacattttaggtcacaatgttagttcgtgctctaaggatcgtggtatggtttgggttaagaagactaaggtggaaccaaagaagatggaatccaaaaatccaaatttgaacaaaagcatagagtttgatgatgttgctattttgactgagaaactagtttcagttggtacctcatcaaatcaagttggggctaagatagtaattgctaaatcttcttcttatcaaggccatagtctaaaggtcggggatgattggatcactccaaggagagttggtaacaagtggtctttgggaaagggacatacaacaccaaaaaaaaatacttatgatgctattcttaagcctgtgtttaagaatatggttactaatccccataatttggatggagtggtgcaacatcctaagttggaatgttagagggatgaataaaggcgataaacaaaggttcattctggacctttgtcgtttgaataatgttaggtttggtgccctccttgaagctaaggcgaggggtgagaatgttctgaacaagatgcatcataattttcctaaatggaattattactctagctccattcttgatggtcaaattcttttaatttggcaaaggagttttgtgaaggttattgttctcatgaagacaatcaattggtgcactgtaagttgaaagtttctagtcttgattctgaattctttattactgttgtgtatggtaagaattctattagtgagaggatggagctttgatccttgcttgctggaatagggcatttgaatcacccctggttaatatttggtgatttcaatgccatgtttccctttgatgatcagtttgggggtggcaagtgacttccaatgacatttttgatgctcaatagtggctggctattggtcaagttgatgagttgaaatcctcggttcaaagtatacgtggtctaataagcatgattcgagagctcgtatttatttaaagttggacaaggttttcaaaaatgagaatcggttggatgttttcctcaaattgaagctattttcctatgggatgtttgttcagatcatagctactaccttatcaagtagttgaagattgggaatatgggcatcaaaacttttaaaattttcaattattggatggatcacaaccttttcaaggatattgttatgcaaagctggtccaagcctctttcgggtggaggtctcagatgtataattggcaagttgaaccaattgaagcatgtcttgaagaagtttagcgggaaagagttgggggatatatctatgaagtttgtagcagccaaagacaatttcatcaggctcagaacaatttagccaacaatccagctaattcctcgtatcaatttgaagagcaacaagctcatcaagattttttgattgctaatcaacgatacgatagctttattcaaaaaactagtaagctctcctggcttaagtttggtgatgaaaaatttgcctttttttcatgctagcaccaagaagaaacgagttgagaatcgtatcattacattcatggaaccgggtggtggctcactatttcaatcaccttcgaaagttcatgggaaaatagagtgcagcttcaaaaagacttgattttgattatcttaatcagagccctaagttgaatttaactcaacaattgagtcttatttgtcccttcaacaaagatgatgttagaagtgctttgttcaacatccatttgactaaaagcccgggtccatatggatttggtgcaaaaattttcaaaggtctttggaatgaaattggagaggagatttcttctgctattttaattttttttttcaggagggttccgttcctagaaagatcaataaaatggtcattatcttaatccctaaaactgatctccaactacaacagtggattacatgcatatacatgttgtaacacgttatacaaatgtatcttcaagatatctgctctagattgtctgaggttctaccttctttaattgatagcactcaaggtgcttttgtcttgaaacggctccttgctcataatgtcctaaattttcaatatctcctcaagggttattctataaagaatatctcttctggatgccttatgaagatcgatctaagcaagacttacgatattcttgattagttatttgtttctagtcttcttaatcgtctctatttcctcgctaaattcattaattggactttagtttgtttaaagggttttttttttttttgaattctataccttaatattgaatggcaaatttcatggggagttcaaaggtgagaaaggtcttcgtcaaggggatcctgtctcacccttactgtttgtgctaattatggattatcttactagattactacatcaagcttcttgtaaaaagggttttggtttccaccttatgtgcaagtctttgaggttagttaatctctattttactgacgatctggtgatcttttgtaagagtaatatgaagtctctccaaattgttcaagatgctattgattgtttttgtgccactactagtttagctattaacaaatctaaatctcatatttactttggtggtattaatcatgatagtaagcttcatctcaagaatattattcaaataatagaatgtagctttcctttgagatatcttggtgttaatttgagacctactaagtagagagctaccgattgtggaggagttattgataagattcagaagaaacttcataattgggttagtaaaattctttcgtttgctgacagagctcaactcattcactcaattttgttaggaataagaaactactggatgggtatatttatccttcctcataaggtaattgctgagattgataaactttgtaaaaattacctttggggtgctaaaggaaatcatagtaaagttcatcttacttcttgggagcatgtttgcttacccaaaagtatggttgtcttggaattagagaaggaaggaagtggaatatggctctcatggctaagtaaatttgggctctctcaacgaaataagtttgtctttgggtgagatagaataatgatgtctacttgaaggagtaggatttttggtgtcttaaacttaaaagtgactttagctggtattttaaaaagctacttaagccgaggaattccttggatcgtcattccttaatggaggctaagagacaagggcaatttaagataaaatatttatatctttctcttattgctagtgatatagtgtcatattgttgttctatatggcacaagcttagtgttcctaagtactagtttattgtttgttaagggattaacaatcacttgctcacaggggaccatcttggaagattcgtgaccttagactcttgtttttgcttagtttgtgcgacctctaataagactcatcagcatgttttatttgattgtgtttacacaaaaaatagtgattcaggatgtgcggaatttgtttggtcaatttgtttggccaaaggagatggaggcttggcgtaagaaacccatcaaagataatatttaactgcaaacaacaatactataaagatatactcttgaatatatttttgggagcaaagttgatttttttttttttcaaataggatgttagacaaagtatagtatttattgttaggctaaattgaagggctaccatattttttgctataggttctatttgatacaatttgttgtgttgtattgtaaagtattagtggccagcctttaagtgtatttttgttgtggtattttcaacacgcaagtatatgtatcattaacaagtaacagactcacaaagagtgaggtcgattccacgaggaatgtacttaagtactttaaaattaaattcgtacttctatttggtaaaataaaattaagaaggaaaattcaaataagaagactagcagaagtaggaagcaaataaataaataaagaaaattaacagttaataaaaattagggcttcgattttaattgtatctattgactatggctcaatatgattatcttcctattatcaatttctatgcaatagcaggtttactaaggtaatttattgtcttctcagatatataaatctcaattacatg

SEQ ID NO: 381654 - DNA, 2201 bp, Cannabis indica
tttttttttttattgttatagactaaatataatttaaaaaattcattgtgagaggagagaggtgacaaatagtgaatggaatgaagtaaatattgttttttttttgtcctctatcttctaacaattttgtaattgttccaatacaaaaaaacaatattgtaattgtaaatttattgtattatttgattttttgatttcatttatgcaacctcttaaaaggggtgcaatgtacctatgtttggttgtttaagaaaatactttagtttaatatttttgttgttatgatcgtgtatattatgattatttaaaatattttattattttttttttttgtaggaaagagataaattttaaaaaatttaaaacaaaaaattaatatgctcacaatagaactcaaataatttattctacaggtgacttatttattttatactaatttaatataaattatttgaacattactttttatattaaaaattattttaaatttcttaaaattttacaaaatattttaaataactataataattataaaaaaaataaatcaaaaaattatatgaataccaaaatatataaaagatgcatcactaaatttcttttatggtttgcagagtatacatatatatgtaagtttgagtaaaatgaatgcattactacttcaaattataaaaatcattaggaagtttcctaaaaaagaaatcttattagggaagtttacattttaacttaaaaaactataactactactactactagtaagtgtcatgtatgtatattagtaaaatattgatactttcaattatcaatgcaatacaatgatgatttctttttggacaaaatgaaatacattaacttttccaaatgggaataaaacaagttcaacaatattatagtttgtattttgtttttacactcctcttgtctcttgacctttattattattattattattcatattgctattataaaatacaaaaacttttatgaaacaatacaatttattcaaataattaagctcttttactttggaagttaaattttaattaaaaaagaaaaataaaaaaatatagaaaaataatgtaaaaaaaagaaagaaaaaaatctcatatttgtcccttatgttttttctaagaagaaaatgtaattttcatcaatcaaaggtcatttaacaataaagatattacattagcatggatattattatccttactaatagtacaactggctttgaaaaaggagatcctaacaagaatgaactaccttatttgcttgttttacaaattcaacaaacatgtttaatatatgagacaataaaaatttggactcataaattaaaatatcatacattaatttttgcttaaaatagttttatttccttaaaaaaacataaagagattttctttaaaatttacatgaaattagacggaccaccctaatttcatttataatgttagataaggatgtgcagaaaatcatccgatttaattacagtcgactgatctaatagaatttgattttagttataactggatcggatcggatgtaaattttaaagattcaatcggatcagatttgttgttgaatgagacatctgatctgatagataactgaaccgaatgtctaattatcatccaatgaacatcgaattatgttaatatatttttaaaatatatttataattttatatatttaatatattttatttaaaaatatatattaattaatttaatatatatttaacacaaaagattaaaaaaaaaccttagatctaaattattaattctcatattcctaaatgctaataaaattgtcaatgcatattgaataaaatttattttttggtcaaatttattatgggattatgagaattaggttgcaggtcatttaacatcttagcttgagcattcaactattgtgcaaggtacgtaaccgcactactatagcaatcccttcagccacagagaacttattacaaagataaaataaaacaaaattatattacatagacaagactaattatcgcagtaattaatttaaacaaatgatactcaaaactatgtcacagaaataacactaatcacagtagcaaaactacagacccgactaagctacgcctaaactcagggaggatcagcaggccatacaaaaaaaaaataacctcaagtgaagcagacaatatataaaataataatttatattaa

SEQ ID NO: 381655 - DNA, 2226 bp, Cannabis indica
atagtaaattataaagaagttttaaaataagaaatagttgggaatgtgatctgatatgatgtgtttttagtttaattatttaattatttaaaataattgctatgtaaatgtaatgtgagtcctctatgtttaaaaaacataaatgctgctaatgtaggctcctaactaaaaagctctcgatataaatatatattttcttttgcataaatacatgtaaaacagatctccaagacgtacactttcatttgggtgctttctctcaagtacgtactcggactcaattatatttatattatagcaactgtttccatattcaaaggagaagcagagtaattcatagaagatccaaaaggctatacatacggcatgtcgctttcgatgtacaccattattgttcttgtgttgtcattattattactattgtccatgcaagtagagagctccaggcctctggtacactacaacaaggtttcgattgaccagtcgaagattgttgatccaagtaataaaagtgggattatgggtcatgttcatgttcatactggaaacaataagtatgggtttaagataagtaaagcttattctggtccaagtagaagaggcattggtcatggccttaccaatctcttgcgtaatctttcttcttcttcttctactaatcctttcaagaggttcaaggaagctaaatatcccggtccaagtagccgcgggactggtcattgatatttagctttgctactcctccttcaaattaataattcatgttcatttcccatggtgatgagatcatgaatttgttgattacttcatcaagagttcttatacattacaagtttaatttttcctttttcttttgtggttcggcatttttctaacgagttttcgtgtattaaattattgtttccctgtaaccatattcaaagagacatattttgatcggtttctgaaatagagacacaattatgaatggtggtggtggtagtggttgttgttgaatttttctccatagaatttcagaggagaagcccatactcattgaaatgtgaaattgcattttcacccgactttataacttctagcatccaatatttgactttacttcacttctcattgaatttcaatgtctaagtagtgcataaaattcaaacttgactttctattatttcggatacgtgtgcatatactacataattatataggcttatttgtgttgtaactccttaaactatgttttgttaaggtggtccctaaactttattttttagcaaattagtcttcaaatttttgttttcttgaaaacataaaatcttcaatcttaaataatggtagtttatttatttatttatttttatattaataccccttgacattatatactgtactaataaattctgtaccgcaatcatactagtgttagtagtatttgaacatataattcaacatgcatattacatacatatacatatcttatactacttttatctcgtttcctgatccaagtgtatgtcggtcaacctaaatagaaattttgctcgctgaaaggaggacttatgtcacatttacgtaaaacacataaataacttactaaaaccttttgggggtcttaaactcaaaactaaaaatttccctatcgataaatagcgtagcaatatcctaaatatcgagaaaacactaaaattgagacttcagaaaaactgcctgaaaaatagaagaccgtttttgtgggtcactgttagcaaaatggtagaccgtttctatttaccgagatttttggaaatagattaattaaagcttgaggaaaatataaaatagtaatgatagataaataagtttttatgtgattcgggtgttaataatccttagtctatgagtctattgtattatccttgtaggcgaatgtttgagtattacaagtgtttacaatggtaatttctgtattccttttgtttctcccaaagagaaaaattctctaggaattttaacaaatgttttgtaagtaacaattgtttaacctttgtacatgaaaagtgaaggtatttataggtgcacatgtgggtaagggcctaccctttaccaacctagggtttcttactcagcatgcaagaagggtcgaaaatatagcaggaccatctgaccgctggttttgtagtaggggtgttcgcggtgcgggtggtgcggtttttgactattttttcaaaccaacccgcacatgcagtttttctaatt

SEQ ID NO: 381656 - DNA, 2153 bp, Cannabis indica
agcaataaaaggacaataaatatataaataaatattcatttcataaattaaagccacaagtaccacactcaaaccccaacacaattctctcgattctgaaagatacaaaaggatatcactcccaaaaacgaatcaacagagaatcaaagagagggaccccaacacaaattcttaagaaaaaaaaatgagaaaagaaaagaacacataaaactaaactaactattcattaactaagtcgatttaatcagtgaaagatttaataacagcatgggcctcacaggccttagcagctggagtgggctcaacaactgggctgggctcaacatggacccccaaaagctcctcaggcaagtcccctttgataccctttaagtaaaaagtgtagaaaagcttgaatggaaagatgagctgttgcagcttcacctggccgtaagccccttcgaagattccactcccaccggtcacagctaggtaagtgtcttcgtacgtcaaatacgagccttgtacggataagtgaccgtagtcaccgaagtagaagctgtagatcgcctcgtaacgatcacctttcttctccgatttgttctcgatcagaatgcatatcccagctgtgatcccaatcctcttttgaagacaaccagtgtacaactgccattatagaaaaatcaagattgattatgatgatgatgatggaatttcaatagtttgtaattaaagtaaagtgaagagttaatttactttgttactgaaagggactagatctcctagtgagttaacttctttcttgcttaatttaaggaaagcagggctgttgcgatcccgctcgtttatctcgtaaacgcatagttcttgaaccttagctgaaaatataaagaaggaaaaaaaaaagatttaaattatgttattaatttaaacagaggggaagaattgaagggaaatgattactaattacttactgggtctttctgattctgatgaagtggcttggcttctgcaagagaaagctgttttggaggatggattagaggtgatctgaagcttgggagttgagatcagcgatggggttaagaccttactgaaagagagagatgaagaagagaagagtgatctggtgttgtggagtttgggagaggaaaaggatagggttttgagagtagtggcagagctagcggaagccattgatgatggtggaaaagttgttgactaaagagagagagagaggtagagaataattgtgtttgggaagagagaaagttagtgggaaaatgttttgagtaaaatgagaatggtggggacttatttatatgaacatgtggaggagggaaagcttatttatgcctaaaccacgtgctaattgtttttttttctgacttttcatggacggttatcggaaaaaaaaacatttaatatgaaaaacttgaatggacggagattcgtagtcgtacagacggtggcatgttaaaagtctaacgagtaaggagttggaacgttcaacaaaaaaaaaagagttggaacgttcaacaaaatttactttgatttttatttttaaaattaaaattactttgatttttttgaaaggaaataattactttgaattcaattgggcaataataaatctctcaaaataattattgaaacgataagtcaataactgtaatgtgtgtctgtatacaaaagttatattttaaggctatactaaaaatatgttgaaatagtcttattttatgtatatttttggaattgaacagccgaaattggttttggacggagatttgactttcttttctattggtagatttttctttttttttgttatacttaagtacttaaccaaccaaatttaatcgaaataaaaaaagaggataagtaaaacgtagagaaatgttaaaagataattttttgaaaaattaattatttatattagagctaaaataaaatgtaattaagaccatctctaatgaaagatttaaaaattatgttatatttgatacaaaaagtaattttttaaaaaatttacattaaattattttgatgtaaaatttaatatctaattaatgttttattaaaaaaaaataaaatataataactttataattaattttattattattttaatatgtaagataataaaaaaataatataaatattttataatt

SEQ ID NO: 381657 - DNA, 2065 bp, Cannabis indica
agagcaaacaggtcattatacgttgatttcacgttgccatatacagaatcaggggtgcaaatgatagtgccagtaaaagaccaaaggagcaagaatgcttgggtttttttgaagcctttgactttggatctttgggtagcaagtgctagctttttcgtattcattgggtttgtggtttgggctcttgaacaccgaataaacgaggattttcgaggcccccctttgcaccaaattggcaccagtttctggttctccttctcaaccatggtctttgcacatagtaagtatccatttctcttttttgctttaaccttgttttcaacgtaccacttgagaattttcccatacatatgtgacaaacaatggagtaactatttattattaattaacaggggagagagtgattagcaacatggcaaggttcgtaataatcatatgggtgtttgtggtactgattctgactcaaagttacactgccagtctaacatcatttctaacggtccaacaactccaaccaaccgttacaagcgttacccaactactacagaacaaagacaacgttggttacctagaagcctcttttgtttatggaatcttaaagaagctaggatttcacgagtcccagcttaaggtttataagtctaaaaaagaactggacgaagcattttcaaaacacacaacctcatcatcacgtgaccaaggtattgcagctgcattcgatgaaattccttacatgaagctttttcttagaaaatattgctccaaatacaccatggtcggtccaacaataaaaacagacggttttggctttgtaagctttcttttctctctcttttctctaatatttattaattaataattacttcataataatattaaaacatgttaattgtaacacaataattatcaggtctttccaaaagggtctcctctaatcccagatgtttcaaaggcaatactaaatataacagaaggagatactcttaaaaagattgaaaaaaaatggtttgagtcacaaaccaacaattgtccagacccatatagcgtacaagccctttcttcaaaaccagtagtcttgggcttgaaagcttttggggactattccttatagctggagtttcttcattagcagctcttgcaatacatggtgcaatgtttgtctatagtcaaaggcacgtgatattgagctctacacaacctcatcatgatgatgatgtttcttggtcttcaatttggaaaagaatatgtctaatgtttagaatatttgaccaaaaagacttgtcttctcatacctttaaaaagaggccacatcaagaatcagagccttctagttttactatccgaggcagtcccagtagtagtattgttcaacttggagttgaagatactcttgaccaagatgccactgcaaacgccaactctcaccctagcccctccactaattcaaatcacacataataatttttacactttttttttcctttctcaatcttgatcaagtaccaaatatattatttctcaacttgtaagttgtaccaatggatcttagttatcaaaatttctagtagtctttttttttattggttaccttttaaattattttggttaccatagtagttacaaattgaaatgtgataacttactatgtattactctgactattttttggcaacatgtcatgttattgtccataaaatattgggttagttttgcaaataaaattggaatcaagtctcttgctaccatttcaattaaataaagggataattatataagcactatttaatgtaagatttttacgttcaattttttttatatatatactcttatgatgttttataaaaacaacacgaagaagcaagaaaactataagaaaataacatccaaataataataaaaaataacatacaaataacaaaaaaatcaacaataaaatgacaagagtatagtataaaaacaaatcaaaataagaccggattttttataaataaaatcataaaaatcgtaaaaatatttaaaattctatgtaactgtatttttgaaattttttgttgtttttgtattt

SEQ ID NO: 381658 - DNA, 8652 bp, Cannabis indica
catacacagaacaaaaaataaaattatatatatgagaaaagaaaataaaaataaaagactaaatcgtattaagggtgtttttggaaagtcacagtgtaattaaaaataattacgcaatttaaaatatttgcctggtcaatgtaatacattgtaattgtgtaatcggaggtaattgaggggttccaattacacagttcaattctcgtagcccccataagaattgagtctaatcactaaactttccattttaaatattaactactaaaaaatattattttcttgtttaattattaactatttttaaaaaaagatattagaaattgatatgtaataccacttcatatccaaacacatcttatattttaaaatgtattgtaattattagactttgtaattaccattctagtaattacacatttactttcaattccaaatacatcataaataattaaaattatttttgatatgtaattactaatcacacccatatgagcttataggatgtattggaattggagagagtaattgaggcctcctaagcatctctaattacataattacagtgtagttatatgcatggtcgaacaaacaggttaaattgtgtaattacttctaattatattaaattttaattcttaaatgactttccaaacgcacagaagattcaatagctaaaatattgttaaggacaaaaaaaatttaggggaaaattactaataattatatgtatttattttttatatttaaaatccataatagacaatacacataagaattaaaccatccaaatacatatcatcattaaaataaatgctagctttagctagtgagtgggctgttgtattcccatttctgaaaacatgaaacaagagccaacactaaaccgagacaataaattattaaatactgatatatacaaagcaatgatccaataatacgattcgccaaactgttaaccccatcaaacacaattttgcaatcacttttgagaaacttgatcatcacaaaaactccaaagaaccatgctaaaagtttcaaaatcagcaggcttgagacgatgagagaatgaaaaaaggcagtggaaataggttcatgcacactttgacacaccaaaggaccccaagcattgacctcccaaacccgatcgagcaacaaaaggacaagaaataagaacatatgggacgaaaattccatgctcccaccaaatcacatgcaagtacgtaggagaacaagaatcgccactccttggcctctaattcgctattcatgatattgcagtttgggtagtgttgtagtgcaaatttttcgtctagaaatacgagtacagtctcgtaaagaagtgacacgtggacctagttcccaatgaaaaaggatgatgtgtcaataaatagctccagtagagctaacctcgcttgatgtaaacttgcgagaagatttgatcgagacaaggtctagtcgcatactatgcctcgcatagtcaaaagaataagcaagagctagaggagttaatgtcggtcgcgcatatataaattatatgcgatgaccaagtatgtctctcctgtgactactaaagatcatttctttatataggtttggttcgaatgactaatatgttcgacaactcgtcaaggactcgcaagttccttgtggtcaacacagaatattcgactatgcgatcaaagatgaatgtagacattcagacaaaataggcccaaaggccatcttgtgattataacacaatggagcatgcgagctcatgtgttggaatatgatcgggcaactcgcaacttatcaagttgcatacgttgctgcacttaattcaagaacggatgaaattgttcttcatttattccttaaacgtttattttgattaaatactgtcattcgttataaaaacggttctaaaccaatcaattatataattttaaagggcacttattttctatataaaggggtaatccaaatcaaataaactaagctgaaatcgttaccaaatgtgggctaagcagaccaagctctgactggactactataataatcttgtcttctctttaattttgtgttcgtttttgtctatttagtagtctatagtctgagtactcgctattctaagtgagtacctgtgtatcaacttttgagtattctaacattatttgaatactcacataaaattggtgttgtctaatttcctctgacaatatttggcgtcgtctgtgggaacaaaatatttctgagattttggaggagaatcgaaatggctacagatcagataaacacgaacaacaacattggatctttcaacattgggactcccaatgttcccatttttggagaaggaacaacccatgttgatgttgtcataggaggagtggggcgtactaaatgacccccctcaacctatttcctaagtttgcaggacatgctggagaaacctcaacatcagcagctatcgtgtggcattttccaccaatcacacccctcgctgcatccaagggtatcatccaactgacaaccttgctatacacgactattcaggaacaaatatgggcattgcaagcagaaattgcaggaagagactgggtttaagcccgatgtccaccacgagtcccaaactgacattgcactgataatcaagtaactagtgatactaggcatcgtaatgaatattctaacaatacccttaattgcagggaacgtttatgtgagaatgaccatgttggactcaacctaaatcaacatgtttacgaattacgtggtagaggtcctgctattcctaatacaaatcgacagcccaatcagagggaagaaagaccacaagaagaggaagatcttgaacgacgcaacccgtgtaatcgtgcacaaccacaaactgaggtaaacggtggtgtgtctcattcctcttcctcgagaactaacagttgctcccccagtgtttacacgaggtgaagaatggtgttcacgagactaggaggaaggtataatgtgtagagaggtgacctacgagatcgcctcaacgaagtattttgtgcacaatcctagaccctaaggaatcacaataacgaggaggaaccacgtgatccccttttggtcgatcaaggtatccctcttgcgaatacaaataatgcaataactacagttaatccaccgcttgcaccagtcgtgatcaatgatgtggtggtacctacgaacatagcagtagtagctgccctgccaacaagtaaccaagccgcacttgccagcaatcccatactattaggaggggttaatcaagagaatcttctgcgagcgttgaggatgatcgagcaacagagaaatcccatatacaagttgcatggaacatcacccttcaccgaagaagtgcgacaagccaggcttccctaaggtttcaaaatctttgagtcgctcaaatataaaggtaccaccaatcctatcgattatcttgataaatttaacactattatggaagttgatcaggtacctcaattggttaagtgttatatccttgccgcaactttggaggataacgcacacgaccggttcaaccaattgcctgaaccgtccatctcaacctgggagacattcatggacttgttcttgactcattttcaagcaaccatgacatacaaaccaccatacacaactttagtgaacaaaaaataagacatagatgagactttacaagattactttaagtgttttaacattgaagtaacaaaagtggagaaagcccccgagtcttcgcttgtctgcatgcttattacatgtgtgttaccaagaacagacttttggaaggaactataggcacgacaccctgaaacattggtcgagttctttgctatgatagagccccacaaaagaatagaaaactcgtttgtagagctcaagaagagcatggagaaacaaagatctccagtaccaagaacgaggtccaaaagtctgtgatcaacaaggtctgggggacatagtcttaggcgtagcctgaagagatgtagccctacaaggcgacaaagcccgaagcttgccaagtccctaactaggaaggaattttccccaaagcagaagggaggtctgcactttgtcaattacacagaattctatgtctctcgcgatcatatatatgccatcaaggaacacaagggtgttttcaacaaactgccacctatcagaggcaatcatgacaagaggaacccaaaaaaatattgtaagtaccataaagatattggccacacaacgcttgaatgttggtttttgcatgatgaaatcaaagaattaattcgacaaggacatttcagccaatacgagaaaaataacggagaaaataatccccaagcagataggacagacaatgcacgagatgcgagtggctctagagctcctcgcaacattttgaccgtcattggtggatctcatgttggtgaagattcaaagaaagcacatcagtgatatgcgaaagaggccaaggagaaaccattaaccaatgtaaacaatctaagcgaaaggtcagcaaagttattcaagaaagaatgcgacgacatcactttcatagaaagtgatgcgagatgggtgcaccatcctcatgacgacgcattggtcatagtcgttaacattggaggtgacattgtagttcgcatacttgtggataatggtagttatgttaaccttttaaacttgcaggcttttaaacagatgggactacatgagaaggatttgaaactagaaactttgagcatttatggattttctcaggacacaatcgatctaaaaggatgattaggctaccaataactcttgatacaacacccgtaacagtgaagtccatggttgatttcatagtaactgaccaaaattatgcatacaacgtagtaataggtcgccctaacctgaaggagatgaagatcataacttcaatctaccatctcataatgaaattccctacacccgcaggtgtaggattagtaagaggagtccagtcagactctacagaatgttacaacactgcagtcaagatcgcagatgagaagaagtcatgcaacatgatatacatactcaacatgaatcgttcagaattgaagagatcccacatgaggaaaagctcgatttatgtaacaccctactaggttaggcatgttatcgtgatttaaagctaactgtgccatacgttgctaatcaacgggcttgttggaaaatatgattaattaaaactttacttaattaacttttaattaaaataaataaactttacataaattgggatcccgtatttgaaaagttacaaccataatacaaaatattagttacaaaagttgtcacctagggactaagcaaaatacagcctgctatctcgaagatcgaacactctaggtctaaccacccccaatatgtacaatcctcatctgctcgcactcactgctgctcaaccttagctttgaccttagctacacatgtaaagagtaattgtgagtcaacaaactcagtaagaaaagaataatcataacataaatcggattacaactagacgcccatacacccaatcataaccctatcccacatcccacgcatactgagtctagaatatttatgcgatagtactattgaccataatatcagcctatacccggtactctagtcgtacatatgtgatagcgtcaatagtacttatgccaaatatacattcatcggtatccaataactctatgtatactgataccgctatttcaatatattatctaacatgcattcataaacatgcacgctaaacatgtaatcacatatgcacgtcattatactaatcttcgatcttgaattcaggtgtgtcggtcaacctgagtggaactgctgctcaacggtttacaggcccctaagtcacaacattcataaagctgataagtgacacactaaatcacttttcagggacttaaaatcaaaaccaaaagtttttctatcgatggagagcatgacaatacactaagtattgcaaaaatattaaaaaaaacaaggattttaaaactactagaactggtaaaccgaattcccaaaacagaaatcggttctcagggttttacttggggaaacggttaactggtttcttgtaggaaaccctaaaaacaccaccatcaactcaattctatcccaaatcaaatcaaaccttccagaacacctaattaagccacaatgaacatattccaagtgataaacacatgtataaccctcaaatacagacgccaccattaaagagaaaagtttgagttctaaagctcaaactttgtctaaactcaacaactagcaataattcatgcttaaaacagctcaaaaatctttaaaccaacatcaaaaatcactctctagcatcaatacaacaaaaagtagttgaattcccaaaaataactaacaaacctagcttaattcatgagaaaatcaaagagaggagagtaaatgagcttaccttgggttaaatcttgaaatccctatagaatcctactaaaacacccagaaattgtgaatcaaaagcttgattcctactagttctatgagaggtttagagaaagtgagagggtttgaagagagagaaagttttttgtgatgttaatcttaatttttccttaataatctaactaatactcagcctattacatactcataaaagacaaactataggttattgctaaaaataaatatccatcttattccacaaattaaactaaaaccaaaatgactttaataacatttacttcattaagaagtaaccttgaaacctaggggtattatggtccaactccataatcttgaatacacctgacattccaaatgtctatctacaatacccactatttctaaagtaataaatcataataaagtgactctacaggccaaacatcgcattccactagtaccgggcatgaaatataaaaattataatatttcacatataacacaattagcaaacctagaattcaaatatatcttcacaattgcataaataataattaaaagtctaatcctggaattaagccctaatcatctacaaattctcatataaaaactaagcggtgattacaattatccccccattaaaaggatttcatcctcaaaatctaacctgaataactccgaatattgagccctcatattgaactccaactccaaggtggcttcctccaccttactgtttctccagagtaacttgaccaatgctatggtcttaaccagaaggactttatcttttctattaaggacctgtactcgttgctcctcatatgacatatttggctggagctctaggtttttataactcaacacatgagtaggatccgagatgtatttttgtaacatggaaactgaaatatgttatgaactgatgatagtgatggatgcaaggctaaacgatatgcaactaatccaaccttctcgagtatctcaaaagaccctgtaaatttagtgcataactgacccttcttcccaaaacatttcatccccttcatcggtgacactcgtaggaattgatctcctacttgaaactctacatttctgcatttcggatctgcatagctcttttgcctgttctgagaggcaagcattctagccttgatcttctctattgcctcattggtttgctgtactgatttcgaacctaagtatttcttttctccagtctcatcccaatgaattagatatatgcatttccttccatacaacatctcataaggagccatatctatagtacttagatagctattgttgtatgaaaactctaccaatggtaaatacttactctaggagccttcaaaatacattacacaggcccgcaacatatcctctaatatctgaatttcgctctcagactatccatcagtttaaagatggaaagatgtattgaacttcagcttggtacccatgccgcgttagagactttcctagaactttgaagtgaactttagatctctatccgatacgatggactttggagccccatgtaaccttactacttccttcacatacaagtttgcaatattgatccactgtgaaggttgttttcactggtagaaaatgtgatgacttggtacattgatccataacaacccatatggaattgaacattcccgtgttctaggtaacccaatcacgaatctatagtgacatcctcccagttccactcagaaagagttcaagggctgcaataaccttataggtctttagtgttcaaccttaatttactgacaagtcaagcaccaagatacatattctaccacatccttcttcatcccgcaccaccaacaaaaaggttttatgtcttgatacattttggtagtgcgaggatgcaatgtatagggcatggtatgagcttccttgagaatttcatttctaagttccttacttctcggaacacaaactcgagttttgtacaatagcatcctattaactgacactgtgaaatctttagcttaaccagttaaaacttcttcttaggttttcacttactctgaatctgttagctgggcagctcaaattttgactaacaaatttgattgcaatgaaaaattattaagcttgaccacgacaaactcaatacttgatttgatcatgtcatatgacaactcgatgtgaaaatcataatcactttagatacatgcccgggatgttggaaatattttacca

SEQ ID NO: 381659 - DNA, 1283 bp, Cannabis indica
tctagattaggctttggagagattctttaaaaccctaacaatgagagaaagattgtaattgagagaaggcagagattaaagtgaatatcactttttgagctttccttttagcaaattccgacgagtcatgccaaagccaaagctcccctaaagtgcatgacagtaaggcaaaaccagaaacacagacagaccttcctcttctctctctctctctaaatctgtgtattttaatatataattatttgtattaattatgaaataataagttcttttggttttgaggtatcttaattaattaatttgttatacacatgttgttctagtagtggtggtactttttattttgtaccatacactcatatgttcaattcaaactcaactcagtctcaaggccaaaagtcatgtctactgtactacattttttggtctacacttttttttttaatttttatatatttaatttagtaataattataaaatattacttatcataatagtaacgtatataactttttttcataaaaaaagaaattgtatgatatatttagagatcatggtatattagtttgttattaaaaattgaaattttgaaattaagtacttgatagaagacaaggagaatctgggagaaataaataaaagtagtttattattattattataattaaaaagagggaattattgggtggaatgcatgttacattaatgttaatttgagttgttttaagaaaagtccacatggtggcttgagttgagtttacacattaagttaagcagttacatttcttgtaggaaaatttagtttatttattacctatatatttatataaaggaaggaaagcataaaagggtgtatgtgattctctatatatttttttttttgtctattatttaattttgtgagagtataatatgattatttactaagtttaattctacattgtttaaaaaatatagttggacatatccactataaataaattattttcttgtcatttttatttgtatcaaaatttatattttttctttcttgaataattaatttaataaatcttatctagttaattagttataatatcttttaaaaaaaatcataaatcatttaatttataatctataatatatattatattatgtatatgcgtatataaaagctaaagatatatatatatatggaagaggtttcaatggttacatttttattgtaactatcatggttatatttttttaagtcattggattactattaaatggttgtgattaatttggaaattaaataaaaa

SEQ ID NO: 381660 - DNA, 1434 bp, Cannabis indica
tggtaaaatattcccaacatgtgcatcatgagtgttctcttcagcttcatcagaactgctttctccagattttgcatcttcgatcatgggattgtcttgatttcgatcttcatcctggtgacctttctaatgagtagttgcctcatgtggatcattggagtcccctactttagtgccagaactagtaaaacgaagactaaacttggttcgagtgagggccgtgattacttgaacataatttgtaattgggctcatgcttccttcagctctcaatgaaagtacttaaatatttaccgagattttcgaaaattgattataaacaataagaattgaagaaataaataactaaaagagaaaaagtaaaaagagacaaataattttttacatggttggggcgttaattagccttactccacgagtcagtgttattcagtagttctttagcttgaaaaattacaaagaatacatattctctagtttgcctgagcaagtgttgcaagtgaattcaacccttaatctataagattcgatgggtatttatagtaatttgagaattatatttagtttctcttttctgtctattggggagcatacaatgaataacatacatgggttgcttcgctaagtctagcccacaaaggagacgatttgctgactaggtagattagatttggtttgatttggtcaacactgtgtgccttgattgtggataattaactttgagttaattgcttgatgcctgttacacgaagtgtccccatctagcacgatatgatccttaatcgagatctgatagctattgttttcttatatttgtatgcagaaatataaagggaatttggatcagtcttttgggaacaagctatcttacccttctagcctcatgataccagacttgcctacgagaatgattcgtcaatggcggaaggctctgtgattgcagagttggggtacattccttgaagaacctatccaatcgggcttggcccaccttttttaggagacccaccgatgggcctaggatactgacctaaattctacgtgtccaatgctagaaatgtggataacaataggtctacatcatacaatgtatggtttcttaacttgacacatctttttcttaactggtgttaatttacatttcaaatttaaaataaaaataaaataatatttcaaaaataaatatctttacaatttatcatttttcgaaaatatctccagcgtaacattggtagctcgtgtcctagcacgagagtgcatcttacttagaatccaggtccatgagtacctattgtcctaatggaccttaaaggtcggcccgagcaaatggaccttgagtgtaggccctccttgatggactttaaggatcaaccaaagcgcatagaccttgagggtcgaccctccctaatggactttctgttggaaattatttta

SEQ ID NO: 381661 - DNA, 1580 bp, Cannabis indica
tttttcctctattcctctattatattctagtctatggtgaaacccattgcaaaccaatgggtaattttatcatgtaaagtggtagtttagtttgtaacactttgcttcaagtctttattgggctttcaccatatacttatgatttttatacactgatacgtctttatcatgatttttattttagatcaaacacgcttaactatgaagttctactgtgatgagctaccaaaaactaagatacacatgttggtataagtaataccaatcaatctatttaagtcatctttaaatatttattctcatatttacacaacctaaaaatcattatcttttttaaataatgtagaattatacagtttacctaatatttctcccaacaaatcacaaaactacttggtgttaaatgttgtggtagttataaatacaattttataacaactaataagaaaaatataaataaaagtgaaacaattataattaaataataagaataatgaaacaacaatcaagattggcagcttgtcgtttccaaaaaggtgtggcaagttttattgtcgttgactactttgtttccaaacttcgatgtcgtttttgtttttagtcatcaattccaattatagtgtttattttcatataagctatcttgtcgtattttaaatttttggccaaaacattggaatgtcgtttttaaggttacaataaaatttttattcaattcaaaaagaccattgatggtccacagctgagtttatttgacaattaaataaatacgtataaaattaatacccataattacttaataaaaaacgtatcaaattaaataattaacaagtacataataatacattaaaactagtactttcgaaataaatagcaaaatccaaataccttatataataggaaaatatatttataattaattaagtttgttggtgtgaataaaaatgggcatttcccttagaagtgaagcttaggaaaaaaacaaagactttacacacttaaaaggttcatttatttggtgtattttagtaccaacccattatatatatacaatataaaaatgccacatgaatatattaaagatttccccatgaaaaataatatatattaatatattaacacaattcaaatcatatatagatataatgtcaatttcattaggtcattcattgtttggacttataggcaaaaaataacctatttcatatttcaacttgcaaatagactatagttttaaaaaatcaatatacaaaattattttcttatttagctagttgaaaatagggaaaaataattagttaagattggtctaatagaaatgatttggagctacacactaaaaagatgtaattattcccaagttataataaactattaactagttttaatcataattttataaaatgataaatattattttggatcttgtattttacaaaaattatttattagatcatttattttgtaaaacaaacaaattggacttagtatttttcgatatagtatcaatgtaacgtccccgctgttagagattttataacaatggaagaaaatcaagatttattacaactctattgtaa

SEQ ID NO: 381662 - DNA, 1461 bp, Cannabis indica
aaaaactacttcatccgcctacaaaagagaaaagctcaaatcaataaacttctgtatataattctgttcacataacaaacccatttacaaaataaacatcatacccgtgcaccaaggccgacactgatatggttgataatcttaaaatcagatatcttgaacctcacaacatgcccccgttcttcttcttcttcttcttgttcaatagaaacagataaagcactctcaccatttccctctgatctcacggaagtcacatcttttcttgacaatgtacaccgcactcctcctaagaatgctaaactatcatttttcctaatgaataacataggactaggcctattgagtcttgtcaacaaatttcgattaccataacaaaattcagagctttccagacttggaaatgtactaattctagataacgccattgatcaaagccctgcataaagaaaaatattaaccataaatatacatcattaattttccaaaattactcattaaaatatgatcacctaagtaattcaagttcacagtccaattgatctaacaaaattaatacaacaattaaaagctggaactcattaatcttgctaattcctcttcaaacaaacacaacattaaggctctaatctttcgagctgaaaattaattcaacttctttctatatgcaaaaaaaagaaacccgatcctccacttgatccccatgaaaattaggggaaaacatttgtcaaaaaccattattttgcaataaaaaaaaatgattccagctaccgaaaactactgaattagaatcacaattaaacctttccctccaattttcattaaatttctaaacaaccaaacggtcaactaatcaattccttctttttgttttgaaaaaagaatcaaaaactggagaacttaccaaaaactcaggctcagctacagagataattagagttacagagatatatatagagagatgaacgtggaaatggatgggtgcttgtgagtgttgcgtggaagaaaagagtgaaaacgtttcgccatgggttccccgcgcgtccacgtccgcctcctcaaatatctctcttccaaatccaccatcatttttcacttcgggccccacttctcatgtttcaaactccacgtggcacttctcgatgaggccaagtatatgatgaaatccaaccccaacaatcggaatcaaacggtgtgtatgttcttgtttcattatagttacataaactatctcaagtataggaaaattttacaatttaaaaagattttcatttgatgcatttttatttattttggtatttaaaataattttttagttaaatatttatataattatatacattatagttatttaacacatcttacaaagttttaaaaaattaacatatcgaaaatatgattcaaactgaattgggtacgtgactattttattttacatgtgtatgaaatagattatttgaa

SEQ ID NO: 381663 - DNA, 3584 bp, Cannabis indica
agagagagagagagtagtgtttaaggtttaacattgtgattctttttagtacttatgggatttagaaattaaatttataaaaatgtggtaaaaaaataccataaaaatctttaaatttggacaaatgccatataaagatggtaaagttaaaaaagccatatttatgaaacttttttatagaatcccatatagggtgtaattttcacaattttgattaatctatgtttacgagctaggtctattcttaggaaggtagcttgctatggagcgttgggactgaagatggctgtggcccaagaaaaataagagaagattgttacatataaaagatgaaattataaattgtatgggtttttatacttttttgtgcaaatatatggtctttttctctaaaaagattattttatgagaaaattaaagaaaaagttaaaaaaactatatatgggaaaatcaagaaagaataaccaagtaaccagaagggtatacagttagtataagaaagtattcaagtattttattgtattttttctatttatttaacttttgtctaaaaaatttcgtaaaataatttttttagtaaaatcaatatttttgtaaaattatactttaaaaactattaaaatgaaaattcctctatataaataaaaattttctaaaaatcagggtatttttccaaaaggcatgtgctgcctataatcaggccattttatgaaacaaaacaaaactagtattaaagggtacaattcttgtttctttttttttttttttgaattaaagggtacatttttttttcctgaattaattaaaaaaaagtaaaacaataacacattctttttctataaaaggaaaaaaagaaaaccaccattggtagttggcaccactaccaccttggttaatctacctgccgatgaagtgagagatgtttgagtagtaggccccgttctcccttctagtcaagatttctacctaacttgattttcacacttatcagttgcataatgtgacactatttaactaaacatatttatttttaaatgacataaaattagtttataaagtatataaatatctgtttcaaaaaaaaatatatctcataagtaatatagaagaatgtattataagggtaatttgcggccaaactctctgagctttaaggtttggcatgatcaaccccctagctagaaaaattagggctaaactcctcaacctccacaatcgttttactctgtactccttctgtccactttcgtctgttcagtaccaaagtggacaaccacagtgtatagaagttacacttggacaatttttattagtgcacctaatattaataattaaaaaaatatttaaaaattttaaaaatcggaaaaaaattaaaataattaaaaaaatcagaaaaaaaattgaaagtaatctattttttccttcttaatttcttcttcctaaactcatctctttctccctctcccaatttccctcaccaccatccacgaaccatcattccaaccacaacccaccactcactttcgagattagtcaacaattagtctcaacgattgagagacatcgccagtaaaattcagtcgagaaatgattgaatcaacacaagtagcctaggacccattaatatcaaggatcaatgcttgcaagtctcggggtatatccacgcaactaggaggttaatcccggaataactcatgagtagagctagtaagatcaacttactaagttacaattgttagaggattctcataacgatgcgttcagaattagatcttttcataagcataaaatccatagatccctttctcatctatccaacgcattttgaatcgtcctattccaacatatatcgaaagtgttatgtctaaaatactattaccactaaattatgacaactgggtgtgcgagcccatgagctgttgtgtaagcccatgatctattgtacgagcgcatgagaaactgtgcacgcccatgagtcgttggacaagctagggatcattttggtgagtcgtggagcatttgtgtgagtcatggagcctttatgcaagtggtggagcatgcgtgcaagccacagtaacgaggagctctcattcgaggctaggaggctgcaatacagtgagacgggggctcgcatgcgagtcgtatgtgtcaagtggaagcgtgtgcaagtggggggctcgcatgcgagtcgtgggtgtgtgtgttgtgcattgggggctcgcgtgcgagcccatgtggggggcctcgcatggaagccgttgtttgtgttgtgtgtttgtctttcagaggttgtaagtgtaaggtgagaggtggatgcatattgacaagaatgacattggaggaggaatcaaaggacaagacatgcaagtggaaagcgtacaaccacacctcctaaagactctaaaagtgagaaggtacaagtaacggtaacaacagacctgcgaggtttgaggacccaaccaagggtacgctgcaaccaccctctagcaacctgtaaccggagaccacatgcctataatcggggatcacttgcctgcaaccagggaccaccctcctacaacttataatcggggaccacatgcttatagctgggaatcacctgcctgcaacgagggatgacccacctgcaacctgtaaccagggaccacatgcctgtaaccggggatcacatgcctacaactggggaccaccctcctaaaactggcgaccacctaacaccaaacaagggtacgaggtgcaaggccacctcctgcacctgcagcatgcagcgtgagagtaacactttgtctccttgggaccactttgtaccttaggcgattagagcctataaatacccctttctgagatgtgagaggtggttggaaaattattcttgtaacttgaccttgatagcaatagaaagtttatcattttctctctattttgagatagcaatttgaattcatatttcatccttattttcgtcttagatctgagcttgaagcatagtttgattttccagctaataagttagttgacgatttctcaccgttaatcgttttggcgccatttgtgagaacgacatgcttgagtcgagctgttcctttaaacacaaataatacaaaatgcctagattccatcgccacctttagggcgtggagattcaccttgataacaactagttggtcgctttggggcaagacctccctccaaccgtcattggagaagaaggcactaatgatcacaacccttaagtaagaggagaaaatgagaatgttgtccagcctcaagtaggaggagagagcacatgcaggcgggaatcttaagcaaagcaaaaggagatcgtagccacaaaaataccctagtggacgagcagcgtgatagacttaccgcctcaatcacgagcgaagataaaggtatgacacaaaggaaggaggtcttattgtcagtgaggtacgctccatcaccaacactacaagatcccagtaccttgcaacatcgccccagaaaggagaagagagctaaatgttgggaaattttttaccaggatctagatttactaacaagtatgttccattaacgtcctaaatatgaattctctaaaa

SEQ ID NO: 381664 - DNA, 2034 bp, Cannabis indica
ttattagtagtacagttattctcacagcaaaaaaaatcttaagttccaatctctttaaaaaaaagcataatattaatttgatttttttaaagaaatattttaatatggtttataatttttatttgtaattttattattataaataaatgagtttgagaattatatgatccaacgtggattctctacatccaacaaaaaaaaaatgcaggaaggaatttcccactattaattacttttagcactagaaacacatgtaagattgaaaatgaaaatcaatcaaaatatcattggactaattaagatttttagccctttaatttcgatatgtcactacaaaatgactaattataaattattatgttgtgacaaaaaatctataactaaagagtattagccacaaaaatcatagtttgttgtgattaaatgtattattaatcacaatactagttgtgactaaaactatattagtgacaacttgtatctatatatatatattatgtcttaatccacaagtaatttttgttacgactaaaaattaaacttagttgtaaaaaaattatgttgtgactaaaaaattatcactaaaggtagctgttttttgcaggtagcaaatcatgcctccttaacttttttggtcgtttaaaattcttctgaactattaagatttgatttaaggacttttgttcgatttcattcaattttactaattaattcagtaattgtgatgtactaaattatactctctggacttttatatctaccaaatcatatcctttaaactttaacatgtacgaaattattttccctgaactttgattcatgttatacttttcttactgaaattggacaaaagttcttaaatccaacaattttattaatttagggagaatttttaacggttttaaaagttcaggaagcatgatttggtactaaatctaacaatctcaataattcaagagaaatttttatcttaaaagttcaaaaaatgtaatttagtacataccaaggtggataaaaattctaattagcttgatcaaataataatatactttcatagtggcgggccaaaaaataaacttgattgaacagggagatttttttctttaagataatatggtatgcaaataatctttgttacttgaaggggggaaattttaatttctttaaaataatatggtatgcaactaatttttgttaaaagtactagaattggaattatggtctcttaaacttatagaagtaagcttaatcatcaaaactaatctaactctttaataatgtttgtcttttttaattatgtcaccaacacttgggaaaattaaatttaggttccgatcttcagttctgtattagaaatagaaaaatatcttaataatattaaagtaaaatttattaattaaaataattattaattaaaataggttaaatttattactttattatatttataatttttttttttttttttaaaggatcgagttaaacatttttaggcccccgcagtccatgtcatgatcttatcatggtaacagttcaattcaatcttatcatggtaccacagtttcaatgtgcacagaagagtgaaagcaaccacccatgtaattaatgggcccaatttattaggctgggcctgttagctaatggtaccacgagcatagacaactacggttaaattctccatcaccacttcattcactacaaaatttggatgaagtgatatttgattttataacatttttttttttttgaaagctgattttataacatttttaaaacaacgtcaataagagtattttagtggcatttggttgaaagtatcactttataaagagtaaatgacagtaacatttccttaaaagtgttagatttatatgttttagtacatttgatataaaatgtcactaatttatagtagtttttaaaatatcactaaaatacgtacataatcacctttgcagaaatgagacaaaattataagtttaatgacattttaaaatattagtagaatcaaaatgtaatttttttttttaaaaa

SEQ ID NO: 381665 - DNA, 4114 bp, Cannabis indica
caagggatccctatattttagttatatttcataaagaaattttattctgatttaatcaaaaagtttttaactaaaccctactttttataaactaatagaatagctaggaataagtttgcaaaagcacacacacgtggcgtccctgcaagtcagggcgttacactatgtcagcagttaactgagataaatgaatgacacttttaatttgctaacagtttaacagtttggagggctttactatcaaaatttgaagttagaagattaagtacaagtgaaatgatagttggaagggttagaggcaaattactctattataatacaattataatacagaaaatattaattattgacttttttattatttgtgaggaattatttgctttctttgaaaagagaaaaagaaaaggtaatattaataagaaaatttaaaacattgagattgagttaatacctgacattttttttagttaatactacagctcgggtctccaaccttttccatacgattaatttaggtcctcatattacaccacactccaaaataaacaatactaaaaaacttaaaacaaaattaagtttagaatttagaatttgaccaaaactacattataaactcaatagtttgtcaaaacaatccgaaaacaaaacacaacttttcttcttaatttctgaaaactgaatgtgtcacagttagttaatcgtgaagtttccaaatcattttgaatcgcagtattgttatcgaaagctaaaactaagatagcaaagaagaaagaaaaaatacttagtatcgaaccattattgcaaccactcatcgtcgtcttacttaggtctggctcaagtattcggcagtcattgtacaaggctactatttttttaaagcccatttttttgttttattatatacataaataaaaaattataattaaaaaatttatgaataaatcttaaaaaaaaaattagtaataaaattgtaattttaatgtacacggttttttttttttttgaaaaaaaaaacagcctaattttaaaattttgcacaaggtctccaaaatacttggaccggccctggtcttactaaagaaatgtacctaattaaatatcaaattttaccaaaattaatataataatttttataaaatatcattaattatttttaaaacgcaaatttatagatgtattaggcaccactatagtacctaaaagcctttaatactctcttttcttttccttttttttgaaaaaaaagaacttttagtaatttaccataagaacatctcttcatatttaattagcacaaaaacaaggactatatgaaagacacaaagactagccaaatcatggccacatgtttaaaatgaaacctggtatatttgtttctttatatttgatggttttttttttaattattataattattattacatgggcatcttccaatttatgtgttcggatccacatgcatatcacgtacaattcattactgaaatttcgattttttttcattatgggatgaatatttttttaaaaaatttgtataagttttatactgtatactgtgttaaagttttatggtagtttcatagttattttttagttgttccgttgttttttagttgttctgttttgttgtttaacaattatttaaaaaaatagtacttttataaaaaacattcaatgacagtaaaattataaacttttacctaaaatataatatttttttaaaaaactcaaaaatattaaaatgactaggctcaatttttatgagagttattttaagaaattcaacaccatatctacatagattataaatggttaataatttttcatattattaatttaataaaaatatgtaaaagttaataataaattattttgtaatgattgaaacttacagcaaaacatttttcaaattttatcacaaaagtataagattaaattaaatgaatagatttcgtgatcacaaacatggctcattgatcacatcaaagaaagtgtagattattcagatttgtatgtgaaaacaaagtaagaatagagattggaagaaagaacttttgtataagacaacggatcatattctaattcttatcatacatttacatttataatatattatctacagcagtaacacatatctatatacatcaaacaaaaattgggcaccccaaccctgtcgacatttaaaaattaaataaaatagaaaaaggaatatgttgaatccaaatccaaattcaacatatcattttgattattgtatattaaaattacgagtactataattattgataatttactatctagttaagatacatataatttcttttgtaaacaaataaataaataaaagaccgcgtattgacccggtcaaatccattacttcaaaacaacagagcataaattatggtaacgtaaaatggtgtaaaatgaatttatatatgattattaattcatgtctgatttctaataaaaacacgcttaaggatttaaacggatatttcttcgatgccgggaggaaaagtaatggacaataaaagtagagtttaattagtactataaaatatctaaggagtcaattcgaaacacatctcaaaacatcttagctaactgtaatgatcgtattttagttcactacatataagattacgtaccattcctaacccagaaatattttccatcttattaaacactgttttcttctctactaaaccatatatagtttctgcttatttatatacataatctgttttcataaaccaatcacgttttaagtttctttcaactcgcaaatggtctcaagtagtcctattttacgtacagcagagtactgcattgagtcattcattgttctaaattccaaaactgatctgaaccaatacaagaagaaatggcattctgcttttgttaccatctattgttccagagctttcacctcactattcaaatcttctccctcaagaaaagctagctataccaaaataccaccctcgtcttcccacactgttgtcgatgtcaaggtagacaatgggttcgaaatcgatcagaccaaactcaaccagctcaccaaagacaaagatgtttctaagcttcaagaattaggtggggtcgatggcctagccaaggctctcaaaactgatgctgagcatggaattcaaagtaacgacggagacatagcccaaagagttgaagagtttggctccaacacgtaccgaaaaccgcctaccaagagtttcttccattttgtgtggcaagcttttcaagatcttactattgtcattcttattgtctgtgctgcactctctcttggctttggcatgaaagtgcatggaactaaagaaggttggattgatggtttaagtatttttattgctgtttttcttgtcattggtgtgtctgcaataagtaactacaggcagaatagacagttcgataagttatccaaagttagcaacaacatccaaattgaagccattagagatggacgtcgccaacagatttcgatattcgaaatcgttgtgggagatatcgtttgcttaaagattggagaccaagtttcggctgatgggttgttcttagaagggcattccttacaagttgatgaatcgagtatgacaggggagagcgaccacgtagaagttaaccacaaacagaatccattcttgttttctggcaccaaagtggttgatggctatgcgaaaatgctcgtaacttctgttggaatgaacacaacatggggacaaatgatgagccaaatcaacagcgattcaaacgaacaaacacctttacaagctcgcctcgataagcttacttcggccattggcaaggttggtttaacagttgctctccttgttctcatagtcttgtttgttcgttacttcacggggacaacaaaagatgaatatggaaacaaaaaattcaacggcagcaagacaaagattgatgacatagtgaatgctgccgtagagattatagcagcggcagtcacaatcgtggttgtggccattccggaaggtcttccacttgctgtgacgcttacacttgcatattcaatgaagagaatgatgactgataatgccatggtgaggaagctctctgcttgtgagaccatgggatctgc

SEQ ID NO: 381666 - DNA, 3073 bp, Cannabis indica
ggatccaaaacataggctaaaaatagcctaacacaagttcgttattacaggtagttctacaaagcaaacgatcgaattaatgacgtatacaattcacaacatattggtgttattgatcttctgatctgtttcaaattttgtggtgatttcagaacccaatttctcaacaaattggtgtggtgagtgtggatcacttatcatgggataaaccaagtacaaaatgggaaaattaacaggacaaaataatttgaattttggctattgaagattattagatctccatgccattagaactaaatcaaagaacagagctgaaacaaagagaaagaaagagagaaagaactatagaaagaatggagaagaaaagacaatctcattgatcaaagattgttacagactatttatacagagaaagaaattaaacaatctgctataacagaaaaccagaaatcaagctaacagccaaacaacaataacaaactttataacaaactaactaactctcaacagtggtcttaacatctcccctcaaactcataattgaaaggtcttcaattttgagtttgcttctgaatgttgagaatcgttgactagaaatggctttggttaagccatctgcaagttgatcaatggcagcaacatgcttgacacttagcattttgttcatcactttctctctcacaaagtataggtcaagttctatatgctttgtcctagcatgtagaaccgggttctgtgtgagcattatagtgctaagattatcacaccaaacagtaggaggctgaggaagctgaatgttaagttcagaaaataggtagtgaagccaagtgagttcagctgtaacattagcaacactctgatattctgcctcagtactggacctagaaatagtctgttgctttttgctcttccatgcaatcaaattggaaccaagaaatatagcataacccgaagtcgacttcctgtcatctggatctgatgcccaatcagcatcgcagaaagcagtcaaatcataggattcaggtctagtaaaatgaaggccatgactcagtgtaccactcacatacctaagtatcctcttcacagcttgccaatgtgtagatagaggattttgcataaactgacacaccttgttcacactgaaggacagctctggtctagtaattgtaaggtattgtaaagcacctacaatcgacctatacatctgaacatcatcaagaggttccccctcatgagctgacaagcgcaggccacttatcataggagttggagagggcttggacccgaacatttgagctttgatcaacaagtctttggcatacttagtttgacaaagatgaaggccacaatctgtgtagttcacctcaattcccagaaagtacctaagtggaccaaggtctttaagggaaaattgagtattcagtgtggcaatcaacttagttacagtagcctcatcactccctgttactaaaatatcatcaacatacactaaaactagtgttgtggattgagaggactgattaatgaacagtgagtgatcagactttgaagagatgaagccaagggaaattaggctatgttgtaacttgtcaaaccaagctctaggtgcttgtttgagtccatataaagccttgtttagtttgcacactaagtgctcttgaccaggaatttcaaagcctgatggttgagtcatgtaaacttcctcttgcaaatcaccatttagaaatgcattgttgacatcgagttgtctcacagaccagcccttggagagagcaagagttagtacaactcttattgtaactggcttaacaacaggactgaatgtttcagtgaagtcaaaacctgcttgttgatgaaacccttttgcaaccaatctagctttgtacttcagaacactaccatctggattttcctttttcttgtagacccatttgcatcctatggcttgtctcccttcaggtagtttcacaagaatccaggttttatttcttgcaagagcaagaatttcatcactcattgcattattccaatgctcctgttgaagagcttctttaagtgatgttggttcccttaaagccatgaatgctttgggtttaaacactcccagcttagatcgagtcatcatcctatgagcattatttttgccaggggcatttaagcagccagatagaagaggtaaggctgctggagatgagaatgcaggtgcaggcctggtgtctggtaaaacagaacctctttgtagtggagaaccagcatctggtgtgatagtatctgatgcaccagcatctggtgtgccagtacccgatgtaccggcatctggtgtgcctctttcagcaagaccattttgttgatgagtggtaggacaaggatgtctatggtggatcccattgtcagcaagaaaagatgtaaaggacctatattcaccccccaatctgtttgtaaagttttaatagatttgcctaattgtaattcagcttcagctttaaagtgttgaaaggttttcaaggcatccgatttatttttcaagagatacaaccaagtaaaccttgaataagcatccacaaaatggatatagtatttatatccattaaaggaagttgtgtgggaaggaccccacagatccgagaccactaattgaagtggctcagaaataatagtagtagatgctttgggaaatggaaatttgtgaatctttccaaggcaacaagctgaacaaacagaaaattgagaatctttattaagaatagggacattacaagacttaagaacagtttgaacaatcttttcagaggggtgtcctagtctattgtgccacaaagtaaaattgttttgaacattggcattacatttgaaacaatttgacacagtgacagaggagttatttacagtagctatgaatgtacacttagacttggacgattggtagtccctactgctgctggtttgagagtgaactggctgactgtagttggtggtcttggcttggtcagggattgagtagataggacctatttgggattggtcaaaagtatataggccattcctgtgtctccccatcagcaaagtggtatga

SEQ ID NO: 381667 - DNA, 2006 bp, Cannabis indica
cctctctcagcgctgagctggaggaagcgaaggatggggaggttatagctgttgacggtggagatgcggccggcttgaggggtgaagacatcggcgcgtgaaggatcgccgatgttctccctaagcctcatggagcagaaggtctcttccaaaccgttagcttcataccgtccgccacggctcattctcctccgctcttgctcgatctccctctgcctctcgtcctcgtacctctcctcgcgctggtgctcctggctagacctcaaggggctgaccaaatccaaagttcccttgactctgatgatgctgttcctgtcgtcgttctgaccctgaagcctcttaacggtctcggagtcaacattgaatgcctcttcaagatatctgctgttaaaccccttgaagatgttcctgtagttctccgatgagtgtcgtccttcgctcctttctcggattctctcatcaaagcgagcaccccgtcctccttctctccttagctgctcaaactcgtcttcggggtttccagccaagtagaatctctacacaagtgttgttgtaaattagctaacataacataacataattgttattgttaaatgaattgaattagtagacagaaacatactctgggattgtcatcgagttggttgttgacattgctggtgtcaagaagagaaacaaagacaagctgttgatcaccattgttgtaactccagtaagcaacaccagctgggatagcaacaatgtcaccttctctgacgtgtcgaagcttttggtgtcggtctggttgagagccttggctctgtccttgtccttgtcctctttgggactcttcaaaagtctcaggacaaccagggaaagtcactcccaaaatacctctacctgaaataatagaaagtgaaaaacagagccaaaaacagagtaagtaaatatatttatatgtattaaagattggacctttaacaatgtagacgagctgaggagtgttggtgtaagaaggcaagtgaagcccattttgttgaatggtgtaacgaacaactgccacaccagcacattggaactggttgtggttggggttccatgactcgatgagtccggcttcggcttcgactcgggtatcgggctctcgggcttcgattctgtctatttggcattggttttgttggcgatatgactcatcttgagagcgtgagcgtgagcgagagatggctgaggtgccttgcaacagaagaaagaagcaaaaggaaagagagagcaaagccttagtattagccatattgttattactctgttttgaggtgaattggagaatggattgtgtttggtatttaaagagaagttatgcggagacacgtaagttgtgttatgttattattgagttgtgtttttggagttaaggaatctttggacactcttcagttttgcatggctatcacaactcatttttgttacacctcatttttaagtaaaagggcatgtgtccatttctctatctctgtattcagagaatagctacaaaaatttgctacttcatctctaattttgtaacctttttttatgttctgtttgttgtgtattgaggttcaatgaacttgtatggtagtgtgttttgatgcatgaaaattatgaaatggaagtaataatgtaatgttggagatctaattcaagagttaaccttattgtaatgagcatcgatatataaagtaaaatttctattcagtaaaatctttcgatcatattctagtgagatattaacgcttaaactacttaaattatacaatttatgacacttaattctataaattaattttttaggtgataaaaacttctaaactcacgtttttattctattttgttaaatgttcataattaactatcacggtaaataatttatgtgtacaaacttgtatacttattgtgttttgattagtccatataatttagttattagaaaaattagttttaagtaatttaaaaataaataaaaaaaaaattataaaaaaaaatta

SEQ ID NO: 381668 - DNA, 855 bp, Cannabis indica
atttaaaatttcacacaatatttttgtaattttttttttattatttttatgtagttgtgaaataaagttactatatcaaaattatttccacacttgatacgttacattaccaaggccaattgaagtgcttcaaactcgatcccaaatttgagaaacaatgtaagtgcagtacgagttcaagcaagaaaaattgaaagagtttcgatgattcctgtacgcactacaatggcttctgcctctgatttcgatgccctcttctccattttagttgcagccctagctaatttccacaaacaaccacactctctcctacccttaatcaacaaaagcttagccaaactccattgctcgcacatccaaacaccaattatctctcttcttttgacccttcttgcctctaaataaagaatttcccttttttctctcactgactttctatcaagcagaccctgacgcggacctcactcgaacatcgaccccagtttggaactggacgcgattccaacctagaacttggactatagggctgttcaaaaaaatcaacaaatagcttaacctgaataaaccgcccaatccaaactgtataaagcgacaaaaaatacaacccgaataactttacgaaaaattcaaactgcccaatgaatatattgggcaggttgaatatttttctaacccgcccaaataacctgactaaaccaaataaatcgatttacatactttttactaaaattatttataacataatgtataaattatgttcaatatttgaactattttacatttaaagttgggtaaataccattttagaccctgtattttgcaaaagttacagattggaccctgtgttttgttaaa

SEQ ID NO: 381669 - DNA, 3341 bp, Cannabis indica
tttttttttaacctcttatttattgagaaacaatctttgtactttcatcaacaacaaaaataaaaaattaacattacaatctgttattgatgtttttgggtgaagcgacatgtggcattttaaagatgtaatcggtccatgtaatacccgacccaagtcttattgcatgcgaaggccaagtccaaactagaggtggccccaggccatcacatctctaggaacctcacttccaaaagtaagatcctcttactctttgaagcccatttagccaaccagataatgaagcgaacgacgtcctccaaatgattaatgaagtgtacccagaagggaagcttaagaggtacatccagaagcccttattggatgacgtgactgctctcaaacgcctagcctaccaaattagatcacgtccctatgtcaaggcttggtagtgcatgtaccacaaagagagacatattccctttgtccaacgacatccctttggccttcttgtctaatgtagttgcacacatgtgtgacacttgtccaaattgcatgggtcctccactgtacgaacgcttctgccccacgagccagaattctatcgtgggcctcgaggtcgtgtatgttaccctaacaataggcccattttgcacaaaaaccctagcgtgtcacgggtatgcccagacccgaatctaagcctatataaactcatatattccttcatgtaaagggaacatataaaaacaatttcagagatattctctaagctttcttcttcattaagagaaacttagaagagaaatactatagcaagaactatggttctttaagccgcaaaaacctatatataatacattcaaagcttttaaaggctaatacactaactcgtggactaaggatcattgacgcctgatccacgtaaatttttttttatcttactttacttaaataatcatttaatttcttagctcttacttaatttagtttttgaaaatatcgataaatattttggtgttttcattaagagttgtagaaagaatcaaagctacctaccatcggcaacaatggtggctaccagaaaaaatatcgtggaaaaacctcctcggctagatcctgacatcgtcacggacaatcttaacccactccctccagggcaccctcagttgagttaagcgggagatggggaaacatctgaaactgacgaccggaaagatgagcttgcccaacgtcgggaacaacttgttaataagtgccctgatgatgaagaagaagatgaaaaagatgctggagaaattaaagatgcctactacaaggatggatactactatgaacaggatcctaacctgattcgaaacccaacaatagttggtacgtcaagaagagttttctccttgaatggaaaaaataatggctctcctccgagcaaaactaggtgacatagatgaagatttgaagaagatgtttcagaggaacttatcagctgagaaaatagagcaaactctattgacattggaacctcaactcttgtaaaggacaaggagaaggcgaaggtaggcgagcctcaaactaaaactatcacatcaccccaagaaaaacttgaacacgacaaatgagcccttacaaatgcagaaggccaccaacgcctctaggcttggatgcttttctactccacaaggcaagattgcgccaaacaaaaggcctagtatgaatgtgccaaagcctaagggaaggaaaaactgcccaagtgattcaattaactagggctatggggtggaataagttttctctgaagacaggtggtctactgtagacctttagagacgtctcgacgccaaatatgaaaaggccaaaggagagaaaacgagtctccaagggaacgatctccagaatcatctgaatgataaggtttacggatgcgaagttctagataatgacaccgaaaagctagaagaacaaattgtcgctttgacgaagttggtccaaaagcagagcagagctctcttggactcaaaagacgaaaaccgagagccacgggtcaaacaaatcatcgaggccccactaccaaagaatttcaaaatgcgttagaatgaatatcgtgtggtaattgttaattttttacacttagtccgtgaattttttttgcaatacctcttaattttatatttatttgtaaatttaaaacgtcaattaaattttacaataaaatgtcaactgagattactactttacacctccaaatcaatgaaaacataccacttatacacatgtgtacacaattataatccaattcacatctaactgtgtagctttaaatttacaaacaaaagtgatgatcatgataagtgtataaaattaaactataaggagattttgcatcaattttgacaatttgggtaaaaatcccaataattatcaatacacatcaattaagttagttttataaaaaaaaaaaaaaagttaagttttcataataatttgtcaaaggttgaagtctgttttttattactcacacgatattcgttctaacttgtgattggtcggtagcagctaatgggccgggctgggctgggcccgggccagaataatagtgtcttttttgaaatattacaatgaaaaagtgagtaattttgtcctaaaaaataaaaaataaaaaacacaaattaaaataatttgtcgttcattgttgttccatcactacagttgtattcatttctttcctttcttcttaatcggagaagaagaagaagaagaagaaggttctgaatctttccactcctcttctccatctagggctttgaatttttctccggttatctaggttgggtgatttcatgttctgatctgtgaatcacattccaatcatgacttcgccgcagaaccaaccggtgaatgtggatctattcgatgcgtatttccggcgagctgatttagaccgcgatggccggattagtggccaagaagctgtccctttcttccagggctctggtttgcccaaacaggtccttgctcaggtaatattattgttaaattttgtatgcgtatttgtgtatcttagtatgtttatgtgtgtttctgtatgtattcttgtgttattagagtcggatattgtagaattgaattgagatggagttttgttgtagtgatatagatcggagtgtctgaattattagtctatttatggttttaagtgatgagattatcttgatttggtactctggtctaggctgaatatgattcaattatttagtggtttgtattcaagtaaattatagctcgattttgtgcttatctgatcctatttttatgctgtaattaatctcctacaatgtataacactggggttggacaataatcattat

SEQ ID NO: 381670 - DNA, 2414 bp, Cannabis indica
caaagtgacattttcttgtagtgaatttatatctttcttctatagtataaagttgttgactcaccgtgtacacccaacgaaataaaatcattaaggatgaattggcgaaatttattctgaacaaactcaataaagcaaacatcgaattgaagcattttttagtatgagtatatagttttgttatattcattagtttgagtatgaatataatattttttgttatattcttgttactaaatatatttattgattttgttatattagtgtgttattttgtttatgctattctaaagtatatgttttgtttggtgattatatatatgtagatataaaagatctctacacactacatcattgcatcagataagtttttttatttttaatttttttttcatattactttaatatatgttaatattttgtaggaatattgttgttactgtgaaaaaaaattaaaagggagatttattatataaaattacatattatattttaaaatgggtaaacaatgaagaaagggattggtttcaaaatttattttaggtgagggtgtttcagaatcctagtactttggtagtaaagttgaagtttttattgaattatattttactgatttataaaataaaaattggaatttttttattttactttatgttcgtagacagtaaaaatgtaaattttgacgttaataaaattatattaaaagaaattttttataataaatatattaaaagtaatattcaaaaattaacaataacctttaattttactgaaattgaaaccaaatttaatttattgcatccctcgacaatagttaaggaataattttgtatagtagatggacttaaaagtcacgctagttttcaatatcacttcattatagtctctcgattgggttgaggaataaagaattatttgtaataaataatgtaataactaccaacggaaaacttaaatttcatatcacaaaatttgaatctaaataactctatgaataaatgaattgtagttaatgtacaattatcatgaaaaaaacttctttctttttaaagattaatgtatctgttgctttgaagaaagccatgttaaggaataaaattgttaaatgatcatgtggcaacatggcaactcattataatttgtatctgtacactaaggaaaaaggaaattcataaaatataatgttttttttttatttaagcgtttatatattataatcatgttatagaactcgaacctaggacttccaacaaacatccacctatagctatttgagctaaaataaaatgttgagacatatataattgactctcttagagctctagaaagtgaatgtgtaattggaattaagtgtaattcatagtagttattattattattttttgtttaattatatgattacacaataattatataattgaaagttattgaggggatactattacactctttttttttttaatttttctgtataatttcataaataagaattagaataattataatgtgtaattacataataatattaatttttaaataattaatttattatactacgtaattattaacttatttgcctaacattaaaaaataagatttatatacaattattatttgacatctaaatacatattatattttaaaataaactataattactctcaagtgtgctaaaaatgaatttaatattttatagttgttttgccaaaataaatttaacatttttatagtcgtttttactaattttatttttaagtaaaaatagaacctaaacagtccaaaatattttatttagaggatgtatatagctataggaagaatgaaaataaaaacagaaagaaaacagaataaaataaaattcattatccagaaaaataattgttaaacttcattacatcttacattagaatatttcaaataaagtagtggttctacttaaatagtaaaaacatataatttaattaaaatagcatttcaataatgtaaaatataatcaaataaaaataaaatattctatttcattacacccgatcaaacaaactcatcttaattaattattaaacaaattgtgggtgtacaatggtagaagaaataattataagtaataagtcaaattttagaccaactcatttctcttcaaatatacaagatattcaattggtaggtgacaattttaaagtgtattaacaatacctcttttattggtgtataaagggaccaattattgcgcatcaacaccatatagcttgcaaccattttctttctttactttttgttttcctagcaaaaataataataataattcacaataatattttattgactttaatctctgcatcttggttctaaattctaatatgggatcctttgtttttttttttttttttaaaattgcatgatgaatgaaaagggtt

SEQ ID NO: 381671 - DNA, 1748 bp, Cannabis indica
ttaagtgtcacaccaaatattagtaattaaatatcaaatctcatatattatcggtgttatgaaaagtgtgggcaccagttgctaatataaatattgataataagagctgatctcccacattataacccaaaaagagatcttgaaatttataataacggatttttactaaaaaaaaaaaaaaccccaaaaagagatacatatacattaacatttatatataattactcaaccgtatatattctcttaaaaaccatttcaacattcaacaatggctttgcatacaaaaaaaaaaaacaattcaacaataatggcgatctatatttatctaagcaccaggagcagcatccttagctttactctgtaaataaccaccatactctctagcataatccttcacatggctagcagtatcataaatcctgctacgcgcataatccacccggtccgaaccgggcggatggagtccccggaagtacttataaacccatgcagccacggcaaccgccgccacaccgaacccgcaaaacgacaagaaggcggcggtgatagctatgagaaagcagccaatgggaacccatatgggaatggttaagatgatcaagggtgagaatagaatgagagcgaggattgtgactgtgactgttgctccggttaggaagaggaaaattgagccggaaactatgagggtgaggatgcccaggagctgggttgagtttggggcgtggatttggagtttacggagtaatgatgatggggttgttgttgtttggttttggcgatcttccatggtgagagagagagagagagagagagagagttgtgtgttgtggatgattatgaggtgtatgtatgtatgggtttgaagagaatgattttagagtggtacgtggagaggagtggagtttgggatgacatgcatacaaacacgtggaaatttcataagagaatttgttgcatgccattaaggctcccacacttgactttttctcgagaagatacgaggagaaggactcattatattaatggagaaatgtttaaggtatacatttttgttcagatccgatttaattatatgttggaggttagattttactatctgatctaattcaattaatttcagtcatctaatcgatctaacatctattagatagttggattggatcagttcaatccattaaatgtatttcatgtatatttattaatttaatttaagtttatttaatattttagacataatattttttagatcgggattagattcatttaacattttagcttcagtatgtattggattggattggattagatacattcaatttaaaaaaagagtaaaattttaatgataatttttatatatatatatctaattactcatccaaactaaattatgaaaatactaattaattcgatgagatgtattagatttttagacattcattcaacatttgatctgatttaattgaatatttaaaaatccgatcacaattaaatatcctatatttattagtcttcattagattagataatttatgcacaccctaactatatgcgtctactagttatatgatatgtttttttaaaaaaaatttattgaaaaaaagttaattttagttaaaaagttatgatgtgagattatagtagataatttttagggttgttagatgtaataaattttatgtgaatcgacagagaataaaaaaaatattttaaaagaatatatatattttaacgattataaatattgagat

SEQ ID NO: 381672 - DNA, 1774 bp, Cannabis indica
acagtgtacacatgacaagtttttaggggtccatataattttaatcatttaaatattataaaaaatatatttttttttaaaaaataaatatcctgtgcccgatttttttctccgaaaaccctagccgcctccaccccatactcctctatccagtcttcgcctaagccaatctcaaatcttcctctgtttgtcccctgcgctggtttgcttcattcaacccattgtgcagatctgcctccgtctacctctctccctctctgtctcgcatctatcctctcactttcttattacccatatcgtgttgccgacacccatcaccatcgaccaaatggaggccaccattgtgtttgtcaactctccaaacctaaaattctgaagctatatagatctgcctctcgttttccctctttctctctctctctctctcactgctccctctcttggtctttaattggtctctcgtcctcctccaaatttgagaattatatttgggttttttttttgtcttctcttgatttggatttgagattgttttttaattttatttttgttttgggttcaaatttgagattgggattaagattgattatatacgattttttttgttgtttgaattttattgatgtttattttgattatgttggtgttgattggcatttgagaaatagattgtggtagttgtggttagagcggtggcgttggtatgatagttatggtggtagtggttttaggctggtggtgtgttgaagaaatgggttgaggtggtggtggtggtggtttctatcgggatttgagaaattgattgtggtggttgtggttggagtggtggtggtagttgtgatatgatagttgttgtggcagtggtttcaggctggtgggtgtgttaaagaaatgggttaaggcagtggtggtggtggtggtttctgttgggaattcgataatgtaattgagtgtgagcagatatggaatctatagcttttatccctatttaaaagtgaaacgatgatttcttttgagcttggctaaacacgacaaataatagagcactcatttcggtaattacattagtttactgaaattttatttacatgtagcaagtattttaaagataaaatacattgaagtgtaaaactataaatttatccccactcgatataaatcttctatagaagatcattaattatttagattgtaataatagataattcatagcgtatttatatttagtatatagagcattatatataattaaaagtgtaattctgaatttatagtggagtgatgaggaattaataagctagaaaatttacttgataaatttcggatctacttattaggagcttgataattatttataattattaaattaaaattagtatttaaataattagatgagatatgtgacaaaattagaaaagacacattaatttcattagttgaaataaagtcgcaaaaatctaactctatggcccataaggaaattcgaccttgggttagatttgaagtccgattgtctttattttaagtccatctcatctaatctaaccctagtgtgaatgttataaatagaaagagatgagagctttgttaaatagatgattccaagcaattcaaccttagaattcttctctctttgatttttgaaagttactatttccctctctctcaaaatatgttccaaagttgatttgaatatcaacccatactattcaatgtgatactcatacctttgtgaaaaatcatgtacaatgttacatgtgttggaaattatttt

SEQ ID NO: 381673 - DNA, 1041 bp, Cannabis indica
cagtcaggagcatcgaacatggcttcattttattaggttcaaaatctagatttatatatagaaactaaaatatctaagcaatgtttcagagatgtagtttcaaatatctaaaatatatagatttttttttatttttatttttgtgttatttgggctttcaataatagtctcattattttgggtttagttgctacacttagatgtggaggttggtaacttggtaccatctatgttttatagtttggtggtgtagttctttgttacaatttattcatgtcaatgtttttagtggctcattcatatgataaaagttgaattcaaattagtttatgcttcgggttgaagctgcacaatgttaagaataatgtatgtatgttgttgaccctttaaatatttgaagttttgcatatttcataatgaaattgttctctttttcaaaaaaaaaaaattaataaattaataaaaaaatgtagcgttatattttataatgaatcaggaggattattttcttgagctagttggacatgtgtctacgacttgtgcttgtaagattgaggaggccacactttctatttgtagcccaaaacacgtgagctcaaaggaaggttgcattataagttcatttactgcaattctcagatttgttatttttttcgctattccagagggcacaatcgaaactcagttttttaataccccactcaccataagaaaaaaaaaatgtgtgtaagggcaaggatcgcatggcatgtctaagatggagaaacaacttcaaaaattggacgaaagggttcgatgaactgtggaaaaccaaaatgaagtgctccggctcaaggagtcttagcaaagcaaagatagcatttttagcttactttttagccaatagattattaaataaatggtttaatattatttgaaatttgtccgaaatataggattacattttgcttaaaacttttttttaaattaattttttgtttttaaaaattagaaaaagtaaaaaatatttttcaaagtgatattctataaaactatttttac

SEQ ID NO: 381674 - DNA, 1838 bp, Cannabis indica
atccttcacccattttttcttgtggcttaatctttctctctgataattaatggctgtgaaagtgaaaccctctcggatccagaagaaagcttcttacgacagaaagctccgaggatttctggaagagtatagcaagattcttatcgtgacagctgacaatgttggttcgacgcaatttcagagcataaggaaaggtctgcgcggcaattctgaagtgctcatgggcaagaacaccatgatgaaacgcactatcaaactttttgctgaacagactggaaacgacgccgttctcaatctccttcctcttctcgtggtacaatactagctacctacctgtatctaccttcttcttattgttggtttcctttgtcgcatccagtatattcttactcataaaagtagtgaaaccatagaaaatgatcgatcgttaaagaaaaacaaaaatggatcagtataacctttaactgtttcttgtaagacaagaaaactctgatccaacatatactggtatatatatatatatatgtgtatatattaattttatctttgattttctaaatacagttctctcttacaattttctttccttatgtttttgaacaatatctgcgattgccatgtttggattaactatgaacttttaatttctttgagtgtgtttgctcaaaaatgacaaatgagttttaacgttttggaatttcttttttgcttgcatttagtattctaatgatcgtactgtgtacattttctggtcactttttgaattagggaaatgtgggattgatttttaccaagggtgagttgaaggaagtagcgaaagaagtgggccagtacaaggtacacgacacgattatctctctcttatttttatttttgccggaataggcaataggtttttttttttttttcccttgcttgaataggtacacatgattatttttttcgtttgcctgaattggtacatgacacgattatcgctgacactctattaacgccttttatttttcctttgtgtattccttctttctttttgtgatttaattattagctcgtattgcgaaaatagtgtgatcttattacataattcccataatattttgaatggattttctgtatgtatatatatatagtagaaatataataaactaatactaacgatgttaaaaggctatatattattcattattatatttgtttcctatgggttttgggatttttatatattattatatatgtttgttaggaaagaaatacaacggaaaaaaatatacaagtactataaaagattaataaaatttaaaatgaaaagaaaacgttctgaccaaaaaaaatttgcaattagtcaataaatataattgaaattaacaagaataaattgcggtttcaaaaataacaaaagaaaaatacataaataaaatttacttttatctggagatgcctcatgcttgccttttcacgcccattccactctctcactgaaaatacgtactgaccatgagtcccttgtttcttaattattttggtttccctacaagtctacgaccactttcctaacaaatatttccactactttttccttctactgagccttaattagtctttttgatagagtttttagttaagtaataatgattctggcttttattttgttttgcacacggatccgtagatatgtgtgtagtgtatatattttctgatcacccctagctatatattagtgatttttttttggataaacatatattattgaaattgtgtgtatagaagtggcctttttttttctcttaatttttttatcattttaatcattcactaaccttgttaattgtgtgctatat

SEQ ID NO: 381675 - DNA, 3277 bp, Cannabis indica
aacactacgctctggtctggaccttcccagtgtatgagcaccagatagtgcaacaatttcctgtagattaatttaaaaattacataacatgaacactgaaatgatgtccagaaacctaatatagagccactgaaaactcactttgtcatttaaacccattctgtagaaaacctgtcgaagatgatcagcaggtgaaggaggaccagcatctgaaaatcaaataaagtaatcttttttttaaaaaaaaaaaaaagaaaaataggaaaaaattcaataatgattaaggcaatgagactagcacaaacagtgtgggttgtcaagaaattatatataagttaacttaccgggaagtcgcccttcttctgggcactgttcaggtgctgacacatctactcttccatacttcatagggatttttgggccacctgcgtcctgaagtttcagggaaaaaaacttggtaagaagaatatctaatcaacatagatatcaatagtcaaatgagttaaggacaacctccactgcggtagcactggccaactggaacaagtctgcatatgtcacaccagagtatttctctttgattggctgaagaagtttcaatgcattcacaagacctgaaaaagagcagtacttgtaagttgtaacttgtaagacacaatgatttagcaacgatattaacaatcaagaaaagtgtcaagagtgtccttacctgcattggctgcatgtttaagctcaatctcaaatctcaaacttccattagttccacctctttgcggccattcctcaatgttcttgttataagtaccagcatcatgccatcccaggcgaacctattacgtaaccacagattaccactttattggtcactttgccaatcaagaagctttaaaaaatatttgaacaactgaaatctgactagaccaattctattaaatgattctaatcttcgtatttagatcataaccacaggttaatactttattattagtcgagaaatttttaaaaagaactaagtataatcactaaagtttcttctcaatagttctaacaaaaatgcagtaacagtggaaaaagagaaatcaaccgagctcaaactatgacaaaatcaaatcaaacaacaataaaaataccaaaataggatggcagaagttcgtcttaagaagctccttgatatcttctctagcattcttcagctggtccggatcagaagcaaagcatttcggagcagaagccgcactgaaacccctggccgataagaaaaccgacgtcctcttctaaaaaaaatcaaagaatcaaaccaattcacacacacagccatctatctatctatccacacacacaaatatatatatatatataaatataaatgtaagtattatgttatcttacctggttgaggaagagacgagaaacgaaaggagaagatcggaggcatttgagcgatgaggaatagcgagaggaaggaagagagagcgtagcggcggtggctctggcggcggaaggaagaagacgagaaccaaaagctgcggaagtagccatgggagagagagagtgagtagttgttttggaaaggtgtgatggaagtgttgtcgccattatagtctctctctttctctctctatttaccgcctctcctttttttttgggtttggattgagaaaatgaaaaatgaaaagcctgtaataacaaaggccggtcttattaagtagtggcggcccactatttataggagccccattgccgcgctgttcttcacccaaacatctctcttcgctaatcttaatcttattttaatgatctttactcaaagtcaaaacccctaattattatacattaacggtaaaaatattttattttacgattttattgtagttatacttttttttttagttattgagtgtgaactcacaaatatgtgacgatattattgaactacgtattaaataagctaaaaaaaatatgtcgtcatgtatttttgagttggtatttaacgggcttaattggtacttaacaactaaaataaaatagttcaacaaaatgataaaataatttattatttattattattaattagtttttagtttttgaaagaaaactaaaaaattcattaaatggcacaaaatctaaaattacaaaaagagctcaaaaaattaacaaactaaatctataagaaaacttgaccaccaaatacaggattcatctaaaacaagaactcgctttgctaaagaataagcaataatattcttaaactttacaatgagccatattattaattttgtttttttttttataatttggaaaattttatttttcaaaaagtattttataatttaaattagaaggtgtgttaagatggtaattatgtatcaattttttttgacaaaataattagtttttatacactgaaaataaaattagttaataattgatatttaaagtgtaaagttttacttacaattgagagtatatattcaatgttgtatagtttttaatttgtattcttttttatttgggtcaaaagttcgaatatggcacaattctttattgggaaggattatatttaatcttttgggagactaacttgttgtggtggtgtcattttttatgggatgggaaccctcgaggtacatattaatgattcaatcaaagcaaaataaggtataaagctcgtataattagcacgtgattctcaaaattatcaaagctatcaaatagaagaaaaaagtacatgcatcatcctttttagttaggaaaaaaaggagcactagtttttatttttataaattataaccaatatgaaaggaatcgagttaggtaagtgagtattggatttttgtggggagggatgtttggtggcatgccatttttctctttttgtgcttttgtgtttagttgaaaatgatttggtcaaagtgaatccccaaattcaaaccaaccaaaaccaaagaaaacactatcctttctcttataaaaaaaacacttgggctgttttaatttatagcctttaaaagaaattatatataatgatatatattgtagatgtatataataaatattttactctactataattgcaatttatacatagtcatataacaaaaataaattataatttttctaagtgtcgtaaatataaaacaagattaagtgagaacttttttggcaccccaccaaaaaatttccccaaaaaatataatgattttcctaattttaaaaagtgacaattgtttctttccctccaagaaaatagagatgaattcatctttgtgacaatttt

SEQ ID NO: 381676 - DNA, 3161 bp, Cannabis indica
tggctatggaggacctcgtggtggctaccgtggtggtcgtcgtggtgatttcagtaatggagaaggtggtgagggagaacgctctcgcaggccatttgaacgccgtagtggaactgggcgagggtgagcctttttaaattggccacctgattaccaaagtacattagctgtatattcaaaggcatttaatatgaatatttcatgtttgcagtagtgaatttaaacgtgaaggggctggccgcgggaactggggaacagacactgatgcatttgctccgtaagtatctactttcaatttgcgtattcgcttggtatgaaatgaattccttgctactacatgcttgagtgtatttgcctattaagctgaccctttttgttcatgattgtcccacactctagagtaactgaagaagccatcaatgagaccgagaagaacttcggggacgagaatcctgcaggagaaggtgctgctgcagatggaaacaaggaggctcctcctactgaacaagaagaaaaagaacctgaggataaggtgaatggttttctagtaatttaacatcatttggttaactggataagaattcattacttttcaaatgagatggttaagaatgaggctaaactaatccttagtgggctattgttttatttttttcttttctcccagtgttctatgatttcataaagaggttcttgtttgcctattttcttttaatcaattctgtattgtagtttaagacttgcactttgtacttgtttaacgaatatttgagttcctaggtatttgccctacaaataattttactgaagttgaatgctactgtggcataacttgccttttctgattgattagtgcttcttacgtgatgaatatacggcacattctgataaatattatttatgtttggtcaataggagatgactctggaggagtatgaaaaggtgctggaggaaaagaggaaggccctgcaggcactaaaggctgaggagagaaaggtggatactaaagagtttgcatccatgcaacagatttcaagcaagaaagagaatcaggacatctttatcaaattggtgattacactgagccctttggttatgattttataggagccctttggttatgattttatgaatcagaatcgaatttgatgataactgtctaaatcacttgaattgttgatttgcttagggctctgagaaggacaagaagaaggaggctgctgaaagggaggaaagggcgaagaaggttgtacttgctattctctttctttttggtttcgtatatggtgctactgattgattttgaattagtttatatttattttttgttctccaggttctcatttcttttttttttgatggaaaaacagttttacttccccttccccacttttccttacagttcaaacttgtaatgaaaatgaattcttgtttttacccattttacttttcttgctattttatatcactttttgagctggctatttaggcagttggcctgatccatgccagtgtcaaaatggttttcgctaatgaaaattttcgtatgtatactgttcattaagctcttttgatttagagtgggaagagttgacaagtaagcatgcaaagatctcgtttttattttgcaatccttgcttttatgttttatagtttagtgagtaatattttgttgatatataacttgctggatcaggaaaggtatttctacttgaaccccttgttagtcttgcatatgtcatgatacaaattcttgcttactattttttttttctgctctcccctacttgttgctaccatttttcttggttgatgactgactattctactttggtggtttactgttctttttagtctgttagcatcaatgagttcttaaagcctgctgagggagaaaggtacttcactccaggtggtcgaggccgaggcaggggccgtggtggttcaagaggaggagggtctgctggaaactaccagagcagcaatgtgtctgctccatccattgaagatcctgggcacttcccaaccttgggtggaaagtgagacccttgagaaccctaatttacataatgctctattttagattttgggttgttttctttaatttaaagcaggaaattgacatgaataattggattttgtttccattaatagttttttcttgtccttccttttttgctcactcttgtgcctcagatgtaaatttcaggcaattcctatgctcccctctagttttcttttctcttttcttcttttacttttttaatgggacttgggggcatacgaaaagggatttatttatggataaaaatctcatgatgaccagttttgttttgaaatagatatatctaggacattttcaattttacctgaaaagtgttgtgggagacctctgtatgtcttgttctttttgtacttggtttgaaatgtctatccttatatcctctttttttttgggtgagataaaatgcaaattataacctgataaaaatcgatttttggatgataaaatgtttttttttacatgtttctgttttaattatccccaagtgtatttttgtactttttgagtttgtgatttattaacatgtccaaggcttttgctgcaattaaaatgaatcaaaagtgggatgcattatttgcatatcttaaaatcaatcaaatctttttatacaatatgatttagtagtctgttttgctcgagttttagtcgactatttcttttttcagttttaaactaagtttaattttcctgatatttgagtcgaaatgttatattttattctcgttcttctctttattatttcaactattaaatcaataatattattagttttgttaagattaatacggttagattaattaattaattttaaatatttaaatttattatttgaatataattcttttataaataaatttagggtaaatactattttggactctctgttttataaaagttactaattggacactgtgttttgttaaatgacaaaatggattctgtattttttaaaatagtataaataggaccctcaatagattttgtcagaataaagtttaattataatctgatctaaaagtgttatgacaaaactgtttacattttttgtatttgttcgtattaggcattgtcttttggttgtgttaaaaaaaaaagt

SEQ ID NO: 381677 - DNA, 1300 bp, Cannabis indica
aaaaaaaataatacgtaccttttagtatttttttttattgagcattactattaaatattagtgcctaacatcatctaaatgttacacattaacgccttaaatgaaaataggtgagagcatgtctagaggtatctagcattttctttaagtggtgtcttataactagttggcgatatttattaaaagttattttcttatgttatatgagacccaatacttaattacactaataatatatatacgacaccatgttaggcaccaataatacattttaacaattctcttaacaatttacaagcatcacatgaagagctaagagaaatgcttaaaagcatgtctagcacccggccatcttatgtgtcaatatcgctattggtctaaattaagtgtcgagttctatataatttaattaaataataatttttagggagtattactaaccaatcacaaaataacatatttagaagtattagacactactagtacccaataataatattctaaaagctataatatatagttaatttgttattaattgagcttttaaaagtaatttttgaagctctaaaaacacttcttcaactgtttgagggttctattgagtatagattttaatttttggctctaaaaatcttttttaagagaagccaacactttattagatttattgcatagaggttaaaaagcacaaatcacaatttaagaggggtttggagttggggtggcccatgaagaaccacactacagtgcatgtgacctacccaagttgtaatttcattcatacatcactctatagactatatgtattgtatatatatattattggcagagaggtatatataaagattttgtaatcatattgtatatatggtctgctctgctctgtggataatggaatatatggataccgaatagaaaggaattttataaaactctttcaaatctttatttttcttttattttacatatcattattattttatttaaattttatgtttgaggtttagatgggactcctgagaaagagagagaaaccaaatcttttaggcatatttttgacttaataatttctcctaaatatttaaccacatcttcacatgccagtttcaatcaaaaccccctaaaaaatttattgtacttgatagtgactctctcaatatcccaactatttttcaccaaagttttttctctatctactactgcttaaacaaatttgggaaaacataaaaacaaaaaccctaattaaataaacctaattctcacaaaaataaaaaataaaaaaagaaaggaattttcttgg

SEQ ID NO: 381678 - DNA, 3446 bp, Cannabis indica
tttgcgtctacggttatagtgtcggttatatcaactgaagcaaatattttatatgtcacttaaaaaccgaagcaaaaagctctttttgtagtagtgttagaagagctcctggtgtggtgttcgtcattgtgcagagaaagaaatttcgatcttgaagtgatcgagaaaggagaagaagatgacggaagcgtaatatcaatctgataccatattagttgagagaattcttatatgaaagtgtattattctcattaagaaatgaatgaatatctcagtacaatatttatagagcagagctcttacatacaagagaagaaagtaaggaaagagttgttacaacagtataacagaaagtgtagctaactctaactaacacgtgcccaactaatctaactactaactaactctatggagtcaataagctattcccttacttttcataggtatagatttatcattgaatttcaaaaaattacttttttttttcctttgataaatctaaaggctcacatcatttgaggtgttgaatacctcaaaatattagtgaagttttacataatttgccatacataaaatataaaataataaaagttggaggtcacatcaataaatacaaagattccttttctagactaaaatttattcaggtgctttaacgatagtcagttttcagtagaagaccgcagcttaatccataataaaagaaaaaaaaagagagagagaaaaacaaaaggagttacttcacacaggtcacagtcttctccgcctcctcgttgatggtatctatgtttttatttattttatttttttttctgtataatatgtttttgtctctttaccacacttccactagaggccggctttgattattgactccccattctgcaagttcgtcaaatttgactcttctatttcttgcttgtccctgtttggatctacttcgtttcattttccactatctttgagttttgaacttcatttcattacttatttatttgtaacttagtccacattgggttctaatcgaagcagatcttttgcttcaatcttcattttttctcataaccgtttgttattttgatgaaatctgttatgggttttgggtttcagatgttatgggttttgaatccattctagaggctgcatttccgtatatatgaaaaaggacactttgcttttgcatttattcacataaacaggtatattgttcattcattttcttctttatgtctatatatagcttttgtttatctattgtaatttcgaatgtggtcactttgtgttggaagcaggttgtttatctgattttagttttgggtattggccatttggggactcagttttaggttcatgctatggggaaaactccaacaaaatggcttaagaacttgcttcttggaaagaaatcatcaaagtctaacctttcaaaagggagagaggtactggtaagttaaaacttgaaatttatattctttaaaccgttacgttgttatttggtactctaaatatgctacattatagaagaataagactgtcaaggacaaaagctgaacatgccgtatttctatagctgatactctgggttcattaaatgacatatgtaactgcatataggtttgatcgtaaagaaatagagctaaaaagggagctgggttgatttttagagctttaattctcatgtttatctacatttatatgaacttacattgtaaacatacatgcggctttgggggttataggcatagcttagggaggtcccaagttcaaattttccttcccctcaatataaaaaaactacttacacatgcctttgcttgagttgatttatagggtttaactattaaggaaaaactcttgactttctgattggtttctataattcttgtgcaaagaaatcttcaaataaaggggaacagttggtttcttctaagttgcctgtcccggatgtaaatgtggatgctccaattatatcatctgtactggttggacccattgctagtaatgaactgggctcagaaattgaagcttctgccaaattacaaaatgatgaagccatcacaatgagtgcaaaagaagatggctctacagaagctgcaaattgctctgagtcccctgaagatgctgagaaaatcaggctaaagcaagctgcgacaaaggcacaggttgcttttagagtaaagcaagctgcgacaaaggcacaggttgcttttagaggttttatttttttgaacaaaaggaataattttatccaaaaatagaacagaacaaaacaagagactgaagcaaaagcaacatctcacaaaacctcaccagccctcaacaatgttaattacataactatcaccttttttttttgagctattacaattagaaccaggcaccctatacttgaccacttttttaatctcactactgagaataccagtagtataacagacagaatgcctattacctctgacctttgccctgtgtgtgagttggaaagtgaatctcactgccacctattcatggactgcattttcactaagaaacttatagctgaaatctgttgctggtttggtgttttttgttggaaagtgaatctccactttttctgcaaaagtggagattgaacacttcttttgatctgaagcagcaagtgactaatattgttattgctgctactttgccttgtttttgtttgtttttctttcattgaatactactttatgctctaatgatgggttgtgaatagatcaattcagcttttcgattagaagtactaattggattggttgattgtgaaacttggctttttcaccttatgtaacttatgcatgtgctaaaagaaaagtctaatttggaaccttcataaagagagggtttcttagattatttactttcacatgcattgtattttttgaccggttgaatttttagtcctttgtattctactttacttatgccaccttgatgatttgaaggctcgtcgggaatttcgatctcttaagggccttatagtgctgcaagcacatgttcgtggccacttggttagaagacaagctgtatctactttatcctgtgtgaagggaattgttaagttccagactctagttcgacaccacaaggttagaatttttgatattggcttgagaatgcatcttgtgcaaatagggaatcgccagttggatattttgaggggcttcacactttgagctgaatcttactattttctcttactttgtcaccagaacaaatgtgaatatttgaattgcttagggctcatttggaacgtcgtattaggtcgtattgtattgtattgtattatattgaattggattatatatcatatttttatataatactatgttaaactttaatttatactaaaatatatatatatttaggtgtccataaaagttaataccatatatagttttacataaaaatattacataaaatataat

SEQ ID NO: 381679 - DNA, 3773 bp, Cannabis indica
aaatgttaataattggtgtgcattactctataattaaataacgtatgattataaatatatataaaccacaattgtttttttcaaataataaaaattacttccaagcacaaaatacataccaaatggcaaatgcatatttaaaactcaacgaagatagtgaactcaatttatacataaaaagaactaagatatcactaaattatattatttatttaacttataaacttaactagattgatataattacctcttcaaattgtcaataatatttcattttgtatataaataaaagatcattttattttttctagacttttatgaagtttattaaatcatagagaactcactgttattaattagtgatacaaaatttaaaaaaaaaaaaaaaccccataattaattagtgatacaattttttttaaaaaaaaataaataaaaagacttaaatttgttactgcattatccgtacaacttattcacgcacaacgatatgtgggcgcgtgcatttgatgcttcccctaatgtgtacagaaagaaaataaaaatggcattaactattcatctttctctctttatagcatttttaaaaatatatattaaaaataaggtagttgccatgaaagcccttcttcccaaccccaaactatcccatctcatgtctatgtacggacccaaaaataactgggccccaaatcacgtgctccctatttcccaaactaccctcccatttttccacaaactacaatatcacattcatgtatgtaataatagtaataataataataataatccgtatgtgcatataatatataccaaatacaaaaacactctttcctttccttttcatcttgttttcaaaaaacaagaaaaacaaaaacaaaacaaattattagaaggaagatagcgaaaacacgctctcatatcataacacctcgtagttttgtctctcaaaagctcaaaaacgttttttattcatttttatttatatttttcttcttcttttgtcagaatataatgtattattatgtatgtaatgtatattttttctttttcccaataggagaaattggaacccgttatctcttttcccaaattccaagaaaattaaataagaataataagaataataactcccctatccttttatctatttcagtctatctacaacttaaatatttatttttcttaaaaggagagtttttctttttttccttctccagtcccagaccacctaagccaaacctatcttcccaattcaccgctcttgcaaaaaatatatacaaataataaaaagaaaaattactcttgaattttcctaaacggcatcgttttaacggtggtaatatgaatagaattaatagcatgtgctgtcccacacctagctcaacagaagcatcttctgattggtgctcaccttcccaaacacgggtcccacaaacggactttttgtttaaaaaaacagtgcacacgtgcgctctggtaatgggcattttcgtaatttgagtaaaccaaatactaaataaactaaagaggaattaaacccaataagaaaagaaaatattgtgtaatatacatggaataatgagttgtaaataaataatgttttcagcaaaaaattaacaaataataataaacaaaagaattacataactatgtttaaaaggataataaaagagacgaaatagtctagtgaaatttacttttattatttaattatatattaattataattatcttacttgtaataaatttgaacttttggtcgtttttctttctttttttaattaatattacaatttttctgttgtggtagtacaaccccattcccccatgtattccgaatttttcaaccttaggggaaaaaaaaaaaaaagcaaaacccaaggccttcagtaaaaattaaaattaaaaaaatgatgccggttcggtggtactatgaccgagaaaccgattcagccagtttaccgattcgttccacgagttctggtgagagtttcttaaccggtttcttccccttttccggtcgaaaatcaaaaccaagagcatccgaaacctcttcggagctccaacccgcttttcgaagtgaatccgagaaccgatccgctttcagcagtagagcgtcgagtacggcctgattatcgaccaacaccatctccccttcgaagaacccagaagccgaaacctccattatttccgttatatccgattcgttccacccaccttgtctcaaaacggatcctatttgctccacgtattcgtcgacccatttcggaatttccgacttcggcatatcaaagaatctctccggcgaagatgaagaagaagacgacgagtttctcctgcgacgatcgactgcagcgtcactccaaaactcgacccatctcggtgttcttgcaccggaggaaagccccgtgtctaaacttctccgggagaaattcgtagacgacccggctgatttttcgctcacggatctttgtttcttgaggacccgaggatccgaagattcggagctccgaaatagagactcgcgttcgaagaaatctgaaagatccagaccacaacagaagatacgattctcatcgacgaagaaaatcggattacctgcaagagaagggttgcaaggaatgtaacaatggttgaagattggtatcagaagcggagctctcttcaaagcagttctcgcaacccgcaaagctttttccgggtcggatggtctcgggccccacgatttagaccagagggtattccgagctatctggaatgaaatcgcggcgatgggtaggtcaagcgaagcccgaagatggagccgagcaccgggagcccgccagtccggaaaacccggtccaacgggtaacccagcggagaggactgctcggagatcaggtgggaaagcgaagccaaactcagcttctgcacgagcgaactcggcgtccgagagacccggttggacctggacaccggaattccggagatgggttatgacattctgggccaatgaagagaatgagaggaggccatttcgtactggaagcgaagccgtggcggttgtagtggttgttggggcagctgcggctcgagccgataagcgacggaggccggctacgtgagccgggtttagaccggtcattctccggtcgacgtcgaccattgtggtagagagaggcaaaggtattaataagtttgaaactcttttctttgtttctcccaattgcttaaaactcttgaaaagggtctgtgactgtgtgtgtctcaggcttagtgaagtgaaaaaatgggcagaaaaattaatcaaaagaaagaaagagtgagaaactctaagaaagagagagccttttagagaagagagagagtcttttgttgcgtaaacaaaggtttggattttatagctgtgaattagtggggtccactctaagattttcattcatttacttttaaatcactaaattacgagtatgggtggcaatattgacgaacacaactccatatttaggtatttgaggtagtggtgtttgggtttgggtggtccggttttttatctttttttttcaagccaactcacacatgttatttttctaatttcttaaaccgcacccgcattgtgaaactaaaaatccgcgaaaaccgtaccgcaaaaaataatgtggtgcggtgcgatttttgtggtttttgcggtttgcaatcacaaatacaacaaaatttgagcaatacttgtcaaaataccataagacttaaaaataaatatgaaaaaaaaaattaagtttcaataatacaat

SEQ ID NO: 381680 - DNA, 1362 bp, Cannabis indica
tcacagcacaactgtaccaaattggttcctagtggtttttgagtctttcaaattttttgcaaagatttacaatattttgcgatataatttttgatttggaaggtattttgcgatgtttcaaatagttgcaatacatttcttattagtgtttgcaataaagggaatttgttatcttgcgatgtattacgatgcttttttgcgatattcttcaattttttgcaatcttttcaatgttggttgtgtgttggtggtgtgttggtcgttgttatcattttttgatagttttatgatgatttctcggtggtttgcaatactgttgtatatatagtttccaatgatgttgtatatatgattggtttgctaaggaaatgcttaatttcttggattcgatcttgatcttttgataatttccaatggtttgctgatgttttacctattactcaaaatcaatttccttttgttttttttttctttatttattattattttttttttttgtcagttggctcatgagcttataattctagtgtcagatcatttcacaggtcgtatctcttacatgggtaacaaaatatttaaatggataaaggaaaagtttaaagctcgtgaattgaccgcgagggtggaggcaagctcttttttagtgcgttggtgcacaatctactcttgtacaaaatgaaggttaaagaggaaaaagaagatggagtatgattttatgtgggtgagaaagaggttagattcaagcgggttgagtttggattgatgaccaacctagactttagtaatggggctatagtggtagatattaatcttaaggtgactttttgaccgtttacggaggtgctatttcaatagcaagtagagtatcaactttaaaaccctttgattggtttcgagagatgcgagatagatgacatcttcaaggtaggtttatgcgcttttgttgagggtgtattactagcccgtgagaacaatgtgttcatttggactgacatattcaaatttgaaaacattgaattcttctttaagtatacgatgaggacaaagcaaactttcaacacaaggtgaagtacattgtatatggctacgtctctgtcaatattaggcatttgaggccatacaagatgtgagaaagaagtacaatcagtgcaaagagaacaatttccctaggatgacgaattggaacacctcgtcaatgctaaggaagcaagacatgaagcaaagcaacctgacaacattatttgttaaatgggtaaatgcattttagttagttagttttgtttggttttaatttttttatgatttttttgttagactttttatttgggcttagattaacttttattggttttattaaaactt

SEQ ID NO: 381681 - DNA, 3093 bp, Cannabis indica
ggcaccctcctctctcaggctaggttttaggaccgagttctacttaagtgaatgtaacaaatggtattagagccatgcgccctcaattgggactgatgttgcaggagggacgaccaatgggaaaagcccaaagtgggccaccatagagtcgactgccatgggcatcgactctaactacttcgacacccaagtgattgtatcaaattcctagaaattttgacccaaatagctcaacttttcaataaccttatcatgtaattgttgtcattctctcattaatgtttcggcaagtattgatcttgcaaaagtaattttctcaatggatttattatcctcggcaggtcactaactttttttgttttgtttttaatcttatcataattattatttttcagtccttggagctgtggaacttagccgagaataaatgtatgacgatccaggctcacgagggcgtgatatcggctttggcacaatcaccaatgacagggatggttgcctctgctagtcatgacaaatcagttaaaatttggaaataaaattttcctagtactgattttactgagcacttctattctctcaaatggaataaaaaaagattaagatgatatatatagaagagaagctcaaaaatgtatttaaggtaattcgatttaatatttgtttttctaatttggtttttttttatcttttcattgttttgtactgtcttcacatatacgtaataagaggaagtgtgtgatttttaggtttccaggtactttgatttgaactttcattgttttttttaagggtgaatatatacatactataatgtctgtgtttcaatgctgtaaagttcttattttttccttcttaggttagtttaatgtctttagattcttgttttcttctcttttgtttgatttgaaattgaatatatacaaatacaacatagaataatatcactatgaaggttgagactacctccaaatgagtttttgtgaagtgttgtttatccattatgtcggactatgctgaccaacactgcgcgttgatgttaagctttaatcattttggtaatcaggtaaatgttgtgtttcgtgtgattaaatctattaaaatgtttcggttgatgttgatgccattaagtttcactcattggtacttccaaatgagtttcggtgaagtgtcgtttattgattcgtagtgtgggtgcaacatcaagtagtgttggacatctactaagttttaactcttcgataaaattgtgtttggtgtgattaaatttatcaaaaggtagtatgagatgaaaatcaagttatgacaaattagttgaaatttggaaatgaaattctcaaaaactttggtttcaatgaattgaccagagaatcattaatattgattttactgagcacaataaaagattaagatagattgaaatgatcatagagaagctcaatgtaattttgatcattatttgaggaagtgtgcgatttctatgtttctaggtactttgaactttaattgctcttatggaggtgaatatacaacaaacataataatatgagaatactaaaaagggtattattggtgtctagcactatttttgttattataccggtgtaattatatattaggttttatataacttaagaaaatagtttttaaagaatatcgttacctaattataatatgccaactataaaaaatgttgggcaccattagtaatcagtattaatggttgaataatataaacaagatagatatttccaaatgctttatgcatataatatatgccatcgaatcaaattaattgattttgttctcacattttattaaaagattctatgtttttcaaatgatattttcttggccgtagatgatgaagaataagcatttgatgtgtcatttaaattattattattattattattattattattattattattattattattattattgattttcctaaaattttactgaaatgaataacactttattcccaataacattttaaaataaatagaatttatcttctgaactatgatgcttgtagagttttgtctctaaacttttatctattgtaaaaatatttcttaaattataaaaactgttacaaatatctccttgaaattgcattgtggtcatttatttaaagtatttgttaatataacactagtataatgttaatctagcctatttaagagttcagataaaaaataaatacttaaataaatttttagagctattgtttgtatgtttaatgtcaataattagattttaggtaacttaagttattaaataacctcttgtattgcaattatatccgtaactcgtagtcacataagaaaattgtttaaaaaatgattagaatgtaaattgacagtgaatatttgtatcgatttttatagtttagaaaaatttttgcaacagagaaaaatttaaagggcaaaactctttataaaaaaatcataattcaaagaacaaaaatctgatttattcaatattttattaaaaataataagagtgcaatatatccaattaaagagaggatgtatgagcaatttaattgcctaaagttgaacatgaatacaacataagtcaaatcaaccaatcattctttataaaatataaaaagtaactaaaagggactaaaacaccaacctagaatcactatcaaagttacaacttctctttcaatgactattaaatttcatgcaaaaacatgtatatagctcaatgagaacaattatagagtaacaaaaattaagttgataagaaaaaagtaagaaaaaaatgttagaaagaaaaagaaaaaatagacactaaactaaacttctaggggaaaaaaataagtaataatatatgtacataaaatatatattaaaatactatattaagtgatgtgacgcttattttttaattacatcttattaagatgaaaacaaccacaatttaaaaaaatattatcacatcactaaatctaatattttagtatatattttatgtgcacatatatttttaaaaaataaataaattatgtgacattacaagcttaatttggatcattcaatttttttcctttcccttttttgaaaagcataa

SEQ ID NO: 381682 - DNA, 1293 bp, Cannabis indica
ctagagctttggctaagagtgtcagaaaacttagaaaaaaaatctctccttctctctctagaattttgaagagttctctctctttctcttgttattttttaatagtggttgtaacaattatcacacaattctattacacaacatttagatctctctggaagactgtaagaaattgaagaaaaattgttgtgttcttattctattgaagatccaagtttagtgattgatcatactatgcgatataaaagatcaaggtttagatcactaaacagaaagagtcttattttgctgtgctacagctctataagtatgctatgctcaatttatgatattgatgttataaaaattaatatttatgttaaatattaatttacgtaaaaaaaataaaatcgattttgtaagcatatttgcccaacactaggggcgtgtgttaataggataaactttttctccctcgcaagaaggaccttgttaaagagaccccgcagtatcaagaagtgaccttacaatattaactaaacatgcagtattaatagaaaatgtgagaacacataccaaatcaacgattaaccattcgagcatcgttagattagacattatatttgtaatataatagatataattagtacaaattaattgcctattattattgtaaagtctcactctaactataactttgtaaggttcacactctacctataagtaagtgaacccacctccatttaaaagggctgattctgaataataaaatatagattacagagtaagactttttcaaaagtggactagacacaccaaatttttgctgaaccactataattttttatctacttacatacttacatatattttatattatattctttgagtataagtgtactcgtatatttatctttgagtatgagaaaattattacagtaaaagtaatattactttctatattttttattgaagtgtctatacatattagattacacactttgagattccatccaaaaacccctcacacacgaacctttcgtacctccaagtaaattcttaaaactgtgtacggtagatataaagactgtgcatgagaagactaacatatatgttaagattctgtatcatatcatataattaaattattgtatatattatttattatttacaatttgaaattatatgcatacattttttgattttaaaatcaattaattagtaatgtcgaattttgagataatagtatataaaatttttcaataattatttcaacaatacttagtaataataaaataatccataatttttttt

SEQ ID NO: 381683 - DNA, 2168 bp, Cannabis indica
gtgattatgttctatgcctatgttttgttcaacacaatcgggtttggagacgatgcttcacttatgtctgctgtcattactggggttgttaacgttggtgctacttcggtctccatttatggattgatcttagtatctacttccctcataatcccaaaccgttctcatcgagtcacagctgttgggtggatttgtgcagtgttttctgtttgtgtttttgctgctcctcttattagtacagtagaacctctatccaagaatacacttgggaccaagaaaataatattctaattgagaggttataactaaatagagttacacttgaaaaaaaaaatcaaaatatcaaaaaatatcaatgtaacaaaaataccaataaacaattcttaatactatattatattaaaattattttcgagtacatataatatttatacatgtactataatttgaaataaaattattaattctacataagtaaatttataaaatatatgtatatatttttttaagatgtaattattcttatatagaggtatattttattaatacgggacttaaaaaatgtataactaattacaatatagaggttattcttatttataactggcccaaattgggacttcattttttataacaaattagaggttattcttgaatagaggttctactgtatcatggtaattttaatttatcatcaatttaccaattaattaattatgtgaaattttaattcaacattaattaatctatgatcacttctaacaaacttctctgttttttgttttttttacagagaattgtgattaaaacaaagagtgtggaatacatgccttttgctttgtcattctccttgacattatgtgctgttatgtggttcttctacggtcttttagtaaacgatttatttattgcggtaatttctttaatttattaaataagcagattattaatttattaacacaatatataccaaattaattaattaattgaattatttattggaacagtcaccaaacatcttaggattcatatttggaatcgctcaaatgataatctacctcgtttacaaaaatgccaagaaagatgagttgccacagtttaaattacaagagttatcagcaaacgacgtcgttcgggagagaacgacagaagaagaggccaccaccacaactattgctattgtcagtgttattaatagtaatgaatctggagtcgtatgatatcgatagtgctggccctaagttattaataattaataactcaaatttgagatttggtgtgtgaaatgtctattttgattatatatattatgtaagtttaagatgaagatgggagaagggtctatatatatataaattgggagcatatatatatagactgtaatcttatttgttgagtttaattaagatatatatgctgtggttttcatttttggaagtcgatttttataaattttgtttgcactcttatttaattcaacctaaatatctcacataatcaaacagtataatataaaaaatatcaacaaaagacagagacgttagaacaatataaacaaaggtacgtatactcatggtgggactcttatgtagattccaaataagaatggagaaacgtgtttatgtatagttcttctaaattctattagctcgcgttagtgatgaagtgaagatttgagcattctgttaaagcagatcttatgtgggacccttagctgtacaaagtgatgaacttaaaaataataacattatgtgtttccactttccagcctaaaataacaaaattggttctcttttatgaactatgttaccatattgagtcaatgctttgtcaaataatattattgtataagttagaaaattatattataggaaaaattataaaattattttacaatgcactctcttaaaaagaatgtatgcgtatcaatacaaaaatttttagaatttttttttatatattcatgttatagctatttaagatatcttacaaaattttgagaaattcggaataatttataatgtataaaatgatatttaaaccgtctattttacacgcgtataaaataaaatagttacacgtgcaacatattgtttgaacctagtttctggcgtgttaaattttttcaaatttcttaaaattttgcaagatatcttaaataaatataa

SEQ ID NO: 381684 - DNA, 5811 bp, Cannabis indica
gagaggaagaagaaaaagaacaaaataaagtatattaaatatcctaattatacctttataaaaaaatatatattaattttaatatttttttcattctttatatttatttgtattatcaaatatgaagaagaattgttattggctccatcctgattaattatccagcattcttataaataagagttttactttcaaattataacaattattggattttgccttctgaattatttattttgcaaaaaaaattcccttcaactttggttataaatttgcaccttcagttacacttcattcatttttgtaaaaaaaataaaatttgcagtaagagtccacacaaaaaataattacataaatatcactctaacaataagattgcatatctataattttggagttttttttttataattatctataattttagagttaatttttgaatatttaaactcggtatactcggttctaactatagataggcaatcatcaattaggtgggggccaaaatgcaatttcattctttttgtaaaaaacatattaagtataacaatatgaaattgtatataattttatcaaaataaaaaataaaaatatatgaggggacaagacccctttcggttacatttggctttgtccctagttccaacaagtttaagttagttaaataaattctcatactataatcatacatgtggtttgtggcgacattaataaattatctcaaaaaaaaaaatgagtgaaatgcaacaaaaaaaattaggagaattttttaccaaaaaagtaatgataatttagtggacaaaaccctacatatttcataaattaagaggtaaaaatcgttgtattttctcaacttcttaccaaatatagtggaagaagcaccaaatatagtgtaaggcttcttaccacctccgaccacttacatagaaaggttgaagtaaattcttaatctactttttcttataaagaatggaacagtcttattttagtacaattatcaattattaaaaaaataaaaataaactaaaatattatacaataaatgtttagctactttcctaaattattcattgcttgtcaatatctccactagaattaatgggtcatatttgtccactcaataattgttgatatttaaagtgtattaaacacttggactagtcatttctttctgtactcgaataagtatttgttctttcatattaccatgttcattctaagagcaaacaatttgtcataatgggtgttataatagaatcaaaatactttctataatgtttggtttgctttagaataatacaatgagatcacaatgtaatataatgactacttgattcaacaaaagagatattaagatatcatatgatatgaccattaaacaacaaaagatagcatgtgaatcccaatgagtagatgaatgaatatatatattttggcacaataatgttttcatgtcatcacgtgtaataatcaaaggaagagaatatttgtacgtgatgacattacattagccacccaaccgaagcttcttcattattaaaggtcaattataggactttgataagtatgtatgtacaattgtacatgtaatgctcaaattcctaaagtttctaatataataacagtgaagagttcattactctgcaaaagatcaaaaaagaatacaagagaataaaaaacaaattatggccacagaacagtaaaagatttaagtgaaatttaacccaatgttgtattatatcaaaaaccaagatgtggaaccttttaactaaaacatccatatcaaacctactcaaaatatatcctacccccattgcccccactggaaaatacaaaacaaaattagcagtaaaattagaaaaaataaagagagaatgagatgcatgatcacatgggagatcaaagatcaagaagtaaaaacaatgcattgtgacacacaggaaacaacagagtggcactgggaaaactttacactagctcggttcggattttagatctcacgtttaagagtgacatcaatgattcctacattagatttaggctgataatgctcgtcagtatccacctcttcgatttcctgggatggcagtaaaaatagaaaaattgttataccttagatgcaagcctataatgttggcgactaacatagaaataatccgcaatcaataattccgtacctggaccacatcctcacccttgatgacacgtccaaacacaagtatcttatcgtttaaatctggtatcggtgcagttgtgataaaaagctcaaatcccttgccatcgtgcttattctttgaagttccaagcataaatgcttcatgctttgggctgtgtattaattattaaccataagttatcagagaactattaaaaggggcttgataacttcccatgtaaaagaagtttcgagaagagaaccttgtagtgagttcactgtgcaccttccccctggatatccagtcttcagctattccaatcccttgggagtttccgccatgaatcacgtagtttttaatcacatgtctgaatgccatccctttaaagaatcctttttgactgaaaaaccagttgattaaatattcttccagagtataacacaagcaactatcataaagaatgtaataggtaggacacatcaatatttggaccagtctcaataactgactgaagaataaataagccatactaatggtgaacagagccttcagcaaatatcgtccccacagcagatctccgttaccctccaacagaaaagaaaaaggggtttgattgtgcatttacttgcaagtattataagtttcctgattctatctctccgttcttcctttctatcactagctctcttatcaaaaatggatttgaagaatgacaagacacaaaattacacacacagaaaacagatgcaagtgcaaaaatcatatgcaagagtataagatactcaccacaagtcgaggaatctgtcaacaatttctggagaaccgtccttaaagagttctactgctatatgaccttttggtgtcttaatcacctattgaaaagacagaagggtgagaacatagtctgaaaggttaatagatcagttactgcatcaaatgcgacaaccaataaaataccaacaggcactcaaaagaacagattgtaatatttttcattgagagaccatctccatactgataaataattactcaacaaaagggcagaatgatgtcaaaggcgaagtttccagcagtaaaggaagttcattgtcgtagaattgcacactcatttaaaattcccattcaacaaatttaaaactatactgtgattaggactttggcggaattgtctttcatacagtttatcccgttgttatgtcaaattcataaaacaagcaaggataattccatgaacctatcactcaagaatctagacagccatctaacctgctaccacacatacataactatcatgtaccaactagcaagtaaaattcacactttcattcaacataacaaagacagaatcaatatagataaaagttcaagcctttaataaactaggcagccaaagaagctaaacaaggcattcttttctagcatcagaaacggcaaagctaatctttcactcaatacaaatcaaaagcaggtaaacagaaaagaaatatacataagcataacgagagacttacagcaaaaccaggtagatcatacttctttggttctgaaaagctatcactctcatacttcttagaagaagcaaaggcatcattgtcctaaaccaaaaaaggtaacaagctgtaaacacctccaaagaaccaactctttttaccaaaataagaccaatcaagattcaaaatattatacctccaaatttggcaatccagacccgccttgctccaatgccctgtcaaataaaaaaaaaaaaaattatgaacaaaaaaaacaattttgcagaaatggaaatacccaatatttaattaaaattcaaaaagaagcagagtaaaaagaacaaacaccttctagaccagtggcgatatgagccaaataagcataaaacaatcaatacaactaataaattgcacaaaattatggtagtgatgctgattcgagttgggcccttcttctttttgctttgaagtaataaagcctgaggttttatcctagccatgatgagcttcaaacttcaactacctgcaaaaatcaattcatccaagtataaataacataatcaaaccaaaacctcccttccctctacatctaaatcgaaacgtaaacccttaatctcaatttcaaatcaataaaagaaaaatataaaccctagagattgaagcagaagagcgaggcttttgaatcatagaaaaaactgaaaatggaaattgggaaagagagtaaaaaaagatcaaccgttaaatttgaagaagaagaggtttaaagtgattgaaatcgatgaaattaagaccgttggatgggagagattgtttttgatgttggaaatggagatggaccagatggtgatgactatggagattgcctgcttcggttgctttgttttcgtttattgttttttttggatttaattaatattttgttgtgtgtttaaaagttgtttttttttttttttattaaataagtaaagtttttgttctttgtttgttgttcttcttctttttatgtttctttctagtacaatttcattctacatctacagttatgttagattgaattggacccataatttcaaaagaaggggtggaccccatatgaggatttttattttttttggatagaagaccccttatgagattattcgatcctaatctaaggtaattgatatgttatcaatttacaatgtaattcaatgagacattcaagatttcaactaaagaaattatttaaaataattaattcacgttaaattgtaagtaaatataaattttgttttatgaaaattattgaataactgtaatttaacgagatatacacaattttaactagagaaaataaatgtttctaaaagaaattatttaaaataattcactttaaattataactaaatataatttttgatcttatattttgtaaaaattattgattggaccgtattcaatatttttaagcttatccagatctacactaattatatgttagatgttagattttaacttctggtctaatccaattcatttcagtcatccaatcgatccaacatgatgtatttcatatacatttattgattaatttggttttatctaatattttagactagattcatccaacctaagaaaaataagagtaaaattttaatgtaattttcatatataaatataaattttacgcataacaatataaaatttaattactcatccaaaataaatgaaaatattaattagttcgattagatgttggatatattgaattttcgaacaccacatttaccatctcatccgaatccaaatttaaattttccaatcgatccgatcacagttaaatatccaatatttggcggtggattgtaattgaatcgatcaattcttattggatttgatcaatttatgcacacccctagttgtgacgataaatggtgataccgttacttcaagcttttatttcttcacaagattacaaacaatgagctaagggagaattctcacttacaagtctagagaaagactctaccttatggaaagtattcaaaatgtaaaaacaatacgaaaacaacaaaaacaagtaaggtctgaaaagagactctgacttttacgttcaataatatatatatatatatttttacggtattcaataaaaataatacaaaaacaacaaaaaaaaaactata

SEQ ID NO: 381685 - DNA, 6192 bp, Cannabis indica
acaaaacaataatcaaaggatgaatttgatcgaagcaaggatttttcaacaaaaagaaccattcattgatgattctggttaagaaagtgaagttctagaagaggatattcctattacagattctgttcctgctgccattcaagagaaaagcaaaggtaaacgccccatgacacctcccaaatctgctcctcctcagaaaaataaaaggtcatctggtatctctcttgaaaactcttgaaggctcactttcattactatttctataatgataacaaaagagatatgaaatttatgagggtcaaaattttatttttgaaaataatgttaatgtgcttgctcataagccttttggagttatgaattttcttcaagaaagacaatgaatactttgattgggtttgatggctatattgattgagtggtgaaggagttttatgccaacatcacagatgaatatcttgatgaaaattccttcatgtttggtaaagtctttgtgcagggtcactggttatcgttcattatgaaggatgttgttgaagttctccaactaccaaccgaggtggaaccgactgagattgatttttatctccaagaagtgtttgctacactcacttaagacaaagatgtcaagctttctataaaaccatgcatatttctcaactcgcttatgaccatgttggacttatggggtttgcgttgccgaattggttcccttgctcaaatttattaaatgtttctaatgaactcgcctttcttttgttcaaaatattaacatgagcttgttttgatttaactgatattatttgtgatcaaattatgtcatttaaaaaagggacaaagtcggaactttatcttatttttcccaatttgatttataagatcttatctggccaaggaaaattaatccttgagaataaatccattgaaccaccatcttttggtcccactttcaaagtgctaaagaagcctcctcaaggtaagacatctaggaaaaaggctcgttcaacatctcttggtgctctatacgatacatttgctgcttctgcttccacttctacacctacaaaattggcagaaatcaaggtgcatttgggcagaatagagacctatcaaggtgtgcttcttagaaggataaacagaattatgaagtactttcatgttggagaaaatgactgagtggttcatttttatttttatttctttttgtcaatattttatttaactattatgactctttttgatttttcattgtctttggctcatttgatagacaaaaagtgggagtagtatttattttgtattttttgttacaactctggaccttattttcaggggaagttgtttgtttgcagtttcttaaacttttttagtttaaaaagttattatgttttatgtgttagtgaactttcatgcaaggcagtatttttatactctttattttgtttctaagactttgtacaggttttttccatgtttgttttcttataaattttaatgtcattcaaagtgccgaagaggaagattgttaattctatttttggcatattataattgacagacatattttataatttattaatatatatattcagttgaattatatattactttccattacatgtttttatttgattgatttatttaaaatatatttagtgtttagcttttcttgtttgaaaaagtaaaataaatataatatgtttttgatgatgaaattaaatcattttagagccatctctttctagctgagattcatatgttattatgatcttatattgatattctagttgatttgattagattttgattggagaaaattaaaatgaaaattttcttttctataaaaggaaacttgcatttactactcgcgattcaaccggtgcaaaacaagaaattctgggctgattaaagatttttttgggaaagtttcttatatgagttgtggatgagcatagcccatgtatgtactgtctaatatgagtatattatctataaatagttatgttagtagctagggtttcttatcaatttttttctctttatatttcattctatattttgtaagaaagagtatctttgttttgtagaggaaagtgtgttcaactctaccacattttgtgtcatgtctttgttattgttttgagtctgtaattaagtcaacaaagaataaacaaaattgcaagcctttgggagaagattctttaagattttgggagaaagtgtttcaagttttgcctcgggaggaagcaagcactgttcaagcaaatcaaaagagtttgaatacttgaagtttcaacaagttccattcgtggaagtggaatacatcaagcgtgcgacatgtaataagagagagttaatttatgcatacgtaaaaaaaatttatatttttgagatcttactaatgcatcttattatctctgggcatgactccgtggattaataacaatctataaggattggttatactacatacaaaaactttgtgcattttaattttttttacatttttattctttgttagttttctattttatagttatagagtcatgttctttaactacataataattattttagtaccatatttattattctgcatttaattaatgaattaattaaataataaattggtaatattaaaatataaaatttcaactacaaatataatatacagtgtactttcatgatccatgtttctctaacttgttcttattttcaattttaattcttactaaaaaaatatataaatatattctgaagagtatactcaatatctcaattatttaaatgagatttttttgaaatgcaattctttcatctaacaaatcgttttacacaagttatcaagcttcacaatattactaacacaagtggtgataacacctaactacttttttgtttcgttagttaaagtcgtcaatgttgtaatggtagttgttagttgctttcttggttctttatttttaattgtaacaaactctctattagtatagataaaggattggtctaattgtttgattagctttttccaagctaatctcaattagcatttttcattctcttgtgtcattacatggtatcaatcgctgttaactcacgtccatgttgtcatctacatctgatcctgcacctgcaacaatggcgaatgcctccttttccgttgctcctgcaaatcacacatggaatccattttcaaactcactgacttcatctcttaccctcaatctagatcgattaaacttcttatcatggaaatctcaagtggttccaactgtgattggtcaggatctcgatgagatcttgttcacaaaagtccccccacctcaaaatcttgtcacagggacctcaaatccagagtactctcaatggcggaggaaggatcaactcttacttttatggcttagatcatccatgacagaaagcattcttgcctcagtcgcaaattaaaacacatctgatactgtttggcgtgctttagaataaaaattttccactcaaacacgggctcgaatgcttcaactcaagggccaattctctaatgttcaaaaaggaaatctctttatcttagagtatgttgacgaggttcaatccatttctgatgccctgagtgttgctggttcccctgccaatgatcaagatctcgttcttcaactcctaaatggtcttggcctagaatttgactcgattgcatctggcattacatcaagaagtgatgatttaacaattgaagaagtgcaggctctacttttgtctcatgcgagtaggttggaacatcaccatgactgatcttgttgttagaatgcaagccaatcttgcttttggaaatgggagatctggtggtgttcgaccatttgccacttccaagaatccacaatttgatcttcctcaatcctcatcaggccgtggaaagggctatccttgatacaatcaacaacatgtcatctgccaagtttgtctcagatttggtcacatagctccgtttgtcattataggtttgacaataattggatggttccaagatccaatcaacctccacgaagggctcatctcacagaacctgaattcgagtacgatccccaggcatactccaccactttggtccaagattttggtgatgatagctgctggtatgttgacattggagctacagctcatgtcacattcgacaactccactcttgaaactcaataggcttacaatggcactaagacattggttgtagtaaatggtaagaaactacttatctcccatgtaggcacctctattcttccatcttatattccctcttatcctttaaaattgtaatcattttacaagttccctccataactaaaaaccttgtcagtatttctaagctaattgatgacaatgacatctttcttgaatttcacaaaaactactattttgttaaggacaagcaagcgggtactcttctccttaaaggaaagcgtaaagatgggctatacatgctgagtgatgtgtcaaacaagttaaactcattcctacagtgtcttctcaccactaaatctaagtttgtccagtgttcatgttgtagtttgaacttcaatcactgtaatataaataatgatgtacctccatgtactcaatcatctcaataaagaaaattcttccaatttatctttgcttactacttgttatgcttctatttttaatgatataaacacatggcactataaacttggtcatccatccatagctacattagaaaattgcttcccaaattaccccatactggatctattaagacactgtgattctgtaatgcctattaagcgaggcaagaatcacatattgccattaatcatatcctctacttgagctagccaacctcttgaattagtgcacactgatctttggggaccttctcatatacaatccaaagattgattcaaatattatatttatttcattgatgattataacaggtttatatggatctatcccttatctctcaaatctcaggctcttgatatgttcctcaaattcaaaactatggttgagaaacaatttgggttacctatcaaaggtattcaagaagatgcgggaggtgaatacaagccattcaaaagatttttgtcagatcaaggtattgcattttctcaccccttccccttacacacatgaacagaatggtagggctgagaggaaacgcagacatatagttgagacaggccttactctacttgcatagtctggtttagatttctcctattagtggcatgccttcaatatgatacctttactatcaacaagttatctacttccattcttaataacataagctcttttgagggcctatttagacaatcaccagactatgccatcatgaaaccatttggatgtacttattttccatatctcagaccttatcattctcacaagatgaatttcaggtctgaacaatgtctctttcttggatattcaccatatcacaagggctacatatgtgaaaatgctcaaggaaggatgttcactgcaaggaatgttatttttaatgaatgtcactatccaggtgtcttctcttcatcaaccacaagtcaggtccattcttcctaaattaatgttcctactgctagttttaatacatcatgctttcaattaaacactaatcctagtttttatggtgtcatgccctctcatatcattgagacaaaccaaattaatgtctcctcaatagaacattcattagtcattagagagcacaccataattgaacatatcccacctattcctcaaaaaaaatccttaccaaatagtttcttcacttgaaccaatgcagaatcccatactagttttagtaccatttcctcctcaaaccagtactcaccacaacatgcttacaattgattctatccctaatatttccccaggtaccacatctgaaagcttcttacctcccatcaaccttaaccaaaatacttgtggtgaacctagttctactacaaatatcacacctcccataaacttaggtcattaataacaaaccatagatctagttaccactcactatagatggccctactgaaattcctacaactagaactcacttaatgagactcgattacagaatgggatagtcaaacctagagcatactgttgggttttatgccctaaataaaactcatttcatataatcagatttacttatcagaaataacattttatgttgca

SEQ ID NO: 381686 - DNA, 1520 bp, Cannabis indica
agacgagaaaaaatagtaaactgaatcggatgtttacccctactcataaggcctataacactagtaaaaattccattcatagtgagaagtctattcaaattgcaattcatgatagtaatgaaataaatgtgcaccaaaatttagagttttcaaccaattatagctcaaaatataagactatatattaaatcactcattgatatttaattagaggttaaattaataattaatgatgtaataagttgtgaaataatattatttcacgcatgccccttagcaatttgtagcacaaattataatacaataaatttattattattattatttttcttttttagtaaccaaagtacaccaaaacattaaacttgcttatcgatagctagttttatcgatattatactaataacggtatcagtacttaaaatatgcatccaaacattacacatagtaacgtgtcaattttcatggaatacttgttagtctttcgactttcggtcttcttctctgggaattagttcccggagagattgatgcctttctcttgttcatcaccattatattattattattattattattattattattattattattattggtagagttgtcaaggttttggattggaacgatgtcgttttgtgcaaaatggtggttaataatggtttgagaagaagagtgattatgatcaagtattatagatttgagtaggtaatgctcaagcttctttaaatctgataattgaactggttttaatagaaattcttctgctccttcttctaaacacctataaataatattcattaattatcattatattatctaattaatcacatttatatgtataaaataaaattaattaattgaaaagagaaaattacttgttgattctagaaggttcattctctgatgacattactacaactggtacatctttccaataagattcctgtaattaataacaatataagaatatataaaaatttgaatatgagttgccaatcattctttttttttaaaaaaaaataattttgaaaaattacaaatttattaataataaaattgaaacattaagaaaaaagcatattataaactttttttttttaaagaaatcctttatttttttaataatctttttcttagtatagagagctttctttctctccatgtaaataaatatgaaaaacttcttaggttgagcattatttttactcttattgtaaaaagacactttctttttctttctttttgtttttggaaagaaagacattttctattttcagcatgtaaaaaagttatacctaatttcttttaaaaaatttacataataaaccgaaaatttgaaaaataaaaattacaaaaatatgttaacacaattttttttattattatttttatacttttaaaaataataaactgtttttttggttatattatagtttattcagttatattataattttcatgaagttatttttttagttattttataattgttgtgatgttaaaattttaccaat

SEQ ID NO: 381687 - DNA, 1893 bp, Cannabis indica
aaattgtgtaaagaaagctcttaaagcatgccatacacatttttatatatgtatatagttgattataatgcccaattagctatcttccaaggtcgtaaggttagtttagtgcatgaatgtgtagcttcatagctttccacttatataaatatatataatgtacagtgcatatatacaaatatatgggtacatagaagtagatcattttatagttaattaaattgatttttccattaaacaaaattggttttcacttttcacacacatttatatgtaggccaactcatatatgtataatgccaatgaagtctattagattccaaagaggcagcacaaaagagaaaaaataaaagaaaaagtatattcaaaaacataaagctgataataactaatgataagaaagcgagaggaagaaattgataaaatatatatggccaagaggcccaagagtagtgtttggtgagcttttgaattaatcctcatgatccatgacttacgtggtgcaattaataattgaattatattgaattgttacccattgggtggtagatgaatcgtcatttttatgttgtgaaaaaattcgtgattaagtattagttacaaaaattataattaattgcgattatataattttttagttaaaatacttgttgtttcgaaactatattaataacaacttgtatctaattattatattttaattataagtaatattttattgtgactaaaaatcacatttaaccataaaaaataatgttgtgattaaaatattattactaaatatatatttctttttgtagtgggtgtaattaaaatattaaaggattgataggaattgcaaagagaaagaaagaaaaaatgaagaagaagaatactcaggtcacagtttataagtgaagttttccatgagcttgctgaaagatttatcagcgacacgtctcattaaaccctaaaagaaaatagtgttgttttctatttacacaccgtctacagaagccttttgttggtgcagtttcgaagcgctagcaaaagtcttccaccaactatttttttttttttaaaaaaatcacgttcttaaatggtgagaaatttttttttgagaacgttcaccagtgccatgttattgtcgaaaaaaatgaatttactaccgaaaatatctcatggaagattattttaatagttttgtcaatgtctttatatgctcacaacgatggcaaaagtttttttaccaacgattgttagcatcaatagaatattgtttcccaccaaaattgtcatgtcttatggtgggaaacgtcttcctattttgttggcgcattagataattactaccgataatagcatatgttctgttgttgttgtctacagtcagtaacccctgaggaaagccctcaacatcggcaataaagagcaccagcaattctcatctcacaaataaaaaatttattttgtattttcttttagtgacatttctcttcttcttaatattattagagcaatgctattagggaccttatgatgtctaatattatactgatgtatcacgttatgagtggttaacaatttcttctattgtttattaaataaaaaatgtcaagaatttgatattaatttgtaccaatagcaaaacatcatttcttgtggtgtttggcataagcttcacaaaaacatgtcattggacctatatatatgtatatatttaatatatggaagaggtttcaatggttacatttttattgtaaccatcatggttacatatttttaaaccattggattactattaaatggttgtgattaatttgaaaattaaataaaaataaataataaataaaaagtaacctaataatttatttccttataaaaatttaattaagattaattatattttaaaat

SEQ ID NO: 381688 - DNA, 1272 bp, Cannabis indica
agagagagagagagagcttcgaacttcgatgcaaggaggatcaagctagtctgcacgacgagtgtgggtcttagaaactcaaaaatccacaaagaacttagcctcataaggcttcggctttatggaatctttgagagatttttttactcagagaatatggatgagaagtaaagaatgaaaataagaatgaggcacttatatatagtttttggaaatttccacccaaaaacttaatgccataaaaataggcatgcatgggaaagaaaaggccaagagtttaaacgtgggaaagtgtgcaactgccacacaatttcccacacgaattgacgtaaaattaataactgccataaagtcacataagtagaaaagtatgatatctagccatgcatgcctacatgacaaagggtgttacagtaccagataaagtgtaaaatccctatccgaccagacattcaaatagggcctttaggggaaaatgttatcccaattttcgtccacctgacgtggcacctccacatggaaaaaagctaaaaacatattgaaggcaggttagtattgtccagcattccaacctacaacatcacatagctgcatggtaatagaagcaagtttatcctgatagagatgtacaagcatgcaaggtcttggtcagagctatagctatctggccaggggtgatagcctccaagcaccagacaacccttcaacaaggttggttggccgagcgtacagatacactccaacacttgcatttttcccacaaatcattccaactcgccctcagcattcctatgactttggaaaagttcaaactactcattaagatagggattctccaacaaataacaaccctattatttagggattattcattatctattttatatttcaaatatatagtgtaacttccctattttctagggatatttctatgtatagcttgtaagccctactactatataaagggcaagatacctcaacttgaggtctaactctcaatcacgcttaaaagcacaaaagccttgaatcctctctcttttctcatacgtctcacttgcaaaatacattttcatcattgtaatactaaagagagccatagctagaaattagaaattacaaggtttcaacctataatctgctcggtattatctcaagagtgaatacaactaaaagaagagtaggtcattacctgatcaaaggggtcgaatctctataaatcttggtatctttacatttattattgtacttttgtgacagtcataagcagaattt

SEQ ID NO: 381689 - DNA, 2666 bp, Cannabis indica
aagtttcaacatagttttctccccattcagtagctttactcttcgattctcttggtctagtctaactccaaacttcattttaaaataaaatgcttccacaagtcacagaaaggcacacacccacactcatgagtaagaactttttggaaaaaaaaaaagagggcaacatgaaattatgactcacttggcactcccttcattagaatcatcaacaactctaaatggacgctgtttttgcgggcgactctcgatctgaaattgttgaaaagcgaggttaaaaatcacaaccaattgacacactggctgaactcctgagaacaaatcaaattcttgcacgaatataccttcgtcaagttaatgtccctcagagcaaatactgccaaggccttaaatagtacaccgggaccttcctctaaagtgaaaacaacacttgtctggaaaatagaataatgttaatcttgatcaaattatatacaagacaaaatcattcacgacaaccaaacaagaaaaacatgggaaataaaccttaaatggtctgtcagttcctggaattatgggttctcttgcgagaatcagaaaacgagtaatgttatcgtcatcatcctggaaaaagcaatgaagaaacaaatcaattcaacctgcattacatatctgattgtactatgcatgtcaattcaacaggtcgataccttaaataccgtgtttagtttgcattgttctatacatgtcaaacattcattaaacatgaacatcaactctggaaatgcaaaccacaatggctaaatttatcatgtttactcatatatccttagtaagaaatatgaagagaagtcttacctgtattttgtctgaaagaatgtcgagcccataaatctttgcagatcgagcacttgcaatagcaccagtatctctaacgccaattgaggccaccatctgcataaaggttgaatctttagactctaattgcatgtactttacagcatgtgttaacagaaaaactagctaacctgtgcagcaccagcagtgtcatcagcactgattctcataatgcctaatttacttagcatcatctcacattgagcaagagcctgcaattaagaactttagcgacgaatcttcagaggaatcaggaaaaaatgtacacagataggtgctgttatatatgttattacatgtaattaaatttccatgtagtttgtatatgtataaatgcaggggaagtaacccacacatttttacatcagtcaatcctaaaattccataatctctactcataacctacttctacttttagtgcaaaagtttcaatctaaagcaaccgtgtgatagaaatgtaaacaaccaaaaccaagtgctagatactgtgagcctgcgagactaatcatcagggcaaatttaatatgagatcagcgagataagccagctacaacagggttgacatgatgtaaaacgttatgagcatctctatgtcacttttggaaggtccaatatagcttttgagatacaaaaccaacctgaggatgactgaaaacacgttttatgtcctccttttccactccaggtaatccaagcaggcagtggttcacttgcaactgcacctctccaactatatgcagcctatgacgaaggagtaaatcgtaattacggtgaatgcttccaccaacagagttctcaatgggaagaactgccttatctaccaaccatagttcaactgcctgttaaatcagattttataagaatcaggaaacgctgaaatacaaaagatatttgatgattaccaggattataataaacctttcaaaccttgaaagcagcttcaaactggtcacaagggacagtttcacactttgggtatgcttttaatgcagcagcctcactatatgctcctggtagcccctataaagatttaacacagctaccataagaaaataaagaaactacagacatcaagaacaacatatgataagacaatatacctggtaagctactcgcacttttgaaccatcattaggagtggaagaaaggtcatttgcagtcagtggttctgaaattgaagaaaaattagtttagggagaatccttatcatgaagaaagatagaattccaggacaggaagaatggaaataaagggagcatagaatggaagaaactagaattgtcattcagcaaaaaagaaactaaaattgtctctagattaatctctccctctttttctctctacatataaataaatgtatttatgggaaaaataaagggaagtcaccagacatgatatggtattggtatgtgttacattcaacctgtctaactagtcatactagtttttgggttccaagtttaaaggatccattagattgaaatacaacttgttagtatttcaaaattagggatggcgtttaagttttagagacaatcttggaggcagttattggtttgtttaatgacaacttggattagaaaatagagaacagtccttgttctgtttttctctctgtttttttttttcacacaatgtaaatcactgtaaattgttaactgtgtgatacactttcactctaatcaaaccagattaagagataacaagacaaaacatatcttattgataccactatccaaacttcttaatcaaattttcttaatgcgtgtcctaccaatcaattagtacac

SEQ ID NO: 381690 - DNA, 1169 bp, Cannabis indica
tgttggaaccatggcatttttagaattaccacattgtattaggcacaccatctattctgcaaaatgtgactatagaatccctgcacttctctcccatttgagttcaactccatcaacttccctttctcagcaaatccaaagagttagccatttgggcaggcagtatttagatgtttatgaagactagctcagtgagtaatggggtcctttttcacaattctaagcaatgattgatgtgtctaaaccattgttaaggggaaaaatggcaagacttaaagattctcgtgatgaattctggcttaagttttgttacgaaagactcccagagtttttctttgagtgtggcataattggctacccttttgataattgtccaactttcttggataaaatttataatggtttagaactacccttgaatatggcccatctataattggtgctccccttcctacttcgggctatgatcgatatagaatcgattttcacaaaggaaatgtttggcctctcatgaccagattagccaagaaatcattcactgctgttatccgtggccttgccacaaaaccattaccacagctgtagacattaactgacatagaattttcctctgctccttttgttcggactaacacttcgaatcgatccttccctattttctctaacggctttggctctaccactaaccatcctcaaagtgtccccgagatgccttttccaccatattttccatttccaatgacatcttcaggcttaatcccctccagcacttactttgccacttacccgccaagtcctgcaacttctactgtctttggccctacaagtttaccaactctgatctccacacctattatttcacttgtaattaaactcactatccctaatgaacaagaactacatactgcggatcctcaacgtataatatcggatatggatgtccatggtgatttagactaggacaaagaaaatgacagcccaaacataatgccaaagcaccatattgcctctgagtcccttcgcagtgtcctgaagcgttgtcaatctaatatgtaaagaccgcttagatttaatttggaattagtagataattagggtttaattatgaaactagattattaattatgatttatgattttgtggagatttatttaaatttagggtgtatt

SEQ ID NO: 381691 - DNA, 2156 bp, Cannabis indica
ctctctctctctctctctcgggtgtgttgtgtgttttctcaatctcaatgtctcatgagtttagaatacactgtgatgaaacaattgtttttatctcgttaaatttaaaagctcactcttttcctgagtgttgaggctgatagatattggtgtgaagtcttcgacggggtctattactgaattggatggttattttatttatacaaaaagtagcaaggaaactttgataagcaacatgataaatctctatactaattagttaggattgtatcatgtattattgtgttgaggtaaatctctatactaattagttaggcaacaaataattttttaaaactgaatccacttccacagttttgatgcgactctgatatgaacctaaaaactaacaaaaacctctctaagtctagaacaaatcagcttggttgccactttataaataacattacaacaaccaatgcgacgaaactcactaacattttgagggcattttgttttcgggataagagtcacagtggtagtattgatcaatttaagaatcttactagaatgaaaaaaaagacagaacaaccatacataaatccttacccattatatcccatttttgtttgaaaaaagcactattatatccatctggacttagagctttttcatccagaattgataaaaaaaaacagctttgacttctgcttatgtatactctttaagcaagaattcagcttgataagtagacaccaaatttccaactcacttcacactactaaaaacaaccttcctattctcttgtttggttcctaataaaccaccgtagaagctttgaaacaccaacaacaccctcttaagtattaaaacgattactttgcaaatcccatatagaatatatagagacttgaagtcttctactacaaatactcttgtcaaacaactttatattatggtctcctcccttcaaccattcacatttcacttgcaaaaaccgaaccatatcctcataagcctgttgatatgcaaatctagccttaatctcctcatccataagaacaacattttcaagatcacgaattaacttttcctgaatatcaattaatgtcacaacttttaatctctccaatttactaacaagacaatacattagactcccttgcacaccctccacccaaatttcagcaaccaagttgtgaaaatctttatgggtactccaaaaattgaagtacctaaaaggcctccgaatcttctgaggagggaaataacatgcaattaagtatggacaatggttaaaatcgccttcaggaaagaaagtaaccccaatagtcttgtaagcatctaaccacccttctgaagcaagaactcgatcaattttttcataagctctagatctaccttcttgtttattattctatgcatgaatataatatcctcaaggccacactcttccacataatgttgaaaaggaaacatatcggaaccatcaccattgtacttcaacctatccccaattgataaattgcattacaatctcccataactagccatggatgactaatttccttctttatttgcatcaaatcaacccataggctttctctccctttggcatcattaaacgcataaatcacagtaacttcaaatttctcaccattcttagaatttacaatacagagtgatatcaaaactacatgatttccaaaaaatttctcaccatccattgactagcactgccatgcagagtgatatcaaaactacatgatttccaaaaaattatctgaccattaggatggtgcatcacattaaaagtgaaacaccacccttgaaacatattcaggtgtaaggcttccattttggaagccttaacccttgtcaataggagaattaatgttatttaataaaagaaatatgtattttacctataaatactagacattctcacattgggaggaggattcgaaatcggtatcaagcttcaacgctgccaaaacattgttgtaattctctaaagtgtttaggaaactcgattgactctggaccattcgatcttgagcactttttctcataaacaatttataaatttttggtgtcgttttattgatttctttgtttttactatgttatattattaaatttgttatcaatattaataattatgtggatgtccaaat

SEQ ID NO: 381692 - DNA, 1692 bp, Cannabis indica
taatttttttttctttaggcatataatatattaagaatattgttgatgtgtatggtaagaagtatgataatgtatgatatttatcttaaaattaattaacaataagaaagatagatcacgatcctagttgtttgggcttttaaaagttgcttttggacttcctgaaactccaaaaacacttctgttactagttatgtaaccagtaaattttaatttttaaatactaaaaaacccttttaacataaactaattttagtaagctttctttaaaaaaaagaagcccccagaaaagaaaaaacaaaaaagtagaaacttaatcaaacaaaatccatatatcttatatatggtatacattacacgagagactctttcacacaaaaataagattaagcgtgtataaaaaaaactaaaagataagtacactcgattttttatgggtgtttgtttgattcttattttgaatataataaattattttaaatttttcaaaattttatagtaagtactgaccagcttactagagaagcgaggatgtttgatcagagtttgggtgagaccagtcttcatgacaatgggatcaacttttgtttttgttttgaagcctatgattgcaattatataactattgtatttatgagaatgaaatatacgtgttgctggactcaactccatttttacaccctccatatatattgtaatatacctttctctctttctttcttttatctaaaaaataataaaggatatatctatcaacttataatgatctatctaggctaataatactatatatgtatgtatgtatatatatacacattaattaagtaatgaagtttcttagaagattcataggaagcttcaaaatttggttttttgtttacatattaatccatgcatgcatagtacatatatcaatacactcaaatcatgtccatatatagttaattttcatttgtaatatattatgggtctttgtcttttatgagggtactacgtatatatatattcaagatttaaaaggatttcatttcaaaacatttacaccaaatatggaaatttggaatttttgttcttttcccaactttagatgacaattaattaatgatggaattaacatcttaagcattttaaaccacatctaataactagcattattctaatcaatttttgttcaattatattataaatttatttaataaatgtatctttcattaatcatagcaaactgctcaataaaataaacaataaatcaaaacataaacattaatagttatacaatcaactaaaactcgagaactctatataagataatgcgcaacttaattaacagagtatttaataaaattcaaaaaacattatgaaaatcccttactttcctagcagtccttaattattatatcaaacgctaacacatcattaaggggctgctgcaaatagcctcatgaacaactactaaattgtcgcatgagaaaataaaagttgcttctctattgagattgatgcttgaaatcggtttagtccaaagctccataccgtcaccttcacataacaacttttacagaagaatatatctcattttttagctcttaaccattgatcaagatttctatttgtaattataattattaggtactcataaagttataccgctaaaaaaattattaaatttatgttacttacaaaatcaaattt

SEQ ID NO: 381693 - DNA, 1609 bp, Cannabis indica
ttatatgggatatgatacttaattgtaataatagagatgatttctttcaaatattattctttcaaacattggtttttaataaagcaatgttatggatggatgattggctacatttggctgtagctattacattggagaaaattggttggacatgtatcctaacttgattggagcaacggtgacccttttttgtcaaataaaaattattaattgaagcaaaataaaatatatatctactgacaacttttagagttaagaattggagcattttttttaataataaatagcagaaaaaaaaaaaaaaataatagtgattgaaatgaaaagtaaaatattatattatagagttttaaaaaatgttaagactatatttgagcggtgcttgctcttacaaaccaagattttatttttttagaaaaactattaatatatgattattgtagtttgagcacatcctgaatttcaacatgaggatgatgataaccctaggtaatgcagtagtgtagtatgacagaaacagtttgtcagattatcatatgtctaaatcccatctcactgatgggtttgcactgcagataaacgtaggcgtgaactacggaaagcttcaaagtttcaggttagctagcggatcttcacttctctctctctccttaccttttcatgatatttttattctttcttttctctgtactactacgtgactttggctgtgtgtttggttttgttagggcgaagcaaaatctgtgtcagaagaaaactaaaaaccaaaaaccattgtcttgtttttgtcaatctatttagtattatcatttgtctctcagtatcagatatttatacatagagagagtctttctactttcaaatatggttaaagttatatgttgcagatttggaaatcttttgttttctttaagaaatctccatttttggtatcatagcactaatttggtactaatagatctcttcaagcaatccctaaatatgaactccctttatgtcaatcttttcaaacttttctttatttttaaaaatattatatcacttcgaagatgtcagtacaatttggttccctttaaagttctccttcctcgtcacttcgtacgattatactttggacttgctcaaattttaaacaaagttaattgaatttgaacatctcaccataaatatttctgagaagcaaaaagtgtactttgtttaataattatgtgtaacgagttgttttccatttgaaagaactaaagcccaatattattttgactcaattctttagttaaacgagaaccatgggcatgttagacttgttcgtctcaggaaataaattataaccgtacgtactatttcaactcccttagattttgttataatttgtactattaaaagtactagcttctctctcaccttttaaaatatttcattaaaattctattttatttattttactttacatatttctattatactatttaaataattaatatatttataggcagctaattttgtgcccagaagtagcaaacacgaattgcgacccgttgtacggcaggtgggtcccactgtatattaaaatatgttttaattttttatttatttatttggcaaccggttg

SEQ ID NO: 381694 - DNA, 2449 bp, Cannabis indica
aaaatggcctagctctccttgctcaagtgtccttacctctcaaattttgggatgaggcatttagggctgctgtttatatccacaacaaacttcttactcgcttgttgcaaaataaatcacctttgaaaattttattcaacacaaaacaagattacacaacctttagaacatttggctgtaaatgctacccaaatatcagaccttacaacaaacccaagctagagtttaggtctgctccatgtactttcatgggttacagtctcaattataaaggttaaaagtgtttagattccaaaggtagattatacatctctcgagatgtggtgtttgatgaattttccttcccatatgaacagttgtctgaccacaatgttaacaagtgaaccaaagagattccatcttctattttagcatttgatacctgtttgttctcacttgagacaaccttacacaatgtttgatttagttcaaccagccattaactcaaatgctgatatccctaatgctgcagctacaattgttcaaattgaccaaaatgctttatctgataaccttgcacctaattttgatccttgcaatttcgctactaacagctggtttccagacttgccttcaacttttgatataggtgaaacctcaggagcaaatggtgatgatattgttaatgctattgctaacaatggaaacactttctctactgttccaccaaatgattcaccaactcaatgtgatgaagctggtcaaccaaatccacctgctacaaacattgctccaccatagagagtgtcagtcacaccagatcccaggcctttcccagcttgctcttcccctgttgcattgcctcttattgctagatgtcttaatgctcctggaaaaaacaattgcaccagatgacaacataatttaagttaggagtgtttaaaccaaaagcattcttggcttcaagagaaccaacatcactcaaggaagcacttcaataagagcatttgaataatgctatgagtgatgagattctagcttttgctagaaacataacttgggttttagttagactccttgaaggacgataagccataggctgcaaatgggtctacaagagaaaggaaaaccttgatggtagtgttttcaagcacaaagctcaattagttggaaaaaggtttcaccagcaaacagactttgacttcattgaaaccttcagccctgtagttaaaccagtcaccataagagttgtattaactctagctttgttcaaaggttggggtgtgagataactcgatgtcaaaaatactttttttctaaatggtgatttgcaagatgtattccagtcccgaacccaattcagcccgaaatactcgactgtgactatatcgcgccaacttgtaagaaaatacctgcaaaaagacaaaacatgtatactatataataatatagtccataagcatgccataatataaaattcacagttttacccttcccgggtaaaaattacaaaaacacccctggctcaccaatggggtcttaacatgtcattcatcatattaattcacatataataaattatataatgatataattccataataataaatatttaacttagttagggttcgctaatctgttttctttaatcttaggatattacagtaaatcaccagttatgagtagatgaacaacaagtacttcagacactaatggtaaattgctgtatccctttatttttattagtaatgcgagatgatcactgtgttgtgtataatgcgaggtggttgaatgttgtctcgtacattttattactcaatcctgaggtggatataaatctcgttaattttagtttaatagtttctattcttgtctcacataagactaagtagtcagcaagtttgaacatttctatcaaacttgtattaaattgaaacgaattacttaaactgcatttaatgatataatttccttattatatttcctaagttgattcatattccttctgtaggacacgtgtcagcttctaatacgtagctgaattttaggcataagaattcccccctaaaaagtgttttttaatttagaaagaaatttttaaatgatcataggggtataattgtactaaacccttttgaaaaattgcatgttttgagttttagaaatttaggacttcgatgcacatcattgaacatttaatgccctaactgttctcattttgtaatgttcccacccgtcatatcaaatttcttttgtttgaacggtgattactagttgggtataaatttgaaactgaaggctcatttcaccatttttcgtcttttcaaaccttcctcggagaatgatctcactcaaaggagagtttgttaagtttttcattgcctaactaacttaacaacctcccttcttacagccaccaactttaggatcttaatcctaagcctataaataccaccaacacttatcattt

SEQ ID NO: 381695 - DNA, 3942 bp, Cannabis indica
gatgttgacatttcctcatttttcccttctaccattgaagaaaatgctgcatttatcaggaaaagaatgagacatcattcacaaagaacttgaaatggaaagcagagagtgcaccatacaaagacatgaattcgggacttgttacgaaactaaaaaaattagtaggtaattctacctaccttcacaatacttcgaaagaatgttcaggagaagagctccctgaccagcctatcaaacaataatgtagtgataagtaaagcaacaaaaagcagctactacaacgatgtaatgtctaaccaagatacgacacccaaaatcacataagtaaaatgcaattttacatgcccagtgtagacacactaaatatggtggaccaagcaaagatctcaaagaagaaaacagggaccaatttcaattgagaaagatataaatgtcatacttttgattctgtgatttctccataactggcatgctctttggcaacggcaaccaatgcagagctgatgcgtgatttgagttcagggagtactttcttaatatgttgaactagaatctgcaataaattataaagctaattcagagacagagtaaatgagtagtatctgcaaaggaactataaaatcctggaaataaggtatcaataaactagttcacgtttatgacagttgacaataagttagcaagagctgtatttaaaatataaatagcggttctgtaattaaagggaaaaaaaaagaggttttttgctactatatattcatgaaacaataacagcagcatctgctgctaatattttacttgttagctgccacaattttatacctggttcaacttctttgctaattgagggacaccacaactatcagctagaccattatatacctgcataagagcaacagaaaacattaatgagagaccttttttttttaaaaaaagaatcatgcaatgaaattatcataatttcagaaaattataaccatacaggtcggctgcggaaaaacttttcttcagccacaagtgcatccttaatgcttctgttaagcaaaatatcctgttccaaatagtaaattaaaacactcaattcgtgtcttcgccacttgtactataacagcaactttaatgtaaaccaagtatacatttataaaatgtataagatttaaaagataggagagaaaggaagaactgtcagcaaaagtctaactaaagaaaaaactccaaactcatttttgttccaatttccaaaatgagagacaaagattacctcttgactacgattcacaaccccaacatagccatgtttcaggggaatcacttttccaagcaacagattccgggcatcagtacctctgtccataatgtccaactgtaatcacaaaagtaggaaaaaagaaattctcatcgcaattaattgacagcttccaaacactaagagaatgttacaacttgaaaagaatgtaagtggaaacgcacaccttcgtgattactcctatggttcttgaacctgccaaaagaaaacagcaaaaacaatcaaaataattaatgataacaataaaattagatagctaccataaaattcttaattttgtcattcaaaaccaatacttaccatcagggtcagcacttccagcaatttgaagagcatctgaatttgccaaatcagaatttgcaggtgtaacagccaagattaaacaggtatcaattttgatataagacgtaatcattgatctaattcgtgcttcaatgtcactcggctggtcaccaacaggaaccttagttataccaggcagatccaccagtgtgatatctagaacatttggcgaaaatatcttcaagcgaatctgtttgtctgatacacctttgtttcctcctgcttccctatctgtctcagcctgtaccaaaaaagtaattttaataataaaaggaaatattttcgacgtccaatagaactactatatattccatacatcaaaaaggcaagcctactaataacacatttaagttacattattaaacaattgtataaatcagaaagtaactaggccagaaatctagggaccagacagagatagctgaagttggtatcaacactcaagttttactgtgatatagcatacaaagatgagggtttgtgtgaaaatttctatatgcatgattaaagtaaagattcatttacttcctcaactcattttctctctctccaaatttacaagctaagaaagtaaaattacttttataatacttccagtttcagcgtattgatattcgctgcattacatttcaactttatggctaatcatttctatataagaaataagaacacatttcaaagttcaaagcaaggccaacaacaaaacatacaataacaaactttcaatagaatactacttgtaaaaattaccataaatgaatctttacaaattctgtgacttatccaatgaccagcagtttgttacaatatgttgtgtgtgtgttttatttattagattagaaattttctgcattggaaggcctcaaaacagaggctaaccgattccatacatggtatcttttctgactagaaatttatattacagataatagaaggtggtaataattccattatttcataacaatatttgataagaaataatcaagaaaatatattatacaaataaacaaattaaagcttcaccagactaagattgttctgcatatcaaattacatggatttttgaaagctggacatttcaaaactgcaaatgaaacttatttgaatatatatacacatatatatattgacaaagtacagatatcaaatgcagattaagtaaactatcaaaatgacattcatctttttttaaaatcacaacgacattatcttaaacccccaagaaacatgtttctccatacatgaaattcatcctaaaaacattaccacaaggcatagtctttatctttactagataacaatcaaaattcaagcatttcccacacctagaaatgaagccagcccgcattattccccatttatccttctatgaaatatgaatcccacattatcccatttcacattctcgacatttcttctgtgcttaaactattagaatttattcattttattcaggggaaaaaaaaacattaatccaaaaaaaccataccaaacctgaatttccctgcggatttcggagaaatcgtgaaaacgcttcccaggcaagtgaaggaactccccgtattcctcatcggttccatcagcgttcttcttgatctggagaagctgaagcacaagaggtcggcgcgtacatatttcaggacccctaggaagaaagtccctgccaacaagagcctcaagaacactagactttccgctactttggcttccaacaacggcgacctgagggagctggatgctagattggctcccaagctgagcaaagatatcctgaagcttgttaacaatagggataacagaggttcccaaaggtgccgcagccgacgacgacggcggcggcggatgtgatgcctcgtccgccattgatggatcttagagaagcttcctagggtttttgaattgtagatagagatatagagaagaaggatttgattagaggtacgtgatttttgggggttcgattgatcgaatgagaaggattttgggggtgcgcagaggagttgttaagctacacaccagtgcgctgggaaagagagaataatgttttcacgttggaagctttttttgaattacgaacaccgtagtcccccccgaagcagctacaagctcggctggctcaatcgaatcgactcggctcggctgacttcagggaaattaccctaaatattaatttttttattttatttttttttttcaaatttagtgtttgggtttataaagtgatgggagctctagttgcaataagaattactatatgattttttgttgcaatttaggtttgcagcactagttgc

SEQ ID NO: 381696 - DNA, 1906 bp, Cannabis indica
cgcatcattactactgctcgattattatatatatggatgaattgaatttcaagtgttaggtggttttgagtctgattttagttgttattaatttactactgccctctttttttaattgttgtgatggttgctcatgcactagattttggaacaacatatcagaatggctctcccaagtttgaaatctgagctgaactcggaaatgtctgttgttggtaaagaacttcaaaagtatggaaacatggcggaggctaatgtaagtttgcattgtaatcatatgaattatttttgccatggttataagacctggtgtttctgtctttcctcatatggctggcttgtcatatatgcttgaatcttgaatattgtttgcttctatgtatgaaactataatatatatagataattgttagttacatgactaaaaatgtgacaattgtcatttgttcatttgtctcactatcgctactatggcgattattaattcaagttaatttttttgccttgtccttccagatggaaaaaggagtaattttgttgaacattttgtcaaaatattgtgaaggtgaatttcaatatcctgttatcttgttattttgtactttttttttttcactagacaggtctttaagtcacttctgaacctatattattcaattaacagatttttctgctttggtggatgggtgtagtaaggaaatatcaactaaagaattgtcaggtggagccaggatcaattatataattcattcaatatttataaagagcttagaggtacagtttcaactttagaacaactttgtcttttgttctcacctaccatgaaagcatcactgattactgttttacatggtatgaagataaattattaacaagcagtttggctttaagtacttgtaggaagttgacccttgtgagggtctaacagatgatgatattcggataactattcaaaatgctgctggtgctaggaacgcattaattgttccagaggtgagtttatgataatggcatatatgttgtattgtcctgcatctttggggtggtaacttgttaccttttctgtcttccgaagatgttaaatttccacaatgcaggccccgtttgaagttcttgttagagcacagattgctcggttgttggaccctagtcttcagtgtgttcgatatgttcatgatgaactaatgaaggtgagatgctttttattatataatgctttgaaagatttagatatgaacacgaaacacaattgttttgttaatttcagattagtcgcgcttgtgaagtatctgacttgcaaaggtttccgaatttgagaaagcggatggatgaaattatggtaaagtttttatgcgatggtgtaaagcctgctgagaaaatgattagagatcatatagagatggaggtagtgaaagttttccaaagaaatttgatgttccattctgattaatctatttggaacatgtcatattcctagtattgtatatcaactgtttttctggttttaaactgatttaccaacctttatttcagatggattggataaattatttgcatccgaatttcctcagtggaaggaaggctgttaagcttgctttagagcaactgagatcacaacaggtacaagtcccaccctatcatcactttactgaacaaattgggggattgaaatcttagaaaagagaaaatttgcaaaggaaaatgtcatgaaactattggaaatgtgtatatatatatatttcttttttttctgacaaaatcatagttccagacaaagtcttaataaaatgagtaattgatagcgaaactcttttatattttaatttttatacacttaactcccgtatttttttttgtgacaaaatcctcttaagtttacttttttttttacaagtttgaggtgtca

SEQ ID NO: 381697 - DNA, 3111 bp, Cannabis indica
aaaagatcactaagaaaacaatgagcatttgtatgaaaagttgcaaaccttttcagatttaattttcatctgtctaaccatatccaaaatctccataaagtaacttaagtgagcaccaatagtatactgcttcagaattggaaagagccaaacattcacctctgctaggtcttctgcctctaaattaagaggtagaagtcccaagaaagtttgaggacccattgcaccaagggctgttccaaggcattcgtggagctgaattgtaatgaaatcattaattgaagctacatagatataaacaaactaacaaacagctaacatcgtaatctttctgtcttttttcctttttctaagatcaaaacaacgtagtgaatccaacttaaaacaagaaacaccaaatttcacagccattatagacccagatgaaagcataaagtactgaacaacgagaaatatgaaagacaagaacatcatggctataaattttataagatctttgtaaatgttagtttactgacaaacatgttaaaacaacagcaatatcaaataaagagattcaaagcactggtcaaaaactaaagaatacattcacggaaagactcttccttcttgtttttctcatcaatagttagttttcatttgaaaggacaaaaaaaaaagtagatcaccacatttggaattgaatgccatcaaatcatgtttgcaagtttgtgacaaaattttaattaaggatgacagtcccttgctgatatatagcttgtaatagtcgaactaaaccatacataaaacagaaaaaaggataacgacaataaatagtctactaaacttgaggatttaaaaataacaatcatacctgtttcctcttagaaaactcttcatcaggcaacttctgcatctctgccatgctcttgagaattacccctcataagataagaagaatcaaaacctgcaagaagaattatttataaacgttttctccataaactagatttaacaaaatcagaaaagatgatttaatagatcactaaaaaaacacagaagtaaaggataaagcaataatattacctaacttatcaaacagtgatgaaataacttgaaacgaagggtccaaaacatctaagtaatgatatccaagtaagctctctataattgagcacactttttcaatgatggttggcccagacgtcctggaacccacacttaaattcatcaatttaaatgcatccaccccctcctttatcaagctttcatcgatacacttatgtatcaaactcttcaatgtagttacggctgaatgtgtagcttcttcatgttcagaaactaatatatctgccacaaaattccactcttagaaaagtattacaatgcataaaacccagcaacatattaaattaaaaacagtttaagcttgaaaaaaagttcaaataatcaaactctgaaaaacctctgagagcattgaagactacaggaagtttaacaatgcagagctgtctattacgagaataaactttgaccattccagcatcaagcaaacgagcagtgaatgtcagggcatccactgaggtctgattagaggtgacagaaagagctagtgagcacaacacatcaagcagtgtcttagaagaaacctcagaatctggattgaggcagagcaaaagcaaacaatctgttatgtgccttgataatttggggttatgcactgcgagaagaggtttaagatgttcgagtatctcggttgtgtatttggatggcataagaggaagacaatctttcaaagcgtccagaacatgtagtacctcctgggctcctctaggaccatcactgctgtttggatttgaatccatagcaaaaagaagaaaccttttgaataaaacagtaagctcttcacttgcttgagctcccaaagatttccctcgaaatttttccaacacatgacgaagacacaactgaacttgccttcttacctgttacaaacccaattgggatacgcattcagaacccgaaactacattgtttaatttgaaattaaattgaaaaacacaatatttgaaaaaaaaaaaaaaggaataattgaccttagggcgcgaatcagtgacgaagttcatcaaaattccatacaactgagacacgtctgaccaactagaagcctctttgatgattaaaaaatgtgtaatgcatttcaatccagcgattatggagcccattgttgacgatgacagctgaagaacacgaaccataggtcccgaaatcaattcctctttcttcctgacgacagcaacagggactcggggaagaagaagcgagagaattgtgaggaaggactccacaacgtgactcggtgggttgggctccgataataaacgattcagtgacgaccacgtagtaccgaagtaggccaccggggaggatggcatgttctggtccttaagctcctgggacatggtgcctatgaccgcgcagaggttttggtgctcctcttgagtggagtcactgaatcgcgcgaggatggagttgcagaaatctccttggtcgatgggtccgtcgaaggggctggtaagcccctcctctagctcaatgccttccatggtgagtagccttaggagttgcagagaaaccctatttgaactagggtttatggactcccaatgcgtgagcaaattaatgagataaattaaaattaagaaggtatgatgttaaaccctattaacaaagtttaaacgaaaaaacaaaaccaagttatattattatactcgccagataaaaataacgtgtattttcttgataaatttttctaaataattattaataacaattaaaaatttatatttataagtaattatatcaaaaaacaatatatcttttaaaaagtcaataaataaatagaatttatcatatgaactatgattcttgagatttgcctctaaatttctttttttcaaaaattataatcgaactagaaaaattgttacaaaaatgtctttaattatatttttactcatttttaaaaacaattagcacaaaggtgagataaatgtagtatagttcaagagtctagaaaaatggaaaactttgattttgaaaaaaaaaaacaaaaaagtaactagaaaaaaa

SEQ ID NO: 381698 - DNA, 2163 bp, Cannabis indica
aaaaaaagggaaactttataataattataattattaataggaccacttctgcaaaatcctgcaacagatataaaacagccaacaaagctataaaggatcaaaaccaaccaactaatagtaccttggtcctggagagagaaagagttaccaataaacaagtagggacatttttctttctttccacatacacatttatttatttattttaatcttttaacgaaagggaacaagaaaaaaagaaagtaataataatacaaaggaggtagtgactgatagatatgtacacgtacatatgatgtataccattattagagagaataagaggaacagacagatttgcagtggaaaaagtcagtggtgaaactttgttgccttattacatgctctttaaaatctaccattctccaaagtagataaaagtatgttcaaaactttttcttttgtaagtattccccccaaatacaatattaaggtatatgtatggatgtatttggtacagtagacattattatatgaatgtatacttttggaatgtgtatgagttaccaaaaatttatattacactctccaaatcggtatttgataaatctttaggtagccttggtttaataaaatggaataaaaaggaatggaaataatctttattttattcttttgtttggttggatattaaagtattgaaatgtcatttcaataatagaatagcctttccattattttggtgaaataattattccattttaaaatagaaagaaagactattacaatacatgatgaaaaaatttaataattttttttatacaattttaaattttattctattacattcttaattctattcccattctcattttcattcatatattttcatttcttccaacccaacgccaccttaatttgttagcatccagttcttagtccatttatgaattgtgtacattgtaattataatcattaaattttttaaaaaaattttaataattataaataatactcaatattttattgtgggtattattttcttttttgcacattaagtaattatttaatttatttttgacattgtaaacgattcaaaattttttaaaaatttgtaggtgattccaaataactacaacatacacgattagaaaaaataaaaataaaaatctatcaaagatatcaaacaagataggaagtgtcccttttaaaatgtattatagacttaccctattataattttaatttttctattattatcattatagtatttattgtagttatatatagtaaattatccacaagttttcaaataaactcccacaaatctacaaaagtattttagtacaataaaatatctttatttttatcctaagtttgttgaaaattgatcaattaaaaaattagaacttagttacacattggaaataagattgtgttgcactacaaaaaatattgacacttcgatcaatgcttttgtgggatagtaaaacatagccatatgcgctactaaaatccatggacgtagtttggcggacaaaagtagttttttttccaacaagaaaatgatagtgtgaggaaaaagggttgccaacaaagaaagtctctagggtatcagagccataactcatactatcttatagacgagtctctattttacactatggctaatattatcgacgaatcctcaagctcactcactgctcctctttcagcccctcttgcacttacaccatctcctacatctagaaaatagacttcaaataaaattagactttttttatgacctttcttatgttcctgatgaaaataaatttatctcagattctcctcctctcttaaatccatatcaacttttcactaagatctccttcatcttttactagaaccatttaaagcacttattacaccatccttcaaggctccaaaagaatatattcaagcctcagaattcaaccaatgccaacttgcaccaacatcagaagtccaatttgtgactcttgaaatacccctgaactccctccacaatggatggcacagggttacacccacatccacttttgtactattcacattactctaaattataatagcaggaagagacttccaattagctcttgtattgctattcctgatacttgaatgaaaaaatatcaacatgcaagtatagctactattgaaact

SEQ ID NO: 381699 - DNA, 1039 bp, Cannabis indica
gctctgcatatcgcttctacatctcgaagtagaatctttggtaagatcataatttgggcctaatatgagtgtattattaacaaaacaaagttaatcaaggttaccctggccatgtaagatatattcctagagctccaaactttgattctattagtcattctctttaaaatacatctacacattcaacatgagagacgtttttttttttttgaacacacagggatactgagatacctcaatgaaaggcagctacgagtaaatcttgaaactttcattatccgagttacctcatgatctgccatgcctttccaaaacacagaagtctttgtttcattcggaactagatgaggaagagaagagtttcaggcctctcaacattagctagatagatacataatcaccattacagaacaataataaatcatcagcaaaacacatatgtattagtttcaattgagagcatctacaatggaatttaaagcctctccattctccaactttcctcataatcttagataaatatttcattcccagaataaaaattagaggacgcactgtgtcaccttgcctaagacctctcttggcattagaaaatccacacatggagccatttaaaagcaagaaaaatttgggagtttggatgtataccatgatgagatttatgaattgagagggaaattcatatgccttaagaatttcttcaatgaaatcccaatcaattgtatcatattttttccttaggttgatcttgatcatgcaactaggcttacagttcttccttccatagagtcatactaggtcttgacataccattatatcatgagctatataacagtcatgcacaaaacctccttggttttcagcaattaggtctacaaggattctccttaaccttgaacaaaccaccttagcagcagctttataaaggacattacaataggaaatcggcctaaagtcactcacatttctgggataacttgtttggggaataagttttattgtagtagtgtgatagtcaatagtctcgtgatccgtaagg

SEQ ID NO: 381700 - DNA, 2912 bp, Cannabis indica
gaaaaaatcagctgggaatctatgataaacttgttttttgttttcacttcatatatttagaatccatgattaactttttaaagctctttccattacatagaaaattacattatgaaaggatgcgattctattatactgtgagctttgaggttgacatgcatatcgatcttatagaacagaatatggatacatgaaagtaagagaggcaaggagaatcactaactactttggtctttgataagctaataataacatacaaggaaaagctgcagtcatctaatgatctctttgtaccgttttgtttttagagggacattattctgttcaggggaatcctttcgttttgatgagacatcctttcgattggagaaatcacttgtggcatcgtcataccgactgaaactatgatctctgcaaagagaagagatagaataggaaaaaggttagatagtcatcatgtaatgattaacaatgtaaattgaagatttcagtgttaccgggaaagcaaaataatagttgagcaaagtgtcaagttagtaaatgttttagaatatttaaaggcacatattgttttccattgtaaactgacatttatttcatctattttgggtatgaaatgataaatggaaaggatgcaagcataatttaaatgactgttcaaccattacagaataaagcaaatccaggcgttagggactcgcaggcattttggttttccatattcgtcctaagggaaatagattggccctcgaattatgatttacgtgatttaatatctccaatctctctacagcccacactgttcctataccgaaacctaagatctttcgaccataaatcaaaacatataggaacatacagaaacttttgatttcacttatcatgctactcaacgcttacaaggatctttaacttcactaaacttctgtgctcagttaaggttgcaccatacttcacttaaaagtggatgtttacaattaacacaaatctgaaaatataagcttccttggaaatcagtgctttcccaagacccgagcggccaaacaaaccaggaacctccacattttttatgatggtatgtgtatatggactctactacaaaattccctcggtttagttctctaatcgtttactgtggctttcaaacacaaaacacgagtgggaaaactagagaagagagatttctcttttcttgttgcttttacaatattttccatctagctaatctacttgaacttttcttaaactactgtataccctttccccaagtttaactaatagaccttgtgataaaaccaggtgatttctttcaccttgggcaacaggacatcgggctacagcactgatccttcatatttctccagtgtggtagatatcaaaaactatgttgaaacagatttttcaggcaaatcatcctattttctttcaagggggaaaaagtttgtagtataaagactgatggattagggaaggtgtgacagtacaaatacaacatatacattcttaactctaactgcagaaaagcacggaaatataatacaaaaaggtgtaatgatttcactgaaaaaacctttgttaaataaaggttgaatatttcattctataaacaattaaaaaaaatgggagcatctaatgacataacttcaatgcaggtttccaacataggaaaaagaaacaaccaaacaacagtatgcacctcggcaatgaatataaaatatagaataaagatatgagaaaaatgttgttagaatagaaaacaaacctattccttcccggatggataaatttggacgtataatttcatcagaattcactagaaaaatgtcaccaatatagagatgatttgttgggacataaacactgcataactcctcatctccatcatctttctgaaatcaaacccaaattatcagatttgagaaaaacatactcctatgtactaacataaggaaaaaatcagtgcagatattcgctatggctaatgtcctagtccatttgtatactaaaaggagaagaaaaaacagatggatacagtatcagatgttggaatcattagtttaacttataaaatacaaccattcttttttaccagctctgtaacaaaatatagtacaaattttgtacaagtataatcagcaatcctcttctagtcctgagtattctaccatttttccccataacaaatatcctatcactttatcagaaaaaatagacataataaaatagccattgacagaattaacttatagatttgtttgaaaaacaaaatttctgctctcttctcatcattatgcatatcaatgatttttaactccttatcaaggggcaattggatacaatgataaggcaggtaacaaataaagagacgtgccaaagtacctggaggatcactgttgacgtgataaagccaattgcatattccccaagcctgggatgacgaataattgcaacctctttaaatgccgtggtattttgatctgtttttcagaggaaaaaaagggttatgccttgcaatatgaatagcacatagataagtggaaaatgaataatggatgattcaatgtaactttaacagttcaggaaggtaaaactcaacattaataggataagtagtaacatggaacagtgagttagatattgacttggggagacagtagctccgccgagtatatatatacatatattagaaagaaaaaaagacaaattcttgtgcaattcacaagtaatccgccaaccaaaatacttagcaaatgatgacaagacctatgaactctatagggatgtttcaacaactatattaggagaaataatattagctcaaaatgattctacgggttcagaggaaaaaaatatagtaccaggggaaattgcagcactaattgtttggatgctgagtaaatatgcttcataaa

SEQ ID NO: 381701 - DNA, 2907 bp, Cannabis indica
atttcaaactatcatttcaccatcattatacatatactttacacatactattatccatcataattattacaaaccataaatcaaatacaagttacaactattatatttagttttattctcaaacagtcaaatattaatgctaatagtcggtcatgtaagatgaacgctttgtaatttctttctcaatggcttggctagctttagcaatgtgacgtgccttcgcagcttcagcttcttttgctaatctcatttcatgggctacctccatcctcacttttgcaatctccttctcctcctaaaaaagaaataccaacagaaataagatgtagtactaacatataaaaataagatgtaataattgtaatattgcgttaacatgcaatgttctcacacaaatgatattgctctatttatttttatatattttatttataatgttacgatcaaaagtttttatttgtaaaaatatatttttaaagttttaaaattataaaaatacattttttaataacaaaaagtattagaattaattattctgttattattaaaattagttaatcaagtggttagttaggatagatgtaagtttgttactcgatcacttactctatgtataaacaaacttcttgttttactttttcaattcaataacttcagattacataaaaaactttactctattttctttatcctaatatggtatcagatgcaaacaaacaagattgatgattgaagctttctttgagtctaacaatggtgcgcactcgagtgaactcctcagttacttccactgatgcaaatgataatccagtggtcgatgctccttcaaacattgctccgccaccattgcagacatcgactcacaccattcctaaagctcctgcttcagctcctcaaaatcactctgctctgattgatcgaccagcgtacgaggatgttagaagtccctactacctcagcactgcaggtcatccaggtttagccttggccacactagttcttactaatcacaatttccaaccatggaagcgtgatttcaaaattttaataggtgcgcacaacaaaacccctttccttgacaacagtcttcccaaacctcctccccaagatcctctgttgagttcttcgatccgttgtaatcaaatggttcaatcttggatccttcattccgtctctcccaaaataaggagcagtatcatgtatcttgatactacactcgaaatgtggtctgaacttcacaatagattcaaccaagggaacagttcttgcatcttcaaacttaatgaaaccttgaccttcttgcatcaaggagatgactcggtgagtgcttacttcaccagattaactgctatttgggatgaaatcaatcaattgcatccaaaggttccttgtacttgtttggctgctgcaaaaacccaagaatatttgaataatgatcaggtattataatttctcatgggtctcaatgaaatctaccatgtcgtccgtgctcaggtacttcttattgacccttgcccccctctcaacaaagttttttctatgatttttcatcaagaacaacaacaaacccttagcaatcgcaacaccactcctcttactgccactactaccaccactgccccaaatcccatagctgattctcttgcagccatggcttcaagaaccaaacgtatgcgccctacttgttcccattgcctaaaacctggtcaccttaaatataaatgttactttcttataggatttcttcctgattatggcaacaaaaggactattgatacccctatatatagctggaaacaagacaatgacaatacctctaaaaaccctccccacactttacaatgttttgtcacaacaattgaaaaaaaccccctcagctcataccaacacaatgtcaacaaattatttcaatattgactcaacagttacaaccaactacttctacatcccaagatacttatgtgattgtgaccaatttctctggtaatatcaatcattttccttataatttctagataatatatagtgggacaactcatcatgtttgttgtgacattagatgtttttccttttttgttgcaaacaaacattctaaatctgtgacattacttaatgttacctctgtcaatattgaaagaattggaactattatcatcaattccagacttatccttacaaatgtcttgtttgtcccttaattttatttgaatttactatttgtgagttctttattagacaacaacattcacaacatgttattcactactaattcttgttctatccacaaactttctcagacattgaggattgggatagctaatcggctaggcaatctctactacattcaacaagaaatcccttataagcttgtatctcattgtcttacttgtactgttaatatagacaaacaccaatggcatactcgccttggtcacccatttgtactagttacaaacaaaattaataaaaagtttcattttgacactaatcttactcatccttttaattgtgaaatatgtcattttgcaaaaacaaaaaaaaaaaaaactgccatttcattcccacaccagctttgcccctcatatttttgacctgatacatgtgaacatttggggtccttaccctttagagtccattgaaggttataagtatatcttaattattgtagatgatcattcgtgatacacttggatctatatgataagcaaaatcagaagcttctctcatcattcaatttttttacttttgtcaatgtccattataaattaaacattaagtctgtaagtaggggtggacatcatccaatccaatctaattgaaccgaactgatccaatccaatccaattacaaaagttggatatcaattactattggattggattggatgctaaaagttggattctaatt

SEQ ID NO: 381702 - DNA, 3999 bp, Cannabis indica
aacaacacatatggaaattggaattggaatgcttttacttattacaattttaaataaaaacaatgatgaaagatagcctttttgattgattggcatcattttttatgatatagaaaaagaaacaacattgccctttagtatttaaataagattattgaaatctccacacattcacaaagtataacacattgtgccagcacatatttgttgtttagatataaataaggaaaaattacataactgttattttcagtaaaaatttacactttaagttgattttttttacactattacaagaaataatacacaagaaataatacacaaaactaaccaaaaaaaaaataacaataaaaacaacaaaaaataataatacacaaataacaaaaaatcaacaataataatagtataacataaaattgcatcaaaaattgtattttctattaataaaattttaaaaaattataacaatatttaaaatttcgtacgactgtatttctatataaaaaaaaaaaaattgttattttcgtctatgaaattatccctataaataattagatcaataatgcttgatgggcttcgacccaatccaacttccgggcccaaacataagctgtaaagttgaatgagtaccaaatgattgttgggcttcagctaacccaacccactgaaagcaggcccagatttaaagccacaacccatgggattgagggaaggaaaagccatgattgattgcactactaatggagcctgcagtcaccaccccccaccaaggtttacaatcataagatattgtagatttcttaaactctttactgttcaggttgtttgaagttgtacccctctgggaaaaaagttgtataagtactaaataagagtcaagattttaataatggttaggccctctattgcatgctcgagaagaaagagcattgctattgagcatcaatcgtgtacgttaaaaattatatgacatccaatatttagttacaccaatagcagtattataccaaaaaacagtggtgtcttttagcaattcgcaattctcctcgaggaagcaatggtgaggacattaaattaataatggttatacaaaagaaggaaatttgaatccaaaccccaaaatagatcatggggaatgaaactttttaggccaaaagtaacaatgatgccatggacagcattctatgcagtgcatcaacaacagttataattaatattgcctttaccttttcagctttgctttcattccagatcagtttcattgtattttgtcctttgataaataatggaattatgcaatggaacctctacaaaagaaaagaaaagaaaaagcatcatttggccttgtcccacatttggaccattttatacaaactgccatagctgccttgatctttgataataatggaatcatgtaatgggaaaaaatctacttgtgcttgaaaagttacagacagacacaactcaaagggcagagtaatggtggcatcaatcaatcgagtacgtaaattctagacgcaatgtcctgcaccaaccaatcaaagccctcaagaagcccttgtcctgtgtaagcactgcatccgacgattctccagtgtcttgtactgttcatggcgtccaaatttagaacctacacaagagcaagtataacgataataaaagactatttcataagcacaaacagcatttatgtacggatcaacgagtggatgaaaacaagtgaacaaagacctaagttatatcataaaaggctaacttactttggcaatttcatctggtgtaagagcccctttaatgtcctgcttgtttgctagtaccagtaaggatgatccggatagcctctgccaaatgaacaagcaagtaagaatcgcataatcgtttcaccattatcaaacaagaagagtgaattcagttgtgaaagaaaattcacaaaacttaattacaccagaagtaatcagcttctttcagttcatcaagttggagatcatctcaaagtatacaccagaagtaatacaaatgatgcctcaaccaaaatccatcaaaatcataatacacaaaaaagacttgttgttcaacagtatatgaggatggtggaataaataaataaatctcatactaggcaattgacaacaataagaagcatcatcaacatccacaattcatgaaaaatggaaaagctttatttttacctcttccttcaaaagattatccagttccattttgcagtcatctagtcttcgaagatctgaactgtcaactacccataccaagccatcagtttgctcaaaatagtttctccagtatgatcttatcgtcttttggcccccaacatcccatatattaagtacatacctaccaatatgaaaaaccattagagagggcatatactgctatgaaaaaccattgtgcatataacgccagttacgataagaagctcgtgttcccaaagaaatttgacacttgaaacatcattgaactttcttcatcaaggaacaaaacccaaaagtattttacttcaaagctactatctttatttaggtagttagaaaacacaaacataggaaagggtgttgatagaattgttaaagaagagaaagctcacttttggtaagtcatagtcttgatgttgaagccgagtgtaggactaataacactggtgtcttcgccattaatcttcaaaacaattgttgtctttccagaattgtcaagacccctaaatgagtgacaaagaaatcatcaaattcattctaataataagatgagacataaagatgattattgaaatagaagaaaggaaagactttcatacaccatgagtatgcgcatttctttctccttcttcttaatcttccgaatgatggtaagaagacccatgtccaccaaatctctctttgagtcctaacagtacaaagacaacaaggtcttgaatagcagagaggttgaagaaggtggtgttgtgatgtttcaatacagaaatgaccttgtgctgttcttcatttctgtggtgaaattaatggcccccataatccaaacagtcagctctaacaaaaatcatagttcaaaccaaaagaagaaaaaatcattttttttaaacaaaatcttgcttacagtatatattaaagaaaatgctgtagaaacttagatcaaattttcgacattgaatatatttgaacctcaaatttgaaagagacgaatgtctaatgattgagaattaattacatgtcttatttaaataaaatttaaaaaaaattacatgttatataacttaatattatagaaataaatctgcataaattaggaaaaacaatcttatgattccgtgacaaaatcaaccaaattaacacatctcaaaaactgccaaacccaaatctcagaatttcatatagtttctattagatgtgccatttcagtatttattttcttgctcggaaattaatggaggattaatagcatactattaaattttagacgagatatatacataagaattttataattacttccaatcaatcaaattttgcggataaatgcaatgcataaactaaataaaaatcaaatttttactagtcttagggatcgcagaaccgcatgagaagaaggattgagtgagttatggaagaaatgagaaaaattaattagcgaaagaagatgttggttagtagtacctacctacctatctgttggagtcgagaacgggagaaccagagatggagactggagaggacagctgagccctgcgttttctcaaccgggagattgggctggcgtgagcgatggagtcgacggcgccggagatagagagaagagagagtagtccaaacaatacttcatgggcttcgacccaaataaaagttacacagaactaagttactaatttatggtgtaaatgtttaagtttaactttagttgtagtttaattttggggtaagttgaaaaatgccccttttattcatcaattaattaaatttacctctaattttatatttatttgaaacatac

SEQ ID NO: 381703 - DNA, 2011 bp, Cannabis indica
aagaaaatggtaatgatgataatcgtcgccggagaaggaatgaagctgttcaagagattcctttaaacaggggaagatcatcaagttctcatgtagttaaagttgttgttccggtagaagaagaagaacccgaaactcgatcgtcgtcgtcgtcttcgtcggctccaccgccttcggctcctcctacgcctccacctccaccgccaccaccccccgaaaaatacttctgctcctgctcctccgcctcctccgccgcctaagaggcataatttgcattcggttccgaaaccgccattgggatcaaaaggaggtaaggaggaggcaacaatgtctacaacagcaccggtgaaattgaagccattgcattgggataaggtgaatacgaatgctgaacattccatggtttgggataaagtcaatgacaatggctcatttaggtaagtataatcaataaattctaaaatgtactctaatttgatttaatagttagttcattaaacattttagtatgaagggttttgtaaaaatagaatcttttattagtaaaataattttgtatgattagaaaaacgatcttgaattatattgtgcaactataaacgactataaatttacgttgtatgatcattgtagtcgcataagtaagattattttataaattttctctttttaagactaccttaaaaatggactaacttcttatgtactaaaatggcttcggtttgatgtattttggcttcactattacctatttttttttgtacttaaatggctttttgtttggtttatttacaggtttgatggagatttaatggaagctctttttggatgtgttgcaacaaatagaaaatccccaaaaggaaacgaagcaccaaaagctataaatgctcccccacctcaagttttcatactagacaacagaaaatcacagaacatagccataattctcaagtcactctacatttccagaagagaaatcattgattctctcatggatggtcatggtttgaatgccgagacactcgaaaagctctcgagaatcgctcccaccgaagaagaacaatcgaagatcctcgaattccatggagaccccactaggctagcagacgccgagagctttctgttccacattttgaaagttgttccgtcggcttttactcgcattgacgccatgtcgttcaggtcgaactacagcttcgagattttgcagctaaaggagtctattcgaacgcttgattcggcctgcaaggagctgaggactcgcgggctgttcatgaaactattggaggcgattctcaaggccgggaatcgtatgaatgctggcacttctagagggaatgcacaagcttttaacctcaattcattaaggaaactttctgatgttagaagcaccgatggaaagacgactcttcttcatttcgtggtggaagaagtcgttcggtctgagggaaaacggtgtgttttgaatagaaatcgcagcacgagtcgctcatactcgcgacagagtagtaatagcagcagcagcagtagctcaagtaagacgacgagtttagcaagtcacgaaaaagagaaggaatatgtaatgttggggttgccagtagtgggaggtctaagttccgaattctctaatgtaaaaaaaagccgcagccatagattacgacactttttcaacgacatcctctgctgtcttgaaaagagcagaggatgttcgaaaacttatcgtgtcacaatccattaaaggtggattcgcgagagagatggagacatttctcgacgctgcagaagaggaagttaaggttgttgagagagaacaattgagggtaatggagctcgtgaggaagacgacggagtattatcaagcgggaacttcgaaggagaaaggagctcacccatttcagctctttgttattgttaaggatttcttggtcatggttgatcttgtttgtgttgaaattgctagggatttgcaaaagaagaagaagagagtggcggctgaaagtccacgatcgac

SEQ ID NO: 381704 - DNA, 3317 bp, Cannabis indica
  modified_base (181)..(181): a, c, t, g, unknown or other
ctgagatgcctgaagttacagagttgcacccagtgcctgatgctcacgttccagttatgaggttcaagtttggtggggtttccatagatttactctatgctaaactgtcgctctgggttattcctgaagtaagtattgattttattcttgaagatggttctcttcatcctaatctgtatcngttagtttttttttttattttttaaaagaacaataccattattgatagttagaaaaaggtgaaaacgtcaaattagggaaaaaaaatgaaagagaaactccagaccaaaataagtgatttttccattagaaaaatttcatgggaagaggaaaattcttgaattccttttccatagatgtccaaagggattctaaaattttggctttgatttcccatagaagccacattgactcccccctcccccatctcttaaaatttgactatttaccgttaatcatgtttgattttgatcgccacgtcaaaaaaaaaaaaaaaaagatttgactatttatgttaaactgccgtttgtttatgtttatggttgtctggtgaaattatgggaaatgtagttgaatttgatcactcagttcttgttcactaataataaaaaaaaaatcttatagctacttcacattttgcaagagatagttttaactaggaaaaattgatgatgtcaagtttcgatggtgccatatagtcttttgcggattgggtattgcctattatctgtgtttgatactttattttgcaacaggatctagatatatcacaggactcaatactgcagaatgcagatgagcagacagttcgcagtctgaatggttgtagggtcactgaccagattctgcgattagttccaaatattcaggtttgtttatagcctttttaggttggatgtgtgtgttgatgcgtctacaatcatgttacaatgtttcattcttgtttcttttttgtgtgtgcagaattttcgcacaactctgagatgcatgagattatgggcaaagtgtcgtggtgtttattcaaacgtatgcttgagattttctattatgctagatttcagattgcggatagtggttgtcattatttattttactaattagagtttatatctttaatcatgcccaggttgcaggatttcttggtggcataaattgggctttgcttgttgctcggatttgtcaattatatcctaatgcattgcctaacatgttagtatcccgattcttcagagtgtatactcaatggcggtggcccaacccagttatgctttgcatcattgaagaaggatctctcgggcttcaagtttgggatcctagaagatatcataaagatagatttcatctaatgccaataattactccagcttatccttcaatgaattccagctacaacgtctcgtcgagtactttacgaattatgtcagaagaatttcagagggggagcgatatctgtgaggtatgataaaatttagtaattacgtgttccttcccttggtaaacatgtattagttgataactttgaatgttgatctgtatgattttcttctccatgcaatgagatgaaagaaactattttggtatatttttttaatgatgattagtggtttagcttaattgtttcttgtttgcagtatcatgattgtattattaggtttttcctttcacattatggatttgcattaattatttttgaaggaagttatctttcttttgctattagtttttccatttttcactttattggctatcacccatttatatttgtgtggcccctaccacttgcctatacagcaggtgaggtgaagcagttacttttgggagactcaaatatattgttctggatgttctccgtaggatcttttttgttgaacttaaagtttttattaaaatttaaatatagttcatagcttttaccttttcaaaactaaatttagtgttcttgtatttctacttgaaggctatggagtcgaacaaggcagactgggataccctttttgaaacatttccctttttcgaagcatataaaaactatctacaaatagacatcaatgctgaaaatgctgatgatttcagacaatggaaaggttgggttgaatctcgtctacgtcagctaacattgaaggtgagaaagctacctatgctatatatgttccgtttctgctattttctaatgatcaggggtctattttgttcatgtttctaaattcagattgagaggcacactttcaatatgctccagtgtcacccccaccctggtgatttttcagacaaatccaaaccttttcattgtagctactttatgggcttgcaaagaaaacaaggaggtttggcaaatgaaggtggaacctttgatatcaggttaactgttgaagagtttaaacaggcagtgaatgtgtatactttgtggaagcctggaatggagatccgtgtatgccatgtaaaaaggaaaaacatacctaattttgtgttccctggtggagttcgtccaccccgcccgtctaagttaacttgggatatgaggcgtgctttggaacttaaggcgtctggacacgcacaaccagataagtcagatgaaagtaaaacggttttagatggagcagaaggtcgcaagagaaggcatcctgatgataatgttgaaaacaacataagaaatataaagtctgcggccccctgctgtggggaagatcttgacacacgctctcctgttggcactgtcagttcatctataaaatgcgacaacgtccacccgaacaagttcattgaatcacaaactgaaatatccgagaaaaatctagaagacaattgtaaaaagatagaaaacctggcaaacattcaaaatcagaatggtgacagtgaagtatcatcatcaagcagtccgccaaccaaaacttcaccgaaagctgtcgctcatgcatcaagttctactgtagcagagaagatggatattgaagaagtcatgccaggttcgtatgctccacatcaagcagtgttagaagagcttgaagatgatttcgaacatagaaataaagtgaaatgcgagatgaaaggcaatgaagtggagtcttctatgcaaaatgagccaggtgttccagtagcctcgatatgtcgaactggtccctttaatggttcatactctaatggtggcgtagaagagcttgaggttaaatctattacttttatttgcttatttcttgcatctgttatactattatcttgttatcttactctgtttgaaacttggattttagaaggaaaaaacaattaatttcaaggaattcaaaaattatgaattaatgtcaacaattttcttttttttt

SEQ ID NO: 381705 - DNA, 1860 bp, Cannabis indica
tactagacttataactacacacacgtatatatatatatatatatatatatatatatatttccaattcaaattcaagaagtaagcaacaggttgccctgactgcataatttccaggtctgaaatctgtaaacgctgctcaaaatgtgatgtgatgccttttcgaaactaacaaatcccatgaaccagaaatcatgcccatctgaggtaacaatctgaatatatttctctggcggactttccttcatcgtcactgggttcacattccctatgttccccaatggtatcacaacctgttccatacagtacccaaaaacaaaacatctcattcaatataatgtctcaaacacacatacatatataaaaatggttcatagttcataccttgtaatagctccaagcttcttgtccagagggagcattgaaaaacagaggcctatcactacagaaagccaaacgagctgtggatagataaagggtaccagcaacaggcccggtcgatgtcgaaaggtaacaagcaaaagtcttcttaagcttctcgttcggctcagttccgaatatctgtttgaacagtgactcaaatcccccttctgtgatcgctttcgccgtaagattcactttcccccacgcagcttccgacactgatggccctgtcttcactgcaacacaaaaaatcactactttatcagattctaattaaagacccaatttttaacatatgagaaaacaaaaaacttacggttgtgccaaatgtttcgggcaattgtctcggccttagtgctccaagtattgaagaggtgtattactggttcaaaggggttgttggtgggcttttcgatcggatcatactgcacatacggttgatggtagacctgttgatggtcgccggcgctccacaaggcagccttttgattatctgggtgtacaccgggggaggctggtgctcccatcacgtgggttccccatttctttgagtcatcggttgaagaaggaggagtgatgatgggattgtgaggctcagactcagcttcttgttttggttgtggttgtggaggtgacgatgatttgtggggttctgttgttgctgacatggttggttgaattttgatcaaagagaaagagggatgatttcaaaagtaattactttatactaatgagaaagaaaaagatttgtttgatgggattttgaattgtgaacgtaattagtgttttatataaggattaaattaagactgagttgtttttgttctaataatacgcggtttggttttgttttctttgcagcgaaggatatgaactttttaaactttcttgactggttgtttcgggagacccagaacagaaggttctagttacaaatgagatgagatgggacgattgttattatgaagttttgatttgtcaagattaatatatattagatttggataaatactatactagattttagccacctgtgcataagtgtggcacataataatttttgttttatattagctttttttattattattttattttgatcgaacattttattaggttggtattgaaagataaattatggtactttcatctctttgcttatttcatgtagttttttcactatgagacaaatcgagtttccaatctaataaaattatctcataatgaaatgtaataattgtggggttaggtttcttccaaatattatgtattaaggacttgtttagtacgtggtattatagtgtattgtattatggtagattgaattgtgttgtatggtattgtattagtgttatttaagataatactatacctgatattgacttgtattaatagattgtgtaaaattataatatagtttcaatacactcgactccaaca

SEQ ID NO: 381706 - DNA, 2330 bp, Cannabis indica
tgtgtgtgtttgtattacatctctctcaagtgagttgatttttaagtatgcaagacaccaatgttgatgagattaactctatattctcctctataattctccagtattgaaaatcgaataaagcttggccaaatggcaattcctcccgaggattagtcaccataaaaggggtgatgaatctcgttatatcttaattctatttcattttattttattttgcaattataaattctggttttatgtcattgtttaattttgtcattctagttattcatttcttattttattttattcttaaaaggtgttaattcaccacaaatagtatcagagcttcacggttagattgaggattcaagaatcaagttttgtagtttcaagaactcattaagattcaagaactagaatggctactactatatgtgaagtagataagtttacgtgtcttaatgagtttggggttatggaataataagatgaaaacaccccttgtgcatcaaggacttgcaaatgggatcatagtgactagttctaaggaagaagaaaatgttaagaagatttctcaagagatagagatgagagcacatagtgctattcttttgagtccaggagatgcagttcttagagaagtagctgatgaagaatctgccctcgaattatggaacaagcttggatcaatttacatgaagaaatctttggccaataaattatatttgaaaaaaaaaaggactttacacgatgaagatgattgagactaaagagcttcaaaggcatctagaagatttcaacaagttaattctggacttgaacaatattggggtcagaattaaagaagaagattaagtcatacttctactcaattcactccgtaaggtatataaacattttttcaaaactatactttatgggaaagatacactaacaatgtctaaagttaaggtagccttgaattcaaaggaaattcagaagaaagttgaaaaacttgcatctagtggtgatggtctatttgttcatggaagaacaaagaagaaagaatttaagaaactcaagaatgggtacaagccaatgtcaaaataaaaagcaccacctagaaagaagtgttattactgcaagaaagatggacacttctaagataaatgtctgacattgaaggctaaattgaagcgagacaacagtcaagggaagaacaaaaactaaggagacgtcgatattgtagatggatatgaatctgtaggggttataattgcatctagttcagaattagatggagaatggatcttggactcaaggtgctcatttcacatgatagtaaacaagaatctgttcagcagctacattgaaaaactaggtacaactgggctaatgggagacaacaaggcatatcagattcaaggaattggctccattgatttgatgctacatgattgcatctgttgacgattaaaactcgtcaacaaaactatggccagaaaatcaaagacttaaagagaaatgaaattaaaactcaaaaaattatgaacaagttttagagattttataaagaagataaatgttatattgcttgtatgtatttctgtgtaaaatgattttccaacgtccacttcaatggaagagaagggtatttataaggagctctaatgactccaaaatacaagttgatttcttggtggtccccaagtgtcaggagaaggacgttacaagctgcaggttgcagctgtaggatgtggtctctcggcttgtactatattctagtgccaactggtccttggggtaggagtaatggttacagtgtatctcttgtcaagacaccaaagcttgcaggcaagatgcctccactactcgtcctctcctcacgtttaggtgttgcacgtggcgtgaacgtaccttaatatgtactcgtctgcatgctttccttgtccctttgattcttcgtctaactactcgccaagtgttgttcatttcagttagggacttcgggagttgttgcaatgatcaaacgtaaggcatgcacactaagtggccctcgtagaatgcatgtcgagtgactcttggtgcattcataccaagtgactcttgttgcatgcatgccgagtggctcttagtgcatgcatgtaagcgaatctcgatgcaagcatgtcaagtgcctctcgatgcatgcatgtcgagtggcttttattgtatgcgtgctgagtggctcttgttgcatgcatatcgagcacttcttgttgcatgcatgttgagtgactcttggtgcatgcgtaccgagtgactcttggtgcatgcatgccgagtgaatcttgttgcatgcatgcatgtcgagtgactcttgttgc

SEQ ID NO: 381707 - DNA, 3460 bp, Cannabis indica
aaaaagaaaaattaaaattgttgtgagtaagatttgaatttcgacctctaatatatatgtaatctattttaaccatactataagcctactattagtctattatgtctataaatattatcttttattataaatataagttatgactaactaaaatacatatacattatttttctgatttctttttcagagagaacgactatcccctcttgctacaatatggatccgcctctgcccacaaaccaccctactatataaataatagaattttctcaaataatgttttaagtttctctcattgtaagttggccatttcacgtgatgtatggtttggtggcctaatcttccaagatgtatttgagctttttgcttagagtggttgttgcctttcaatgataattaaaatatgagtattgcttttaggtattagtggtgcttagcaccttctcgacatgtcgcgttgcgattggttagcgatactctctaaaagctattatattaaattatatgagactcaatacttagttggatcaataacgatattgacacataggagggtgctaggcaccactggtgccctttagcatttctcttaaaatattcaattataagaatatttgtggtataagagtactcaaaaatttatggttggaataatcggcaaagaatcaatatttttttattatttcactaacacacaaaaataacaaaaaaaaaaattacaaaattacagttatacataagtttaaatatttttacgattttttataattttgtttgcagaaaatatagttttttgatgtatttttatgctgtacactttgttaatttattattgattttttcattatttgtatgttatttttatttttttgacgttgtttgaatattatttttatgttacttttatgtagtaattttgttgttttcgtattatttttataaaatattatcaaaatgaagaaaaaaacccttaaatgtaaaaatacaaataaattataaaaaaaaaatagtattttatgtaattattcttaattttttttagctacaacaaatactcaaagttagtaaactcatttttatctttggtaatttataaatttcattcatgctttaaggtcattaggtagatggaattgaattaactaacagagcaaccaaaattgcaactaaaatccgtataacaacttacatatagactctaccggagaaactatcggagcaactcaaaccgaaattttttttttaaaagaaagttaaaaaataatatataaaataattcctataataataataataataataataataatcaatagattaggagaaaaaaagttgaaagtaacactagtgatatggtgattttttcttataacgttgtcaaaattaattgcaaaagtagggctcaacatggagacctactaatccgactttaaagcttaggcattaggtattttccaatatttcattctctctattcaaacctattaccaataagaatgttttaaattattattttgggtctattctattattaaagatatcattaatatttataattgagttttactttttcttatttattagtttttgctagttaataatattactaagatgatcttttataaccaatcatttattaaaaattactaaaatatagcaatacatcacacatatttagcacactattagaaatggtcacatgatctagccaaactagctttattacaacattaccaagcaaaataagaaaattctttactaaatggttgtgactttcaaatgggcaactaatgattccaaatccttataagaactaccaccttccatagtagctcggttcgccgctccacataattcttcaactcgacgtctttgggctcggttttcctcgccaaccgattccgcaaaaactcgagccaactcaaccgaattgggaacaattcgatcaccttcgcacgcgctctttcccacttccaaggtgtccaccaacaacgtggcattagcgtattggtcggcctgcatgggccacgtcagcattagtactcccgccgcgataccttccaacaccgagttccaaccacaatgagtcaaaaaagcgcccacggcccgatgccgaagtatcgaaacttgtggggcccaccctttaatcaccaaacccctttcacccactcgattttcgaacccgataggaacctttccgtaatcaccgtccacttgtgatccagttggcaccttaaccgaccacacaaaatggaccccacttctctccaaacccttagctaactcttccatttgatcatttctcaacacaacttgactaccaaaacacacatacacaaccttattctcatcacacttatcaagccatgacaatatatggtcaggagagaccgagttggacccacctctagtagtgggcccatttggatcatctaacatgggccgtataggcccaacagcccaaacacgatcatggcctgaatctttcttcaagtaatcaagataaaccgattccaactcggtaaacgagttaacaacgagtccccaactcaaccgattcccaataaaagactccctaacaatttccgaatctgggtctccctcaacgtaagatctgtacagagaagacaatttccaccaagggtattttggacaattcgcaatctcaggaaactcaaagacttcatcctgaccgtccgatcgtttcggcatatctcgccacaaagattgaatgacggccaaggcaaaagcgccggaaggagagaacgtaatccgacgaataccgagttcgacggcgaggtagtgtgtccaacccaagaacatgtcggaaacaatggcggtaggcggcgaagggtgggttttgaaccagtgagtgaggggttctcgaagtcgagtgatggcgggaattacgaaacggaatgaggtggcgggtaagtccttgagattctcaactccatggggaatggaagggtgagatgggaaagggaggacgagggtttgaatggaaggatggagagagaggagtgggttgagaagagagaggttttttggggttacgagaatggtgatggtgatgagatctgggttttgggtaaggatctggtgtgtgaagtctaggattggtaacatgtggccttgtgctgggaatgggaagattaagatatgggtggctttgccttcttctccggcaccggtcattgaggccatttttctattctgtttttattttgtttgatataatataataatataatctaatatatatatatatacatatctgccagtgacgcactctcatacataataaaaaataatacttttcttttcacttttatatattctgacccattaatatcattaatatgggaaattgtacctcttaaggccatttccagtggagaaatttaaatttggtgttaaatcaacaccaaaaaaactactatttcaacattattttttt

SEQ ID NO: 381708 - DNA, 3309 bp, Cannabis indica
aggctaaattagtataattagtttaataaaattattcaaataatgacaaatggatttttacaattcggattattcatgtgcggttgtgttcagtatgtcatgcccactacaataacctcctaactcttgttcaaaaaaagaaaaattaaaccatttggtggaaatatccttaatttggtcacaaatggccttctccaaccgatacatgactccactaggcaaggccaaggcaaccaaaatgatgtcatgtagctaagttggtggcatatatagaaatataaacatatatatttatatatttatatatataaaggataataatatagctactgtactatgtgattaatgcctacttcatcatctttcactaaatatttgtatttatgtggacatttatattttataagtatttatacaactttattggtagatatatatgataaataagctggtggattaattttgtttgatgttgcttagtttatgggcacgagaaatgccggctcataatttagatagtaaactaatgggctgacttttgcatggagctaattgggtttcaataatgtatttttacattattgataatgatatattttttgtttttttggagaaatagtaagagacatcataataaatatatacaatatatatatatatattacatattatttatatatatataattgttcttgcttgagttattatatttttgatatttctatttttttggttttctcattgtaatcagaagatctgttgaatcttaggggattattttgtaaattcttgattaaggacaatgttttgtttgcacgcctcaggtattatcattttattattgtgatttgatattttctaacaacatttagtcacatgcaagaaatttatgttgtgactaaaaaattatctcaaaaaatagttattttttgtaatgcaaagacttgaactacatgtaacttgatttctataaaaggatacgtagacaacttattttttaagattaagtgcaatcataaaataccacaaaatgatataaaacgcttaatctcaaaattccataaaagatcattcaactaggaatttttttccaattttcaaataatataaaattcctgaaaaatagtcacatatcgtagttattttattcaaaacctaaaatactatattctgaactaagtagcttgatcatttacaaagaaggtatgtaggcagcttagttagccaaaattatcgagtttagctgcaattctatattcaccccaattttttaaggtttacctcaattattaaatattatcgaattttctttaaataaaaagatggtaattaagagattatttttataatcttaataagttaaacttaaattagttaaaattttatattatgaatttggcatagatgaaattgtattttgtatttattttaatattttaagtgtaatttttttttaacaaggtcctaagaggtcccaaagattaaattccctcacccacaatatcaaataaaaaaaataataaattagaaaaaaaacgagacattaattttttattttctttttaaatatcacaaaattataaaaatgaagctcccaaattcccaattaaaaggaggatggattggtttatttaccagaaagacaaagcagcagcctctatgatcagaagacatgtaagccagttttaaggcaactttgcctgccctaactgcaaaaaatgcctaccggaggacaagacttgcttcctttttgtccttattttgttgggtctgaccacaaaaaattcaaattttatttgatgggataacttcaaccccttgtttgaaagtgacctggtcggctaattgtgtacattttccattttatttttcgttttttattaggaagcaaaatagagaagcagagagtatcatatatatatgtcacatgtcccaacaaacagaatcccagagaaagagaatgcttccaatatcagaagtgtagtcagatgataatatactataaaatcccatgtcccataacgtatgatctgacatattcatgtacctatagctaattaaaaatgtataaatgttaatccaacggtgatgaagttggagtgagcaatgagtttcaacccttcgattgtgtttattttacttcccttagttttttatgatgagaaatcatgatgagctgtgtctttgagaaacacaatttacaccctcttttcttcaatttttatttttatttttcttgaacatcaagggattaatcaatcgctgtccaataagttttcttttttttcccacttcattttatgtgttcaacgtgttactgcaaattaattcaatgatgaacttaaaataagtatgaaatgagtggtgataatgaaacaaattttaaaattgaccaagggttctataataaacaataaacatttctacacgtctttcctgtgacagcatgcaattacatgaattatgcaatcaataatgtcatgaatcataattagttgcaaatttgcaattaataattactagtattattattatataagtttaactgtacacttacattattgtatatatgctcataggccagtggctaaagaatgaatgttgttgtgttaaaacagcaaaatatcttatgtaataatgaattggaacttaatcaccacaagtttcgtaatatgacaactcgggaggagtcatacgtagagattgagactattccaatctttgagaccatcaaacttttctcttttttaaagaaaaactaattatttgggtccacatacagctaactagattgtggtatgaaccagtccaaaacttcttctggggaatttgacttagattttctttttgttcttataataatttatagcatgatcaaattattaattcattcagattacacacgtatattatgaaaaacaaaaacaaaaacaaaaaacaaaaacaaaaatgttatatatatatatattgaacaaatatacatgaaattgtgttgaattaatgttcatttatttgtttaaagaattcatttaatctttaataaaaacatatataaataatgtactatatttctgtaataattaattttgactttaaattatatatataatgaatgaaaaacagatgtataattgattacaaaaactataattaaaaatataatcattttattgatgtaaatttagtgtccatattaattcaacacatttttagatttaatacattatcatttggcaataatttttaggaaaacataataaaataagatggcgttttgtaatatatttttaattagtttttgtttttaaa

SEQ ID NO: 381709 - DNA, 1278 bp, Cannabis indica
cggggacccctgattgcaaattgccattcaaaaatattttcctgttgacaaaactttttatcttagaaactacacacaatctggggataaatgaaatcttacattcttcattaataccagaagaaactcaaatagcagtaatacaatgaacaaaaaaaatgagaagaacaaagaaacaaaggaagacaatcgtaatggtacatgatgatacagtgttgcccaaacatggagatttaagcatatcattaccattggaaatttccatatccacacaacaagtttactccaaaaaccaattataattttcctaacaattcttcgcatggaggataaataaaaaccatgaattcaacaaaatccgtagcatttcccgtaaaccctcaaatcaattttgagtttgagccctaaatgaccccaaatcaatttaattgaataccccaattctataaagtgcaatgtcttcatgccatcacccaaaaaaaactgtagaataacaaaatctaatcctttcaatccaaagaattggttaatttatatcattataattttcttctaaaataaataaaaatcttaaaccaaataaaaagcattttacgatatcaaaaccataactttctgacacaaatcagcataaaaccaatcagaaaaaggggggaaacaagaaagaaagtgaaaagggatcggagaaagagaacctcgatgggtaagctcatgaaatcatcagagggattggattgcatctccttaacctcttgtagaattctcttcactgctgggttcttgagattgtacttgtcttctgccatcgcgatctgatctcgccgaacgcaccaccaccaccgtccgatgaaaaatgtggccggagagagaagagaagagaagaagagagagaaggtgggtgtgagtttggtattttgttgatgaagttgtaattagactagagtcaaccatgttgccactcgtggtgacacgtcatctgacacgattttgcttacgtgttcggtttctattggctgttaaattcaattttgtgaaggtggatgaatggaggtggtgtttgcttactcatcattagttactcatttatctcaccaacaaaattatcaatattcttcttcttttcttaaaaaaaaaaatgattatatcaataaaaatctaagttataattttgagcaagtgagttaatacttaggtggcgtttggttggaggtaatgaaatgaaatgaaatggaaaggaaataatttttattccattcctttgtttagttgcattttaaa

SEQ ID NO: 381710 - DNA, 2593 bp, Cannabis indica
caatccttcgatatatcaaccccattcaatgaacgacacaaacaataataaccccacacccaaaaaacgacgaagaaaagaccaaaacgacaatgaattggcagaaaaagagaagaagaagaagaaaagcttaaacggtattattacttctcttctcttaatcgatgaacaagaaaaacaagaccaacaacaactccaacgacaatcaaacgacgataaatccttattaaacgacaatcacaataagaagaccaaagccatgttcgattactactcctcttcaaatctcaacggttcagattcactcaagaaatcatccacggcttcaatctcagccgccgcagccgtagctgtagccgccgtaacaagcgccgccgatgaatcggagaagacttgttctaaatcgggtcatcagaggcgattgtgggtcaaagatcggtcaaaggcttggtgggacgagtgtaacggagccgattttccagacgaggaattcaaaaaagcgtttcgaatgagtaaaaaaacgttcgaaacggtttgtgaagagctaaattcggtaatagctaaagaagatacgactctacgaaacgccatacctgtacggcaacgtgttgcggtttgtttatggagattagctacgggtgacccgcttcgactcgtttcgaaacgtttcgggttaggaatatccacctgtcataagctggtgttggaagtttgttcagctattcgaaacgttcttatgcctaaatatcttcagtggcccgattcgaattcggtcgggtcaattaaagaggcattcgaatcggtttcgggtataccgaatgtagttgggtcgatgtataccacccatatacccattatcgctccgaaaataagcgtcgcggcttattttaataaacgacacaccgaacggaatcaaaagacgtcgtattcgattaccgttcaaggtgtcgttgatccgagaggcgtttttactgatgtttgtatcgggtggcccgggtcaatgcccgacgatcaagtattggaaaagtcagccctttatcaaagggcgaatggcggggcgttaaaaggggtttggatagttggcgggtcgggttacccgttgatggattgggttttggtaccttacacacaacaaaacctaacttggacacaacatgcttttaatgagaaaattggtgaggttcaaaaagtgggtaaggatgcatttgcaagacttaaaggaaggtgggcttgtttgcaaaaaaggactgaagtgaaattacaagatttacctgttgtgcttggtgcttgttgtgttttgcataatatttgtgaattgagcaatgaagaaatggaacccgaacaccgattcgatctcgttgatgatgagatggtccccgagaattcgatgagatcggaaagttctaggaaggctagagattccattgctcataatctcttgcatcatggtcttgcaggcacttcttttctttaagaaccaaattgtgattcttttttctattgttatttatggctttgttattttattatttagaagtgaatttattataggctcaaaccttattttgagtagtttatagtgttaccattaactttaggttcatttttagtcttgtgatttagaaaaaaagaaaaagaaaaaaaagaaaaagaaaaaataagatatgaatgaaatttgaaggttatacatacaattattcatttgtaacttgagcattgaatattaataattaattaatacattaaagatttaacaagttttttctttcttggaaagggattatggttagttagttagttaattacaattttttaaaaattctatgtatatattgatactctcacttacataatattttacataaatactactgcaagctcaaaaatcatcaatcaatataaactatacatcaaaatgaaactatatagtgaataaattgttgattagctcacaagtacaaattcaaaccacaaaacccaaccattcataaatttcattcattccataaaattatggagaccaagctcggtctttacacaaaatctcagtaggaatatcaccaaacatatcaagtaacgaaacccgtcccacaatattatgggcagcatagttcaattctcggggaataaaaacaaacgaacaatagagtcctcccccaataaagatattgggggtggatggctcttgttggcagcagtggccacgataaggagaccccaactccttaagaggtctccttttcgtgtttgttataaaagtatcattacacccaaagagttgagtcgtcctctgtacacaccaccaaactaagcatggtagatggatttgactcgggaacagagttagactacggtgacagagtgtcgcaacgaaggagaagaatagacacagcttcgactggacgtcaggtgctttgaactgaagtctgcatttgtcttgtaaattatgatcaattgtgtgctttttttcgttaacatatgctcatggcttgacactactaagtgcaatgagtaatataaacaacaccacaaattaaaaacacacacaagttttttttttttcttgtataaaatcacactaaacatagcattt

SEQ ID NO: 381711 - DNA, 6153 bp, Cannabis indica
ttcttgtaaaaatggattaagcaagccaagccctggcttaactactataattttcttctcttttatattcacgttgttttttacactgaagtgttctaatttaccttaaatactcacaatatttagtgttgtctatttttcttcaacaacaatgattgtgtttaaatatatcataaatatccttaagtaaaaatcataacagtttaatttgtataatttttttgacatacaatttgtataattcaaattaaattaacatcataaattaggataatagaattcttgaattgggagtatctcacattcatttctcataaagtaataacactcttgactcaattatgccatcagagatctagcaggcacaacctttgtcattttgtcattattatgattcgtgaatcacggtccatcaacaagcccatccgcttcattttcttctttcaatttttgtatcagctaatatttgtatgtatatatagatgtgcccatactaaatctaccaaatcagtatttttgtgattttgtcaaaggacgctgcatccatcttcctaccactcctaatttgttaatatataggccacggttccaaatttaaagcaagaagtcacaccacaacccagcaattaaaggtttagtttctttctttacgaatagaaatctactatctacataacaatttgaggcgcaaatagctctaccaataagtagggaatctccataatatatattatataccaaaaagattctcaaaacactaaagcaatcactgtgaactaggcccaccacaaactcattgtttaccatcctttagacaaaaaaaaaaagtgaaatgttatccatgtaagcatacagtcttacagcgcaagcacatggcttatttttcttagctatattcagaaaataatcctttaatctccacaaacacaagtggaaaccaagaatgagagagatcagtggagtgaaagttctcacgtactgtgaccaagacaccaatatctttcttttagacagcttgagatttctggcgtttcaagtactggaggataggctccttgacctggtaatagcaaattgaaaaatgtcagaagccaaatatatcttaacatgaccaaatttaaccgatctaattctaactgagaaaataataaggcatactgtgctagtttttctggttcttttgtcttggctggctctactacacaaaatctcatcgacctcattacagcgattaatgttcacatttgctctgttctctttccctgcagcgaaactctctcgagaagccactggctgcagctccacaatatatatcaaacattagttgttatagataaattaaaaaagtgaaaagttgtttggatattaatgacccacagtacttgcctcggccctgcttagtggagtatttccaggctcctttccctttgaaatggtttgttcgctcctagttgaatcattttgatttgtatcggatctcactttcatccttgtgagatctgaaccaatagagtggaggagaccgcatgtggaaatgtccctacctgataacacaaacactcgttacgtacctataatttaagaaacacttctggggtgtccaaaaaggttatgattcggtacccatattatggctagttagaagacttgacttgttttgtggttcattgttggtatccacatcctgcccaacgcaaaagaattgactatttagcaatgaagtcttggaagataggaagacattcaatcagaacaagaacaagaacaagaacaaagctataaatatatatagaaaaacgtatagtccattaccatagcgtcattatttaaggctttcctgacttcagttaactttttctctgtcatgtcagaatgtatcacacgtttgcctaaaaattcattagataatcaagttagacaagttgacccaattctaaatcctctttagtatttgaaagtaaaagatttagctgaagagaatgtaccaagccttcggttgccttttgcttcaacaaaaccatcttttgtcattttatcaataatcttccgtacagtaaccggactcgcttcaagcttattttgaagttttggaaccgtcacataggtcataggaagagcatggtacagagcctgaaataaggcaatacagtcaggatatgacggtagacattgtagaggaagtgaaactgaagaagtcgaaagattgattttcattactaagaaaagagatacagagatgattttcattactaaaaaaagaattacagagaagaatatatacatgaactcaaaagcaccagcaagaacgagaaacataatagttacaggtagcaactgagaactaataagaatgactaacagacatatttaataacagatataccacactactgaactgagaccagacacaaaggcagattataaactatcctgttcatctgaccccaaaaaaaaagtagaataaataagtaactaaattagtttatttttgtaaatcatgccaattcaatgagtttggttcgttttaagaactcattagaccctgtacgtgtacattgtatggagtttgtttaagaattgacatatctacaaactaaaaaagacgtgacgtgaaatgcaaaattaccttcatgtacatcaaatcttcgccctgcgcaggtttatcaccaacttgcccatccatttcttgtttgaccaaactgtattcaaagtcaaatttctgttctcgtttcggaagggccagaacgaggatcagctagaaaagaaaaatgtaaaatagagcaaatcttttgaaataaaagaagtgaaaaatgaacaaccttcttcttgttgatagcataactgtcacttcctgtcttagataggacaccttcttttacaagcttatccataatttctgaaattcaaataaattcaatgccattattcaatatcctccacagaagttttaaaagctgaacgcctaacaaatttttttagatgcctagattttaggcttaccttcagtcagaacctgcgtacagcaatgcagaataatgttagcactataattcatatacaaacaaattctaagaaaaagaggctaaaactgttcaaatcttcaccactgagatgtctgggaaatttgataaaacatcagtaagttcaactgtgtcaaggtgacggcaattgatccagtctttcactcgggacagttgttgttcatcttccatggggtcctgcgtatcatctgcggaggtacaaagctaaacagtcagctaaattttcctagtcggatttgtgtccattctgtcgaaggatgctacgcaaacttgaattttgtttgttgttcaaataccttcatcaaccatggtattatcttggtcctgtcgtttctctgtgcaaagaaataaggttgcatccaatcatatgtagaaatcagaaagcagtaacatccttagaaacatgaaattttccatgtaattcttacctgctggcacaaccataaaattattttcttgtgaattatcctgaaaggaaaacaaaggctatgagcagattttttttttattgaactgtacaaaacgtgaaaaaataagttctaaacatatttaaaacgacagaagaacaagtaagcataaagacacaagtgaaaactgtagttgaataaattggtatacctcatcactgtcagaatcggaatactcgcccctctgcacagaatcagctcctaaactaacttcttcatcatggttatcttcattttcatcctcacatggatcaagcacacttttcacctaacgattaaatcgtgaaatcaaattttaatccaacatacgaagccaaagtaacaaatctgacagatttctatcattttcctagtacctatcaaaccaatcataccttaagagctagaacaaaatgcttgctgtttacattcccaacctccattttcaaaggacttttggtccatgcattgtgagcttcgccctctgtgcagcctctgaagaatggcggctcgtaatcggctggctgcacagtaaaattattgcaaatatttcaaaaagataacggaaagaaaaatggcaatgaaatctccgatgcttcggatgtataggtaagcaactgcattatcaaatctctatgaaacacattcaattgcaaacagatactttgacaaagaaaatgaacaggttatccacattacattaaacttcattacaagaaggaaacgtaccgtcacgtcatcgtagtaaagtaacttcataagtatggttcgctgaaacaatagaaccgaataaatgagcatcttaactatcgacatatcaatacaagtgaaaactaaattaaaatctaacaatattatcaggaaagaataaaacacaattgagatttacttcttcaggcatcttgtccagagttctcatgagttgaaccagcgtccggaccattttacaagcagagctcctgacagtgataatcaaatcacaaaattagatattggagccaaaccaggaacacaatgagagatgatcacaaactagtatgttatttgattaacctcatctgattgggagtaatttcttcagtcgaattgcatttgaatgttccaccttgcttcttgtttccactccggttgatattcatcaagacctcctgactatcagacccggagtaactgaaggaaactgcgaatttccttaaaaaaataaagtctagaaaggtgcttttaactagaatcaacgtcaaatatcacaatttctcacagtttccgccatgatttgctattaaatatacatatacaaccatgtatcacgagttacttacaagtactttagcataattactatctagtattatgcgctaaggcaggaatttcctctcagctaaccacaacttgccacattatgatcattcaccaagaatttaacaagaaaatgcttgagaacacttacaagcatattcctcaatcatcggcccgtctacagcttcacacacgcagaacagcagcgtcttcaggtacttcttctgtactgcatcatacacacctgcagaagtaaacagatacatattcatagccatatattctaaaaacacaaatgacaatcacactaagcatgaaatatctccaactcaaacctttttccatccaatcaataagtctccgagactccgcatccataggcataagcttttttatcttcatatctattgacgattaaaacaaaagaaaaatcagctcctgagtcctgattcgtaaatgtaattaaaagtgaatatctcattaaaattagtttacctaaagcaggaacagacttatcgttgaaatacttttccggaaaaagacctctgatgtagctgatattgaatatagcaatccggagcaggttccttgtctgaaagaagatttgatttatcaagcatttatgttgcaggtctacaaaggtaaaagctattgagaatttacgttgtttctaaatcaaaattcaaatgatgcatttagagaagaacttaataaaccgaattagaagcttgatctactcttgatagatcaatgctactacaagcttgaagtattcagacgctcagagcagaacttaatgaaacgaactactcgtaatagccttgatctaccgatttaagatatctaaaggtcggattatcgcttaaactaaatttccttgtaagatcaaacatgatcttcaaaaaaaattgtagcggatcattttaaaataagcaaaatccatctccaaattcaaaacacatatcatcagttcaatattatcgtgatgatcgtttgcacgacatacaaatttgcatgacgcacactactagcgagaggatacagccaaacacagcaaataaaagtttattgccattgttgagctaaaacagctaaacaaaatactgaaaggcaaggaaagagttaaagtcgttcaccagaagaagcgaatcctgctcggtaatttctgcttccttaactttctgagcgacgacctgaagaaacaaattcacactaatgagctatcatccacgtaatcggtgtataaagaagacgattaagaagtagtacggatcgttcgacaagcttcttctactcaccattgttgcaaaaaaaactcagcgaattctaagagagagagagagagaacactctggaactcgtatgtattt

SEQ ID NO: 381712 - DNA, 1727 bp, Cannabis indica
attttaatttcatttttatttttatatcatcaaagattatcattagttaaaccatagtcggctgtaaaaaaaaaaaaaacctaatagttggagcgattacaattttaaaacacggacgagtccgtctcctattaccaagtaccacataaccacatatatgatgatacatattataataataaaaaaatagctggcgaaaaatatattatatatttgactgcggaatgcccattcagaaatagtcacgtgtatagactatgcgggaactgcggtcacctccgcttcacattattaaaatttttttctacttttttttctttatttttttatatctaaagaaaaaaaaaactatgtacttttgtgtgccatattttctttaatgggatgatagtagagttacgttataaaatttcagttttctatgtttcaaaaatagtagtataggtatattggtgacatggattataaagttggtaatcatccaaagaaatatatagaggatctatgattagtacggagtacctgttatctggatggataacgacgccattggaaaggtctctaatgccattcatgacattttcgcggctgaatttcttaattgcagaagccagtccgaactcgtttgcaatcagattgaatcgactccctcgtgatgatttaatccgatccctaatatcctgcaactcaaactcctcctcatcaccatcggaggaggaagacaccatgtcatgatctctctcgtcgttctgatccactctcccaatcccattcgccgccgcaaaagacatcgtcctcaccgattaattaaacaatgaatttctgtctccgactcatatatatatattatagatgtatatgtacctgtgttaacatgtcccctttcaaaattttaataattataaaaaggacttgctaaataaagtagttaaaattttcttctcatctttaatttcgggatttatagcagagtgttgtagacaaaagatatgaaataaaataaagtattcaaataatccaggaaggctaaccctgcaattgtactttttgagtgattatttggtcacgaggaggagaaggaaaagaatcacgagtgataattgttagtaattatcgtacgtggacgtcggagaattttacggacaatttaaggcatcattgggctggcacagaaaaagaaaggcaaccatattactgggattttgaaagagagggatttaagtttgagcaagacaaagtggaaaaagagagcggatgcgtagaaacattgacaccaatctcgttccaatttatacgacttaccatatatcttaggctgacgtgtccgcagttttttactttttttctccccaaatagaaaattgtcaaatataaattatttaattgatattttctgctacatttctgcagccaacgtgctcacccatttaaagccaagctgcaataccaaacaaacaagtacgatttattaagggaaacagtaccatttattttattatttttattattattaagagtgtgtttggaagtaactgtgtaattactaggtagggtaattactagggtagtaattacacaatttagtaattacactatattttaaaatgcaaggtgtgtttggatatgaggtgttaattacatataaattcctaatatcttgtttggcaaaatagttagtaattacataggaaaataatattttttaatagctaatgtttaatatggaa

SEQ ID NO: 381713 - DNA, 2871 bp, Cannabis indica
taaatcaatactcctaatttgaactcacttgcctttaatttagtcctgttaatgcaaagtcaaatagtagcagagtaatattgatttaattttaaggttccttgttcctctacgttgcataactactattacatcatgaactttaactttttcattaatgtctgaaccctatgcttatttttatcttatatcttttcttttataggtggttgattggaactccagttctgatcctgcaagaaaagttgtggttatcacatctcgtctactgagtgatgcacatcgatacattttgcgttgtctaagcacacatcaaggtgttcgttgttgtactatattcacatcaatctccgaggtgcatccttgctctatatagttttccattcacgaaagtatcttttgatcgcatatttcaaccatcatttttgtattttgacttcaacaaaagtagtggaggaattcatacaatacttccgaaaaaaaagtcagagttaggtgtgaaatagggaaataaagctgctattttttagttcacaaactttaagactcattaagactgacttccccggcacatgtactcctctatttcccaaagtactgtagtgtgcttttcccccttaaatgattgggcaagaaagtactgttggttattaacttttatgattgtcaagcatgcatccaatgtttagattgattcttacatattcaaatctggaattataatacccctttataatcaggattacattaattcagcaagaccaacagttcagtgtggcttatcatgtgtgatctgttctttatgttgcttatagtgttctttttttctttttccaaatgtttgctaatgcagttagctcattcagcataccctgattcacctttaggaccagatgcatttcgtgaatatgaatccttgcttgtccaagattacgaagaatttgccaagaaatgtgtcacaaagaccaagcaacaagaatatagcaacttaaaggaggatatgaatttgaactctgaagaaggatggtcgcaactcacattcattgaaggggatacccctcatcttgatgccagtcccactggaagagatttttacaaagataatatagtagaaggcacagaagatgtaggacaaaagttgcttgtttctgttcatcacttcccaatgattttgtgtcctctttcaccaagagtctttgttttaccttcagagggatcgatggccgaagcatgcttatcagttgaacatgctgatgcctttagtccaggtttgcctcccttaagtactggatcaagttttgatggtgatgatactcctcctggagcaactcttactgcaaattttctttaccatcttgctgcaaaggtaataactccaatgtgatgtgataatgtatacatgtttttgcttttcttattttagttgtcttactattttttttttttactgttttaacgaaattatttctttataagctagatttagccttgttaagtttggtataaatattaagttgccactacaagttgaacaaacattagtaaaatgcatttaaattaacaacagtagtggaaaatcagaacagtttggtaaagtgcttttaaattatagctcaaggacttaacctttaaattcccttcccacattgtaatttgttaggctttctttggttgtagctctgtactctatcttgacctcctattatcttttcttaatttgtagatggatttaaagatggaaatatattctcttggcgatctctcaaatacagtaggaaagatgttgacagacatgtcaagtctctatgatgttggtcgacgcagacgatcagcaggccttttactcattgaccgcacacttgatcttcttactccatgctgtcatggagattcacttgttgatcgtatgttttcatctttgcccagacgagagaaaaccaagtactacactcatataagaggctcagatagcaaaccaaacaatggcccttctagcctgcaacgtgcttctcttgatgttcatataccacttgttaaaattttaaatgatgaggactaccaaacatataacttccagctctctgaaagcgttgaagcttttctatgtgggtgggactccagcaactcggattctcaaattgtagatttgattaatctcagaaacaaaattcataatagtgaacctctttactctaagttggagcatctaaatgggtcctttgtctccactgataacttccgtggaactccatacttggaagccatattagatagaagaacaaaagatggatccattttggtaaagaagtggcttcaagaagccattcgcagggaaaacctaactgtgaatgttaaatctcgtcctggttttgtgacaaaacaagagttgcaagctatgattaaagcactggctaaaagtcaatcttctttattgagaaacaaaggaattattcaattggcggcagctacactggttgcccttgatgaatcaaattcttcgaggtgggatgcattcatgagtgctgagaaaatattgagtgtaagtgctggtggagacacaagccagaatcttgcttctcaaattgaagatctcattaataaaagtgcttttgtaaaatcgcttggccagaagaaaggaaaaactgaagcctcaaaagctttactctcatttcaagatgcattactccttatggtgactggatatatactggctggtgagaatttccccacatctggacctgatggcccattctcatggcaagaggagcaattattgaaagattctgtagttgatgcgattcttgaaaacccaggggtaaccaaactgaaatttctagatggacttgtggaagagcttgagagcaacgttaa

SEQ ID NO: 381714 - DNA, 1469 bp, Cannabis indica
tttctttgttgggtttggtttgaatagggagtttatttatgatctaatattttctgggaaattattattgttggtattttctttcttattgtttatccaaactaatggtcttggtattttgactgagctagtagctagctactcagtactcaccccatttgctcaattttcaagtgtgtatatatacacatcattaaggtgtttgatttagccaactaattatctttcttcttcttcttcttcttcttctttacatatgttaatgtgttattttgatttgtttgcacgtgttcgggagattcaagcttctgttgtcaacttagtcaacatgccatggcttggacttttatcgaacagtttggcttcatattgtaattattgtccttttactggataatgtcgttttgtgaaaatgatgtcgttttaacgtgggtaaaatattggtgggtgtagtaacatttggtcaattatggattatctggtaaataaatgaaggagcaacaataatactataatatatattctatccacttaacattgttattggggtcaaaaaaaaagaagacaaagttgttgaaatcatacaactctttatgtatatttatttaataagaggagagatcatcagaaatcatatccaagtagaaaccaaatcgaaaaaaaaactgtggagtgaagtgtggaaagaaagaaactcactgccacattgcagtttagtttgattcagtccattggctatgttaattttaatggagtcaacaacaatagaagcatataaaaacgctccatcaacatttagatgaattttacccaattccatatcttagtactagaatgagaatcttcaataggaatgagaccctatagagaagctaatgcatatcccgggcagaaggaatcaacaatggaagtggattagagttagacagaatgctccactatagcacttttgaacttttgatgttgatgggttctgctatcccatagcttattgacagaatgaatgaagtcttttttaagagcttgaaataagtaagctgatttggtggtaaattttccattccattcttttatccaaactcaataatctctcccttgtcctcgagcctttcttcctctcaacatgcctctttttacacatttactttactcttttttttacattttttactttttgacaaactcaataacttctttttttctaaaaaaaaaatacaatattccacaaaagcccatgaagcccaataatttaacgtaggccccatataatttaatgttgaaaaataccttgaaattattgttggaaatttttctaattaatttttttctaactactcaagaatcaagtgtgtggtttgagtttctaaaataatttcttccatggtttctatataggttgttatacgatttttcgttacgatttaagttgttctgtcatttgcaataaattttttatataaaattccgtt

SEQ ID NO: 381715 - DNA, 2018 bp, Cannabis indica
gacttatgtctaaaaataccacagtggacttagcaagattttggatgaattggccaattatatttctttactaacttgttcttgtagtggttttaagtacaatattgcagagaaatacctcattatactgtagaaagaatgtcttctatggtttcttattggtttggacatttcttatgcctcggtacaatcacaattcttgactcagaatcgctaacttctctgaataaggcgtatcaaactctaattcaagaggagcaataacctggcagagatattaatcatgtgcaaaagaacacaatataatggcatttgaggttcagacgaactttcgaggtaaatcgcgttcttttgatcattctaacaaattttgtgtccattgcaatcgttaagggcatgatcagagttcatgctttcaacttcatggtttctcagactagtagcgggataggcctcatggtggccacgaccgacatggcaacagaggtgatggtcgtaatggtgcctctgctagttgtaatggcaaaggaggaggaaatagtggtgcatggaaggacgatgtaccatatgttcgtgcaaacagaactattagtcgctcttcagggtaggcgtgttcttctcaagcatcgaccacaactttagaagcaacgagtttgtctggcattacacctacacagtggcagaccattcttgactttgttaatttgcctaagcctaaaaattgattgatgggtgagtgtttatggattattgatacaagggctactaatcatgtcacaggtacattacgatcattaatattgtcctgtgggattactagatggttgatctgctgaagctacacgtgaggggagtgtggtgttgcttggcaatttgaaaattaataatgtgttatttgtgcccaatttggattgtaatttgttatttgttacacgactcctatatgaacataaatgcactgttcaaaatcattgatactttgtgtgttatacaagaccaaacgacgaggaggttgatttgagtgggtgagcgcaaggatggacttttatttttgcgaggtgttccaccagtcaaggtccttgctatagatagtggttagtcaatggatttatggcatacacgtttggggcatctatcggaaaaagttcttcggaggattccgcttgtgagtcactctaacagtgtgaataaaaatggttgtgacgtatgttttcgtgcaaagaaatcttgaaaaagttttcctcatagtaatagtcatgctaaaagaattttgaacttattcattgtcattagtggggaccatataagacccgttcctcctatggggcttcttattttttttactattgtggatgattttcatgaattgtttgggtttatttgctttataataaattggaagttggtctcatgtttttgaattttgtttcattaattgaaaggcaatttagtcataaaattaagcgtgttagaagtgataatggtattgaatttcaattcttaaatgaatacgttgtgaaacatgacattatatttgaaacctcttgtgtggggactctacaacaaaatggtcgtgttgaccataaacatcgagatatattaaatttggcacgtgttttgcgttttcaaggacatttgcctattaaaatttggggagaatgtgtaatgataacatattatttaatgaatcgcacatcttctagtgtccttaattataaaacaccatatgatttttgtttggtgaggttcttaatcttataatcattcatgtgttgggttgcttgtgctatgctcgtaattaaaaacaacatggagacaaatttgttagtggaagtgtaagtgtattttttggggtatccttttgctaaaaagggatggaagttgtatgatttagacacaaaaaaaatatttgtttcacgggatgttaaatttttgggaaaatggcggcaaaacccccaatactttggttttggtttggccaaaccccccacaacccaaatttctgcgggtaaaccccc

SEQ ID NO: 381716 - DNA, 2536 bp, Cannabis indica
gaaggtgatggtatatgcgaagactatcatgcttatttggagtttacctggaaaaaagaaggtgaagaaaccatgtttgacgtcaatggtagtacaaagagacttgaggaggatgaggatgaggatgatgatgatgatttgcaaatacttacaacggataagaacccttgtgttgtcgtacgttctcgtacctcaacttgatttcattagttttcttttaattattcttttatacagttgtgcttaatttgattagtttttatgcataaatatctgtgtagatggcctctgattttttttattctaatgatattttacaaattattagatagatgtagacaactctagtttagctaaagatggcatcagaagtcaatcccaatcccggtttaggaaggagctcttggatatattgaaaagtccttatgaccaacaacaacatacagagcttaaggaagaagtatcttgtcacaggcccaaaagtaaaaacataaatttgcggggcaaaacaaaatcatgtcctttggaagacagctttggaaaatcgtatcttgaaatacataaaggtccgttggagttgatccattgttagaatttccgcatttgcttcatctaaattcctatgtttgctcatgcttaaggtttcatacaatatgtcataagttgctttcttgtgacatttcttgttggcatatcttgatcatcttttgttaaaaaaaattagagaaaagaaaactcacgaactagtcttatatgtttgcagattttgcagagcagatgaagctagccaaagatgatgatcttaaaagtctaaatctattaagaggattctttcactggttgaaggtgagttttccatttcatgtcttgtattagtcttatgaaaggctatgttctttatttattacgatttgactacgaaaaaccaactattgaaaggatactgggcatgtcagcatgattttatgctgtttaacttggtaccatttacagaattctcacattgaagattgaaatttctgtgagatcataatgatttatgcttcaaattagaataattttctaaagtgcaaatactcgtgttttattgaaattgtgatacactatgttttcaatgatgctcttttgcactctgtattgtgaaattatacatatttggtactcgattcctaagactaatttgtcttcactgatatgtaatttagtaatttaatttgaatttgacactcacataactaactgcagtttgttcataattataagatattattgatcaaattttagtacaaggtgccgaatctgtattgactataccagtcaaactgtttggaaaagtttggctttcaagataaaaatcattgttttgtttttcttgaacaaaatgttgaatacatgttacttataatatcatacccctgtgattcctgattaatgtagttcaatatttttcaattttctgattattattgttggtgtaaatgttttcagaatgtggccgatgacattgtagccccttggaaagatccatcactattgaaagtgttaccaggaaactgaccggaagatcatcttccgacacagttcttactcggttcaagcttttatgatacactagaaagtaggctatgactaacaaaaaggtttaggctcccctttttattagtgacaaaattatggaagcatggttggaaagagattgatctagttttgactgcattttctcttgtcaatcttttttaggcagtatgaaaaggaaaatttgtaaatttgtaattttgtgggggccaaacatgtaatgtaactatgtgagaaaagaaacatttgaaatggtgtatataatgtttacaatatgtttctgactgacaagaaaaacaggttagaaattctgctagatttgttatgaaaatgcatttttatactaaccttatgagataaacttatgtttttaattaggtagttacctatattactgtaaaaaaaagaaaccagttactaaataatgttaaaataagtaaagatatgtaattaattaaatgattatgcatgtatttaatttctaagtaattggtactcatattacagtaatgagttctagtttatataaatgtgattgatttagagaaagctaatactgtgtactgtgtgtaaaatttacatgtaatttgtgagtgcaaatatcatttttttaaaaaaaaaatttgcaaatgaagaaaaaaaataagtataaattacataatatcttatgtaaattaaaaataataaatatttatgtaattaaatttgaatgtaatggaaggaaattgcataatctaatatatttatctaactatataattacagaatataattttatttttcgaaaaaaaaatatttgtgtaagaggtttcaatttattctcctggtcataagaattgtggtaatgaaaaatgagagtgtaattactatttttctttatttaaaatatcatttgtaaaatatattttaggttaattagtaatttttctccctgaactttgacatgtattaaatcgtgccc

SEQ ID NO: 381717 - DNA, 3852 bp, Cannabis indica
ataatcccaagcaattacatgatttcatcaataaaaactggtaaggaaggtttgcagtcactatttcaaactatgaatttgaatcatacatgatcacttttggttgtgaaggtgatcttaaaagagttctatccaaggagccttggcatctccataaccagcatctggttctttgctccccaagtgttctgcagaatgccccaatggactcttacaccattactcccttttggattcaagttttcagattgccttttcttagtaaatccgaatctcttgcacgggttattggaaatctcattgggacttttgtcgaagtccatgaggactctctaaatgagggatggggcccttttttaaggattagagtggccattgatgtctcacaaccattactcagaggtcaaactgtgactttcccatggatgaaagatgaactatggattgactaccgttatgaaaggctaccggatttttgctatgaatgtggtataattggacatgtatttgataaatgtccccaatttttggagaagattgatgaaggactagaagtagatctcccatatggcccttggatggctgggatcggctttgccaaatgcggggtacaataggtacagacaagatttttcaaaagaagggccttggccttttatcacacggttggctaggaacactattgctccgattattaatcatccaaaacagtttcctgctctccctaatgcagtaactattcgtgagaaaggtaaagctattgtggaatccaatagcataaatactgcccatcaatgctctcggaatcagaatactctcctcattgatagccaagacaagcctattattcaatccaagctattgccacaaccccttctgaaccttcctgtgttaatcctagcattgttacaccatcttatccatcaacttatgctgatattggtcaaagttcaatttcacattccactctctcaccaaatgctagtagtcccaactgtagttctatggcaggccaagactatatcaacccaccaaaaaccaaaaatcataccgactccattgccttacccatagcagtcccaccagcctatttacacactacttcccctctgccatctatttttcctccctcaccaaatacatcttcaactgtagtctcatcaactactgcatcaatgcatgatgtgaaccaaaagccaacaaacctgactgccgattgcgacaattcattcattgagaatagagtgccttctctatttacaaagcgccaactgatgagttcaggcggtaatgttcggaatgtcctcaaacgatgtcgcactagatctaccccgttcaatgactctactaatcaaattcatcaccaacaatcagatgcttcctctgagttgtctcaactttcactggcagtggatgacgcggtgtttctttggcgaaggctaacggtcagcctcgccaatccccatgaatattgttagttggaatgctcgtggcctgagcaacctgaaggcattccgtcaactccgtttgctcatttctcaaaatagtcctgatgttttatttattatagagtctaaacttagtgctggtgctattactaagtatcgtaatgcttttaaatttcctaatggtatagaggttcctaggataggtcttagtggggtttgcttttcctttggaagtctaatgtaaataactattttacactatggaataaactttattgactgctacatgactcttgatgatggtcctacatgtcatttttctggtttctatggctcaccggttgtgtctcaaagacctttgacgtgagaattgttgaaaaagcttagagatactgctccccttttaccttggcttgtaatgggcgagttcaacgaaatcatttcgcactccgataagcttggtggtcccccaaaaaatgaaaaacaaattgatgacttcaggaacacaattgattactgtggactacaagaaattcagtttgaaggtgagaggtttacttggcacaacaagaatgtcaacggcataaatgtcaaagaaagattagattatgcttttgtcaactcttgctggaatggaagctttgcagccgtggctctgcaccacttggatttttatcaatcggaccatagagctcttaaggcaaaaattactactcaatctcattcgtcagtgcacaaacctaaatctaggtttagatttgagaaaatatggctacatgaagaggattttgctgatattattggcaaggtatggtctaattctgatccaaatactgctgcccaacttttcaaaaatctccaaacagtttctgctcaacttcaatcatggcatcgtgaaaaatttggggatttgccaaggaagataaaaatatctcaagacaaggtggcttctcttaataactctactgataccagttcttctcattttgatttattgaaatcaagtgaatcaatattagatgaactacttttgcaagaagaagagtattggaaacaacgatcccgtgtttcttggcttcaatccggcgactcaaatactaaattttttcatcaaaaagccaatggaagacgatctttcaacataataaaatccttaacagatgacaatggtattgttcactcctcacttcacggcatcagtagaatggtggaagcttattttgacaatatctatgctactgaaggtatagatactgaggcacttcaacaggttatttccactataccatgcatgatcacagctgagatgaatgaaattttgactcaaccttatacggatgatgaggttttttctgctctgaaatccatgggacaagatagcagccccggacttgatggaatgtctgtgatgttctacacaaactattggcatatagtgggcgatttagtcactagaacaattcttgatattcttaacaatggggcggatccatccatgtttaacaagaccttaatcaccttgattcccaaagttaagaatccaagtaatgtctctcaactacgtcctataagtctttgcaacgtgctctacaaattggtttccaaatcaattgtgattcgattgaagcctttcctatcactagtcgtctcggattctcaaagtgcttttttgcaatcacgtcagataacagacaatgtgttagttgctttttgaattattgcactctctcaagcatttaaaaaggggaaaagaaggctatgcagctatgaagcttgacatgagtaaagctttcgacagagtggagtggcattttcttcgtagtacgatgattgcattgggttttgcttctccggttgttgatcttattcagagatgcctcaatagtgtctccttctcctttttgataaatggttctatcaaaggtcatgtcacaccttccagaggcattcgtcaaggtgatccactatcaccatacttattcattctatgtgcggagggactttcaaggctctttcaacatgaagaagctaatggtaatttacatggactgcaagtagctcgtggtgccccatcaatttcccacctcttctttgcggacgatagtctggttctcagccgggctaacaaaaaatcaattcaagccattaaacactctttggattactactgtcgtgcttcaggtcaacgattaaatgcggataaatctgtcctatccttttctcccaacactacctcggctatacagcacaatattcaacaaattcttcaaatgcctatcaagccttgtcatgagcgttatcttggccttccttcctactcgggaagagacaaaaaaattctttttggagatattaaagacaagctttggaatcacctttcggcatggcaagaacaactattttc

SEQ ID NO: 381718 - DNA, 837 bp, Cannabis indica
tcaatgggaaagttgtgttgttttctaaagtaaaaaaatgaccaaaattacaggaccagtttactacaagggagtataccacttgttctatcaatataacccacaaggcccaatatggggtaacatatcatgggctcattcaatatcatacaatctaattgattgggttcatgttgatattgctttaaggcccaatgatcctaatttagacattaatggttgctattctggttccataaccctaattcaagatgacaaattagccatattatacactggagaagactctaaaaatcatcaagtccaaaatttggccacacccaaaaatccctcagacccttctcttagagaatggataaaatatcctaaacctttgatgactccgatcgatggcattgatccaagccagtttcgagacccaacaacagcttggttgggccctgacaacatttggcgggtcacaattggagcccgccaaatggatggaaaatggatggcatttttgtacaaaagtagggattttgagaactggaccaggtctgaggaaactccactttatttgttcgagaaagatttagtggttgagtgtcttgatttttttcctgtgggaattaaaggctcattaggtgatgatgacaatcattacttaaataaagatcaacataagaagaagtatgctttgaaagtgagcttccaagctaaagaacaagattgttatatattagggcaatattctgctcatttagatgagtttaaggttgagagtgattttatgaatgatgatttagatttgagaatggattatggaaagttttatgcttcgaaatcgttttatga

SEQ ID NO: 381719 - DNA, 1379 bp, Cannabis indica
gccatacaaaactaggattggagccaagtggagccaagagaaaagaagagttgggaaagtaacgagccttaaacacttttgcaaccaaagactcgggttttggtaagtaaccgccagccttgtttacctagaagcgccaagttaaagtctcgcagatcacgaaaccctatgcctccctttgctttgtgattacatagacgatcaatccgaagacatacaatggatctcgaggttgagctattcgatgattgccaccaaaacttgcccataaacttctcaatgtcttgtgtaatttcaagaggcaagagaataacacacatagcataacttggtaaggattgagccacggttttgattagaatttctttgcccgcacaagacaaaaatttaaattcccaccattggaggcgcttcctctctctttcttttaagaaacctaggagggctgtcttgttacggctcatagtgctaggcaaacccaagtaaaaactgttatccgtggctaacgacattccaagcaagtgactcaatctaagtctcaaactgtcttcagtataggagctgtaaaagatagatgatttaaaataattcaccttctgcccagaagcaagttcaaacttcccaagtacttcttaaatttgatgagcttcaccctcaatttctttacaatacaagtaactatcatcagcaaacaacatgtgtgaaattctaggggccctgtttgcaactttacaacaatgtatctagcccctctgttcatacttacgaagaagcactgagagaccttcggcgcacaagataaataagtagggagagagcgggtcgccttgtcggatgcctcgtgacggaattattgtccccatttcatgaccattgtgaataaccgtatatgtaccagatttaacacagttaatcaaaagccgagtccaaccaccattaaaacccagttttcagagcatagcttctaggaaattccactcaattttgtcataacccttgctcatatctagtttcagtgccatgtagccttcttttcctttgcgcttcctcttcaaataatgaagaatttcgaaagagacaagaatattataagatattagcctttccaggataaaagtactttgcgaatccgacacaatagagtccataaacagcttgaaacgattaaccatcacctttgtaattattttataaagtacgttacatagagcaataggacggaggtctgccatggtttctatatttttctttttcggaataagcacaatattagcatcgcctcacccttctttaaattgccccatgacaaaaaaatgacgaacaatttccttttaaaatataatagtgacacctattaaaaaaaactacctgtatgtaca

SEQ ID NO: 381720 - DNA, 697 bp, Cannabis indica
ttttttttttttttttaatgaatggctatttggaaagtttagatgaataataatgacaacacaaaatataacttttttttaattaaaattacttatatacattcaaaacaaattatttattaaaatgagttggacttaattgacaccctttaaaagttgttcaaacacactttatcacttttgttatcttaaaaattttccatataattatataaaatgcagttatttaaattatttacaatatttgttaaaatatttttaatgctataaattattaaaaaaaattaaaatggacaaataatataaaataacaataatatatactgaaaaaataggataatttataaaaaaaatatataaataatttataacgtaatagttcctattataatttaggcaatattctttttcctttccagcattgtaattttttggcagtatatagcatatggtaaaaaatttaaaattattatggagagaaagagtagcatagaaatatgtgctagtgcgttacatataattgacagttcatataattaatgctcttaatgctcttaattactcttaattaatccatcacatgcagttacaaaccaaataatttatatttccaatgaagtttcttttgttttctctgtcaatttttacgaagagaagtgctaccgtcaatctcttattacaaccttttagttaattt

SEQ ID NO: 381721 - DNA, 2085 bp, Cannabis indica
accaaaatcacattattttaaaatttgtttaaaatagataaaaatagcattacaaaaaacaaacaccaatacaatttttatattgattttttgtaaccattcaggtactatcaatatttggtcatcaacttgttatacttactcattcattatattattattattattattattattattattattattattattattattatgtgaagaaagtgatgatagtaaagtaattaatataatgaggaaaataaacagcactgaaagattaataaatgagttagaaaaaataaaaataggtggcaattattgattggagggacaagattgggataggaaaatgtgggacaggtaattttttacccttttagaatagtaagataattaatttgtttgttgtgatcctgagaaatgctactacagaagatgctgattacctatcgaataacttcgcttgcaagaaataccctaaaaccagtttgcttcttaattaacataggtattagctttgatctattattcttttattattattattttttagggttcttttaatcttataatataatgttattccattaatattatatatgaaaaaccaatattctttttttttcggttaagtaattgttaggcaatttagggatggttttgagttgagtacaaggctgaaacactctaactcaaataatatatctaagataaatttaatacaggacaccaaaggaaattaaagctttttaaaattttgcgtgtaagacatcaatgactttaaatccatgtacacgcaattgctatgaactgaaagatatcatacataaggttgatcaaatatatatatatctctatcactaactataaagtgagttcatcatatatacatgtttagtatatataatgttagaaacattattgcttcttgtgttgatgtgacttaaagaaacaaatgacatcgatccaactgggtcctatttttcactattatatagaagacaaaaaagtgggtagacgattagaattccactattctggttagaaatatttccgatgtttaaacaaaaaaatcgaaactaaattagaatcaaaaataaaattaaaatatttacataaatatttagcttaaagtggacaatatttcttttatacgtagatcaaagaaaacaactttgggccaccgaaaccccgagcaaggtagcatcacctgtgttacctgcgtacagagtaagttaggcataagtcccaatgcctaggaaaacataaggagcaacaacgtggaacttagatccctacatgtcgtttttgagtgtttccttaaatggtcaaaatagaaggatcgtgaagccactgaaatacaaatcagaaactgaaaatgtgacatggatgtcataaggcaccacctgaacacataggtgggcttgttgtacaaatttggagtgatattggttctatatctccagggaagatgcaattaacttcataaactcttagagacttaggcttagttagttaagttagttatgattgttaatatctgttatatattcggctggttagttatttcaccatcgactctagtctgctatatatagcagtcattttgctattgtaatctaattttcccaatcaataaagtttaatttctctctgctcttcaaagctaatatggtatcagatgcaaactattgaagcttcaagaaacttcatcttgcacattcaaactctcatcaatggcgagaactcgaaccacaattccagctaccaccaatgatgctcccatggtcgatgctgctccagttctgccacaacaaacctccgctgacaacacaactcgaactgaaactccagttcctgattcccgatctactgcgatcgattctcgacctcctcttcatgatcgtcctgcatacgaagatgtgacatctccctatttctcaacaatgcagatcaccctggtttggttcttgccactccggttctcactgatcgcaactttcagcaatggtagcgtgatttcaaactctacattggcgccagaaacaaaacaccatttcttgatggatctttacctcaacctcctccacatgattc

SEQ ID NO: 381722 - DNA, 1160 bp, Cannabis indica
tatattattttaatactctattagtttgatgttaaagcatatcacgaatgtaaattagtacatattaaccatattcataattgtgtagttgctttggacaaggaaaactatatatcagtggtccctttgtgtctcatacggtagcatttgaactaatattcttgtatgcactattaaagaaaaaatttataaattatcaacatttagtaatcattatattagaaagaatagcttaaagttctaaatttacctttctaacatattgaaacagtttttaacaggggtggtcgcttaagcaagtttaagaatatgattcttcttaatgtcatagctataatcaaaattcaatgtttgctgaaaaaaataacaatgttaattaatataaaaataaaatattatagtgaaactcaaataatggtgtagttattatccttcgtttcatggtataaaataatattgttctttttgattcctagtgtttaaccacgatgataagtgattgatggctattaccttgtcttgttcattagtataactaagaagttcaatatcataaaacttatatagctctttttgtgtttgatttaaactttcccaaatgcatctgtttaaaaaaaatattcgaatattaagtcctaaaaaaaggatagaatttcctttgtttccataacattctccaatatttgataagtacctagtaatacaataaacatcgtaaataaagttttttttttatatctccatagtacacatgaatatctaagatatttaaactttactaacataatatatgtgatatattagtcaaagttaaagagataccttagtacaaataacatagttgaaccaataagttcatctttagtgactacttgtataacatcttcaaaatttatgtagatgtgaagccggtagatgaataatggcatgggttgacaggaaccctcacgtactcatttctacctttactttcataaattccaagaacatgaaccgaagagaaataagagttttgttgaggaccttctcaataagacaaaataatcacaaaatattaaatgtattataaaaaaaatcaccaaaagttaagttataatagtaacaagtaactaatacatttataactattaactacataattatataactaagtaaatata

SEQ ID NO: 381723 - DNA, 1850 bp, Cannabis indica
tttttttttcttatttatgtgaatggagtgaataaaagaaaaacgtatacttgtgtgtgtccactaaccatataaatacatttacaccaatttctaagaaatattgataagattcggtggtaacaaaacaaataaagtggtggcacaaaaaatattattaataattcaattgaagggaacaaatatagttaggtaatatattttggtatttttaaattggaagagtaggcattaagaatatatttcataatggcatctaactttcactgaaatttcctttatttacttttgttttcttctttatctttacttttctttccttacttttcttcccttccccaacataacaatcctttacttccacttcaaatagcatacttcagcttaaaggaagttcttcaggaataacttttgaattaatcaatgaacccaagagttgactttggtatttccaaagtctaaatttcaatttattcgcaatttattttcattaaaaaataatattttccatgatgagtgattatagtctttactccaataaattcatttcctctcaaaccgagtcgttgaccattatcaaaaaccacaaaaagatttgaaaagaaggcaaagtgagtgcgttactactacgacgctccttccaagtgggcccccaccactacctagctttagacctttacagcaactactattttgtcttctttcaatttttcattatagttttttttttttaatttttgcttaatttacccctaaattaaaataataacgaataaaaaagtccaaccaaatctccgccattggattgacccagtaagctttgactttcgaccattcagttttcttttccatttcattttgtatatataaataagccctctccctcattcacactcttcccaatcaaaatatcaaactcttcccatctctctctctccatttgcgagctccatcaatggcgatcgatcttatgggtttcacaaaaagagaggatcacatggccgttcaagaagctgcctcagctggattaaaaagcatggagaatctgatcagagttctctccaatagtaattcatcctccgccatcaaaaaccaaacactgggccatctcgatttcagagaagccaccgatttcaccgtcgctcgattcaagcaggtaatctctatcctaaaccgtaccggtcatgctcggttccgccgcggcccagcgccatcaaatccccaacctgagaatcctaaattaaatcagaccgaaatcgttccggtcaagccctctttttcaactgagacttcacgatctgagttctcaatgagtcagaaatcgaaagactgtttaactctttcccctcctctgtcttctaatacttcgacctcgtttttgtcctcgataaccaccggagacgacagtgtctcgaatggaaaattggggactcttctctttcctccgcctgttccagttatttctgccggaaaacctcctttggctagccggaagagatgtcacgatagtgttttctctggcgacgctgccggcaaatcctctgtttcttgtcattgccacaaaagaaggtactaaatagaaacaatatgaaagtaattttatttttatttgatatgaatttatttctgatgtctaataaccaattttcatttattttcagaaaaaataggtttagaaagtccatcagagtaccggcgattagctcgaaaatcgccgatattccacaggacgagtattcgtggagaaaatacggccaaaaacctatcaaaggttcaccttatccgcggtaattttatttccataatatcttcaattttaatactgaatagctttcttttttttttttttt

SEQ ID NO: 381724 - DNA, 1396 bp, Cannabis indica
tttttacgtggtttgggtgttaaagaatcctagtccacgagtgattgtattggcctcttaaggcttaaagtactacaaatggatcttataatttgaagaaccctaattcttgctatattatttttctctcttggtttcttttagaagaagataaaagcttatagagaacttagaagtatttttccatccttcgttccctttacatgaaggggtaaagggatttttgataggcttagatccaaatctaggcatactcgtaacccgctagggtttatgtgcaaaatgggcccaatattggggtaaatagatagaatacatgactttgaggcccacgacaggatatgggctcgtggggtaaaaatgtctatacagaatggggcccacgtggtccggacagatgtcacgcgaggatactgctacagtagataggaatgttagatggacgctcttggacaaatagaatatatccctttttgcagtacgcgcactaccgtgtcctgacataggggacatgatctgacttggtgggaccaaatgtcagggggcagccacgtcaccctataaaaggcttctaaatgcatcccttagactccttatccagatgcgcctcgttgattatcaggaggacttcgtttactctgtctcctgtaaggctggatgggctttcaggaattgaagaaacgtgtctctggaggcgaggctcttggagttttagaagggctcgaacctatctctcacctgaactgggccttcgtaagcaggaaggcttgggcctagaattatgcgaaccaatcataccttgaggatgccacgtgtcacttatctagaaacgtagataccaataccagataaaaataatggacaacgcatgtttgcttaattttattttattattatatattttttaagtatcatataacttttaaataaagaaaatacatacaataaaagaagatgacgtttttaattgaaaatacctcacacaattaatcaaatctacaaaatcctaattcttcatgatttcaaaagtaaaaaagaaaaatgataaaatcaagttaataagcataattagcacgttacataaatagtataattcactgtaatttaattaggataatatgttaatttaaatttacctatattatcatttgtatatatattatcttatgtgtattttcaaataaaataattttactattatttttttttattttaaacttcaaaaataaatcaaataaaataaacagataatttgataatatccgaatttatgaaattaaaacaaataaattttaaaattatcatgaaatttcataattaactaatgagtaatttacggccgtaaatacttaagtttaacttttagtatagataaatacttaagtttaattttttt

SEQ ID NO: 381725 - DNA, 4469 bp, Cannabis indica
taatagcaatactcatatactatatatcctaagtccagatgtcaaatatgatggtagaggtggctgtgaaacgtgtggctagagcgttactttcacatggttgcagccacacccaatgagacatatatcgaattactatgcggaaccaacacgtggttttatctcacccacgtaatatattacgacaaattaccaaagggccatttcatttgtgtaataacaacataatgtgcacataataatgatataatcaatctgaaacagtgcctacgtagctataaaatcatctaaagaatttattttttcttgacataataaattgatatatatagttggtgctacaactctctctctatatacatagttattttaattattaagtaatggggacactagtgactaattataaaagaagaagaaacagtttttctgaggtttcagctgtagtggaaatggcaacccatgtttatgttaatgagaatgagaatgagatgatggtgatgatgatgacgacgacaacgatgataatatacctgacgtggcaccagcggcttagggttttctgtctgatattcattttaatggtgttttagatcagtatgtatatatactattctttctttatatggacatgaatatatgtagctgtatttattccaaaatatattttgaaaagtaactacaaagtgacatgtaagttatttgactacaccttggagttggagtttctcaattatgttaatcaactgaaactactaatctaaccatagctagtgcatgtggtattaaaagtgcagctgtgatactccttttattagtaattaacttaatgtcaaattttatacaattaaatttaataattatttaaaaaaatttgttaattcttttagtgtgtgctctattatgtagtaggagaattgttaaatgatattattagttctaaatatttttgttagtattagtataattaagtagcgtgtcttgtataatttaaaaaaataatttttagagaatactattattatgccacatgttatatatacatcactttagaaagaattgtaaatttgcaaggactgacaaatgcgagaatagcttccaagagttgaaagaaaaattgatcatcgacaccagttttaagcttagcaacctctgatgaaaaatttgtagtgtattgtgacgcttcgaagcagggtttaggctgtgttctaataaaatctagaaaggtcatcgcttatacgtctaggcaactaaagaattatgaacagcattaccctactcatgacttagagttggcagcaatagtatttaccttgaagattatttgtatggtgagaagtgtgaaatatatatagaccacaaaagtttaaaatacttctttacacaaaaagatttgaatatgaaacaacgtcagtggctagagttggtcaaggattataactgtaaaatcatataccaccttgggaaggcaaacatgatggcagatgcattaagttcgagaggtccaagtcaagtgtatgaattgaaataaacctctctgaagttagttaaggatatgattagatcaaaaattgagtttgtggttggatagctacccaatattacattacaatcagatttgttagaaatgattaaggttgcctaacaaatcgatccaaaattaattgaatgttggagggaagttcgaagctggtacaacgaagaatttttcagtgacatcgaatggactgttacagtataaaggtaggttttgtgttccatatgaggataagattagccaagagatacttgatgagttccatattactctgtattctctacacccgataagaataaagatgtatcatgatgttatggtacgatactggtggccaggaatgaaaggtgatgtggtcaaatatatgtgtctaagtgtttaacctgtcagcaagtagaagcggagcattagaggccattagggttacttcaacctttgaagattcctgaatggaaatgagaagacattttcatggactttgtggtgggtttatcaaagactacatgaatgtacgtacgactctatctgggtaataatggaccagtttataccaagtcagtgaatttcccgccaattcgaataatatataccgtggatcaatatactgatttatacatcaagaaaatagtttgacttcacggagctccaaaattgatagtttcagatcgtggtcccaagttcacttctaaattttgagaaaatttacaaagggccatgggaccaaattaaaatttagtacagggtttcatcctcggacgtatggtcaatttgagaggactatacaaatgttggaagatatgttacgagcatgtgtgatagactttgagggttcctagaataaattcttacctctaattgagttttcatataataacaactaccatagtactttcaacatggcaccctatgagatgttggatgaagccggtgagaggaggtatcttggactagaggcgatccaaatgactagtgaggctatcgagaagaaccatgctcgtatgcttgcctcacaaaatagacatgaaagctaccttgacccgaagtatagagatattgaatttcaggttaaggactagaataataattggagaattactttgaagggtacctattagtggtgcctagaaacacttaaagtgtatcatattgcaatttgtataattaattaatatcaaatcacatatatatgttttaactaaataattatataataaaataaaaatatataacctacttgtgtcactttatagtagacactaataatgttagacaacatgatgccaatgctcaaatacttaaaccaaatcatttaattaattatatcctttgagaagaatatttacatctctgccaagtagtagcaacattaatgtccattgacatgctcaaaataatgcacaaaataatctctctgcaattttaattatttaaactttatattgaaatcaaaatattacgtaagttattgcactatcttaatttcacatcagattcttcattcttgtgtctccatttttagtttaatatttcccaagtaatttgacccatggctagggaatttagaatctagacacactcaattacatacattaacatatttcattactattatttaaaataatatattagcaaaaagtgagagtataatatatatatatatatatagctccaaactctatattattcataatataataacattatagagtatatatatgaatcatataaaacgctagctttcctttgtctcacactaaagagagagaaagagaaactatttaatgccacacatgccatgtattatatataaacccaacacatttatgtaagaaccctagaaaacccaaaactttcagagcagctactacattacatgcataaccaaccaattaaaagtcgtttcaagccgcaggtgccactgtaacccgatcttcatcatcatcgtcgtcgtcgtcatattcttcgtaagaaaccgaggagaagagcgattcgtgttcctttctaacttggagcattgaaaacctaggcttctcgctattaagaatcgccatattatatattcacaattagaaaatattatagaataaaataaactctctctctaattaaaatagtgataagaattaatattatatgtttttggtttactttgattgaaactactagagtgcttgtcatcttatttatagaaaggggaagctaattactagggcaaaaagaaaaagaaaaaaaaaagttgaaaaatattcttttggttgattgatatttggagtttgcaaattgatgaaaggttgtgggtgctttgagtgtccactaggagaggagggcccgcacgtgagcttaactcatgggaacacattctatacatgaggagaacaactcaagccacactctaacctcatgctcatgcaactaataaggtacatccacacacacactcactcacccaatggtgtttgaacaaggaaccgtgatgagaattatggggttttatcttaaaattaattggtgagtggagtagcccatgttttttatatatgactcaatacttttacatttaattcatgtgagacaatgttatccaatattctctctcatgatggtagttatttttgctcacgaatcttgaatcaccttatcacaaatcatcatttgttcgcttattttttgttcgaatctcaagcgtcactacaagaaatgtcacttttgcaaagtttggtattgcgcgctggtaaaataaaatttacttttgatgtgtttgcaaaaggggttggcaaattaatgttggtattagaacttttgctagtacaaaataaaaagtgctggcaaaaatgacttttcacagcgtgaaattaatgcgctggtaaaaaatagattttagcagccactgcaaatgtatgctggtaaaactttgacctttttgtcagcgcag

SEQ ID NO: 381726 - DNA, 2114 bp, Cannabis indica
attaatatatatagcatcatttatggttgatagaatgacagtcaggtgatattaaaataagtcactactatatgtaaacgttatctatttcatgaagaagaaaaagacgaaaagagtacaaattccaagatttataaaatataaaacattcacagacttcgatcatcgattctcattttctgaacaaaatccagcgttaaagaacaataccgttacataattcacatgcaaccatttttaattaaaatttaattaataaaaataacttgtctactactatttttgggcctctaaatgacatgatgatgaaaatatcaatatactcatccttgaaaacaaacacttagaaaaagacaaaaattaaagacactcgaaaattaattttcattttctttttgttcgaccagttaattatatatataaaaagatttaatcaacttttatcgttaattattaattaataataataattatcatatatattaaattattattaatctcaaatctcattactactgaccgccatagtcttgttctgaatcagcaaagagttcttgcaatgagctatggcaccttgaatagcactctgaagttcctccatagatgacgaagtcgaagtattcatattcatatcaccgttattgtaaccacttccgcctctagcgccgccggtgccggagaaacctggccggcaaagaacaccggagtggcttggcgaggaccgtatcgaagatgggcagctagagatgcagctttttctcctcgggtaccttaaattcccagaaaacgaatgagaaaacccattctgatctttattattactattactattattagtattggatgaggaggatgttgctgaggataacggtttcgaaaatttagtcgttgaggttgacttcgaggtagaaaacgacgtcgttttgatagctggagcggtcattacacgaccgagcttttgttgccgcggttgaaaatgttcattattctcctccgccgcggcgaccccttgcttttgcgatagtttctcgtacaacggcttaactttcttcatatactttcttataacctctttagccgaactgctcattcgtttaaccgacgaagaagacgacccggataaccctggtaagttgttatccaccgccgccgccgccgccaccgccgcaccacctgccttaggctctttcttgaaaacggaagagattctcgctagagaaaagtacttactattactactactcttcttgttgatatgaacggcattatgaagaaaattattaatgccgcaaccgtgggagccggcggtggtggcggtgaggcgcttgaactcctcatcctgatcagtaacggagctgggccttgaagagtcacaagactcggctaagagaacgaggtcgctgttgaaggaggaattagactcgttggaagcgctgcttccggtggagtcacgtgaggcggtggtggtgctgttgtcggaggatgatgaggtggatgaggaggcgagtaagagagttcgaaccatggaaagtcgtggggagagatggagtgggagtagttggcccttgtagaaaagctcgtcggcgggtcggcagtggacggtggaggatttccgtggggagacggagatggtgaactcgaagtccgatgaggatgatgatgagaatgagtgtgagggcgatggtggtagggtttgtgattttgggtggtggtgacgccggttatggtggtggtggtcgtcgtcttctcttgttggtgttgttcttctacccattttttttttggctacattataatctctctctctcgatatacaaaaggagaaagtgttattattgagaagtgagtagtagtagaagtatgttattattataataattcaaaattttgtgagattttaagagaggctttttgtactagttttttttttttataaaaaaaaaatggttgagtaaatttagttaagtgctccacgcgcaatggtgggatcggtttaccgtacattaattaggatacacgcgccaccaccagtcttaagttatttggcaataataatattggaataccattttgtccagtgatgtactttcacggaatgtattccgtggtatatt

SEQ ID NO: 381727 - DNA, 2046 bp, Cannabis indica
attggagaaaattatatatcatgcaaaccataacattaatgtatatagctattagcctagaagaataaccaaaacattaatttatatatatcgagattaatttattatgaataatgttgtgagaaatttctttggactactagtgggtgagcttagagccaaagcttaataaatactcgtacgtatgtatgagtactatataaatatatatatatatatatattatttatataatttgtaacaaaattacaaagcatgccgactgaaccatgtcatcttgtgtctttagttctgtccactccatacaacagcattgcaaatttgcatatcttattataatttagttaactattttttattagtgagagacccaatattaaattatagctatattatacctcacagtcacaaggtgctatagcaaccataaatgcccctctaatatttctcatttccataataatatattcttaatgtatgcttaaattaattaaactatatatagcgaaagaacaaatattattccccttgcattatatgtataaaacgacagaacctgccctattctttaaggagttacataatagtattttatctgatcctttttcattttttatataacaacttgataatatatataattaacttactctaatattttttacgtgtcttttttattgacagaaaaacctaatatcctttctccaattctattatacttttgcaatagttagaagaagccaaaccgattaattaataagattatttcattttttttgtacgttttaatttgtctcagaatatcccttgacgataaaaatggagctaagctgagaagtggagcagaacaccttttcagtgtattttctcagaagtggtatatattgccaaacaatcgtatttgtgtaatattgaattttattttaccatataaatgaataaataaaaaaaaaaaacatgttttcgaactttcataatagatatgggagctcatccttttgttcagtataatacatctatctacttttaaattatttaattaatttccattttaagagccttttatatcagaattccaatctaccaatcctttccaaatcctcttggtacttatatttccaataattttatatcatcttatttgtactcatcaagattattctaacattttatcatgaaattatgatcatcattttattcttctgattgcctttaattttttttttctttttgaaatattataggagatagccttggattgagaaatggaagatgatgatcgttacataacagctcctaccagccctggacttcatccttcctctcatttactcaacaaaggtaagtaaatattacacatcatacaaaaaggcaaaaaccctatatattagattatagttaattatattaattacatgaacaaaagcttgatatatataatctctatatattactacaatatataagcatatatatgctatttagttaattctcttgttaaatttatacctgtttgaatcttgttaatttttgtttttctttgataagagtcaacaccttctttataaggttcctttttcaatatatttacatatagggagaaaaataagaaattggaaaaaagtgttaatttagacagctatgagaagtaaaaataagagatagaatataattttgtgagagaatagaatgtttctacacaacatatattgcatatcggtaggttaattttcttccaaaataattttaatgggctcgtgtttaattaagatcctagggtttgaagatatttcaatgattaattttaaggttgttttattatgttctagctagcaggtcaattaatgggagttttattattatgtatcggacatgctagtatcttgtatggaatgcttatgatttatgttttgaacatgcataatgatattgtagtcacttctagttattgttgacatatgtgtgcatatatgtgttattcatcgaagtgacaggtacaaaagaagatgaatgcgcatagtctcaattttgttgtacctcatgcat

SEQ ID NO: 381728 - DNA, 2644 bp, Cannabis indica
attttcaaatatatgttacggtgaaaaaattaaaaattgaacaatcctcgtacaaaataaaaaaaataataaatatataaaaaatttatcatataatgtaaatttattattttctttacataattgatcaagctatttcatcaatcaaaagtaaatgtgcatactttcacggtgctttatttaaaattatgttcacttcttaccataataactaataaaattatttattgttcaactaggttcgaacaattttagaattttgaggagaattttggactgttgttcgattatgagaaattaaagtctgcagatgataactctttgaagaattttcgtatcaatcttacaaacttaatgaagcactgtaagattttagatcttgacaataatgacctataccaagagttatatatgttgcgtcaaagtttaccaaaagaaacccaaagagctgtcgatgtgttgagctatataaaagaagtggatgacagttatctaaatactaggattgcttataggatctttcaaactattcctgtcaccgttgcccttgcagaaaggagtttttccaaattgaccttgatcaaatattatctttgttcaaccatgtctcaagaaagattaagcagtttaactatattattttttgaacatgatatagttgtaaaatttgattatgcaaatttaattaatacttttgcatttaaaaatgcaaaacttataatattatataatacattaaagtttataaatttagtgacgatttattagtttgaaatatatttatattattaaatattagtttaattttatttaaaattacatacattaaaaaaaatacatatataaaatggctcattttttttttaatttactaaaaccctcttagatcttttttttagtgccaactctgagctaacttattaattctagattcttcttctaaaaggaaaattatacagtacaattagagatttttagactaattatgtctacaaatgtttaagaaaattcttaaataaacttttctacccatatctaactaattcattcactacaaatgtgcataaatttaaactataaagtatcttagaaatgtgtatcatactgtaataatatgagtaattagtttttgtaaaaaaggtgtttgattgagaaaaaataaaaataaaaaaaccaataacacccttaatatatgtctctagtctactactactactactagtgtagtagcataatcaactccaaatatcattaaaacaaacttccaacacaaagacaattacttggattaaacgaaattccatgcaatagatggtgatcacaacttactagacccatataatctaatcagaaggctagatttagtttgtgattaatattactttgactcatttaagaaagtaaattgtatttacactaaccctagttcatcaatgacacaattccaaactaaagcgggcgaatggcctccaccaccgcttctacgctgccgctgtgcgctgccatcaccgcctcacgtggtgcttctactcccaaatgtatatatagatatagtaagatttaagatgtaaagtttaaccaatggtagacaatatataatttctaatatatgaatggtcttagcaccaaattgtctctccaaagctgccttgatctacgctcatgtccatttcaaaaatgggcttattgggctgagagcccatgagtttgggcgaaggtgacccactattgcttgggctagctgggctcagcccatgactcgacaaggatgcattttgccggacccgcaagtgaaccacttcggcttgggccagtgctaattgggcctgaagcacatcaatttgttgttggagggaagaaatggctccaacgcagccgtagactgggtcgcgcaccctggcgttagcttcgtacaccatgctactaactgcatcacctcgatgctggactggtagctcctgaaaatgacaacataagcccaatgaagtgattgtttgggcccagacccaactacactacctgtggtgtgggcactacgtaatgataacatcatgttgtgacattagaagaaaaaaaacaagaaatgtacaatattccaaagtatgtctgctacatttgactattatttagtttgttttatttattttttccttacagcctctttttttggggccagtaacagaaaaatctagtgtcctgacagtttttcttttttgacttttatcaattttcgtaatatacctaaagaaagaaaaattacaatagataaaaaagtgctataatacaagacaaaagttccctacaaaagtaagtattgtattatattgttgtttcttcgtttttactgttttagttgtttaggctttatgattgtttcttttttccgctgttagaggtgcggtggagcaaataaaatgggttaaacaataaaaatacggttttacggaattttaaatatttttacgatttttttttattttatttacataaatacgatctttttatgttaaaattttgttcatttgttgttaatttttcgttatatgtatgctattttttgttgtttttttgttgttattttgatgttattttcatattacttttatgttgttttcttgtttgattttatgttgttttcgtgtta

SEQ ID NO: 381729 - DNA, 2182 bp, Cannabis indica
ttttaaaaaaaatatatattagcattccttcaatatgatttagagtagtttaataaaaaactacacaacttgacatatataagaacggtttcattatatacaatcaaatctgatgatttcgaccctttctttagtggtctaccattttcttgtctttcaaagatgtacggggaggatttttcgattgatttacagccgaaagtcactctcagtgcatatgctatttattttatgtgagacaatcttcaccaataacatataattttaatagaaaagtcccgatgtatgagccttagatgagatgggggtctccaacatctggagttgaggataatgctcgaagcttggacttggagcctaagccctcggcttcgggtttggatctcgacctagacctcgtacctcttgacaaactcctacttgttttctctcacagttatcacttaattaaaaaattaaaagaatgagtatgatgtttacctcaaaaatatgatacttgtagaattttacctctgaataaaaaaataaaattaaaaaaactcccttgaactttgaaaataattataaatttatctcttttggttatgttttgttcattttatgatattagattgattcagggttaatatagtgtaatttgatagtccatgatcaaaataattgcatagatagtactttaatgataagatctaaaattgtatatctctaattttagttaatgtttgaatgtttaaattcattatactttttttttttgaaagaaatgtcacttggttcaaactagcttaaattagttaaataagcacttgtactaatttgtggccacatcaaaatcgttcatttcaaaaaatgaaaactctacaaattatctaaaaaaattagtaaaatgattgcagtaataggataaaatttgttatcattttccattataaagagtataaaatgttgcagttggcaagccagaagcagaccattttcatataaaagcccatttaagaagggcctcctttcttgtgttaggcccaaatagagtcttaagggccgcctatcttttatactgaggcccaatatatagtccaactgctaactaacttaacggagtgatagaaaatagaagcgaaaaaggattacatttaccagctccgttccgttaccgttaactaacagaaaaaaccgaagaaaaggataaagtgagtttgaaccattcttctccattcactcactcaccaatggaacccaaactcctcaactctctcaccagagttccgccattgccgaccaccttatctctccaaaaccaccgccgactattctcacctcacactcgccggacactcagattcactcccatcaacaactccacctccgacgacaccactccggcagcgtcttcgcaaataacaccgcctcctgaaacagtcgaggtgagattccgaaggcgatcgcgagaaggaaatcgaagaagcttcgcgaggaaggtgatggcgaagaagacgaaaggtttgcaaagacgaagaaggctgttactccggtggtgaagaagtgggaggagatgagcttgccggagaaagcttgggagctttacgtgggagagaaaggagctttgtattggcttaataagtttgcttacgcttcgatctttatcgttatcggaggatggattctgttcaggtttgttggaccgtcgcttaatctttatcagttggattctgctcctctttctcctggtaatttgtttaagggatcttaatgatgatgatgagccatagatgataatctcaaaagtgttgtgttgatccttttgttgtggatcttttttatcttatcttatctttttcagagattttgtagcttctctggctctgaatctgatgacgatgatatgaagattatgaactcagttattattcttcaacttctattttgtatatatattcaaaccaatatggtaaattttcaattagttatgtttcctttttaaattattttttaagttagaaaaataaaatatattattcagtatatatttttaattagatgagtttcaaatttaaatttaaatatttaattatgtataaataagagcagtttaaaatacataaatattaaatacagggtacagaggatactaaaaatgaatatatatatatacacaaccagaaattgtaaattataatatatt

SEQ ID NO: 381730 - DNA, 724 bp, Cannabis indica
atatatatatatacatacattatttgctttagcagtatagctaccaggctctgcatgcaattcaattcactaccactttatcatcaaatttactacttttttcaaatttttaacctctgcttttcacttgtttctatcattctttttagcaagtaatatgtatgcataattaaaaataacttattaataaatttatatataaagtaatttgtgaatttttaattggtttaagttatttaaaaatatacttataaaaaaataatatctaataatagcttcacagtacttagtattattatcattaaaaattaaatttaaatatttgtattgtaaattactcgtgtgtatatatattatatatatataaacaagtgtggtatgtttcactgtgtgaacatagtagattgacagaatataattaatgatcagttatattttatatacacactattctcatatgacacaatcctaaaatgttaactctgttcatcattattacatatatacatataagagtatttatgcacttacatattcaatctatattagtagttatagacatagtttaaaagtttcacatgtaacgttcccgttttaagtttttattgggtccttacactcataaaataaataactcttatatacgagtacgtcactctggctatttcatagactgacgactgaccctacaaaccaacatgaatgtttctagcgtgctttgtcc

SEQ ID NO: 381731 - DNA, 4338 bp, Cannabis indica
atggtccctgaactttcatctatgttaaacttttttactaaaattagaaaaaagtccttaaatccaacaatctcaatagttcagggagcatttttaacgaccttaaaagttcagggggcataatttagtacatgtcaaagttcaaggacaaaaatcctaattagccaataaattatatatatgtgtgtgtgatacaaggtagatgacatgtatgtaatgttttcacttgtgatgtaaaacttgtattatataagtaaattaaaaatcaagtgtgcgtgaagtattatatggaaagcatcacatcaataacatatattatatatattagtagcattttgttcctttcttctctttttctttacgaccgacccaaagaaaccaaagtcaattctactcatttatatatcttcataatatataaattagtcaccatcatttttaataaatgacatacatttatatattaaaaaaataattagtctaaaaatgtatctgtacgttataggactatatctaatgctaaatttgtatatggaatgtaactatatgaataatggtatacatttacatgcatatgttcattattacatcatatacaaattatttatttttaatttttaataaatttttggtcttaatttttggaaattagatgtgttaatttttttctaaaacatgacatggactaattaagagccatacatctagcatcttatttggcaaataacggtttggcaaataacggtaagtagtaataattgccaataaatgatgaacttagatattttagccgtcaaaaaattaaagaaggtatttaagtattacaaatgtaaaaatttaggtatgttagacttattatttggacttacattaatttttattagttttattaaaatttaagttgattggatggttctttgtttagtccatataatgttagtctagttgaaggagaagtttgactgtgcgagtttttctagttgactaaagtttttgataagcagacccagttcaactagagttgtgtaactaagtgcactccttaactctataaatacatattgtcttatcacaattctatactttttataatcagataaataaatttgcttctgatttaaagatttaagagaaagacttagttgatagtactacactatcaaattaaagtaattgctgcctaattattatctattattattgtgttctaaattatatacaaattgtatcttatgttattaatttttctaacaaaatatttttaccgcaaattacttatatattcatcctaaaatatacatagctaccaactatccattgcattacaagatcagtagtagagagatatttataattattaatcccttctcatgaaaaacttgcattccattttattcactacttgcaattcttacatgattttggattggatgacgtttgtgtaaacacagttacatttacatgcactaatacaaaagttagtaccttaaattgatttgcttggtcaaacagaataaaaaaaaaagagagcaaaaaggattaggtcattgaagatagcattatatatttgttattatatgtactatttgtaattttatatatctacaatgaattcataaacattactcgtgtaaatacaaaattactgcacgtaaacaattattaatcctacattgcttaatttttaattattgttaattttatgaataattgtttaatctataactttaataatataaagtataaactattctgcttatatttctacatttgtgtaacaaaagtgcatatgtttattttgaaagaaatacaaaattacatttgttaatttatgaattttgattagtcacaaaaccgacattgtatctttccaaaaagatcaaaacgacatgtatatatatatatataacaaccatattaatatattatatatatatatatatagatcaacctgcaaacactaaagagaaagagagttagttagttaataattgtaattatgtcttatcatcccataatttttttcagctatcccacattacttgttcttacccaattgatgtttcaatccaaaaactattcaccatttgagactcattatctcataatatatgcatctgttgtatctttgctcatctatgttttggtttgggccactgagatcactatccaacgtcgagctactgctgaaagtgttgctgttgttgttgtttcgatctcaaccaaaatcagcctcttttttggaattttggcctgtctttttcttttgatcattctaaatactcttcttgggttatttttcttcttattttggttaatttactctgttaagattggttatgatgagctgattatgatgcttcatgatcaaaatggccgaggcaccttacttacactactacctataagtgttagtgtaagtacgagaggagcctcggccacggagagtgcgccggtgccatctcaagacgagtctcggccaccaacaacacatgatgatgaaatttgaggaaatgatatgaatatttactgtaatgcattgattctattttcccctgttttttctttcttaattttctttgtcattgaatattcctcttgtacctttgtaacttgtaagcttatctaagtataaattaaataaatataattatcagcaccaacattctttatctagccatctatttatttctttcttggtcaaatgtttttaaaaaataaatcataagaaagaaaaggtctactctctttgagagactattttagaattactactctgtataccattatgtaattgtttaacatctcatgcaaaattagcattgccgaatgccagactcgaacttagacccggaccagaactccgaacctcaatcctaaaccctagacccaacacggaccaggccctggccctgactttgctccagtccccgaatctggacggggtcctaattgaggtcaaatttaatagtaaaataatacaaattattaatataagtcaatactaaatatagtattgtattaaataatattaagataatacaatacaacacggagtaccgaacgaaccctaaactgatgatacgacaacttcaacataaggcggtgatgtagtgatgccgtggccaacatcagggagcagccctaacctccatgattcatataacctcacaacaagaattacatctttaactacatcataacatgtctttacagagtaaaatgcccaaaataggaaacagaaccacccaacaaatggaaatataatgcacaatagcaaaatggctgccagagctccaaaccagaggctgattctttcaatataagcattagtagtctttgctgtgccccatgccaaaacatagataatcaaagctacaacaaatgctgccattatcccaaattgggtctcaaatggtgaaaagctttctgattgaaacttcacttggattaaggttgccaatgtggagatgctgaacccaataatctcatgaaacaccataattttttattatgaataatatcagatgatggacaacgtgaggtgtatatatataatatagacaaacaaaaggtttaaacttttgatgggttttacatgcaattgaaaattggcgtaggcgtctatagagatatatacaaagtcatgttattatagatttatgtacatgcaaattacacaatcatgtaattatagatatatctacatataatattcaaagtcatgtaattattcatatatatacacgtaaaacgcaaagtcatagatgggtccatggccgagttaagaaagcacaaagttaagacagtggacctacgtactttaatttttataaagtcaaaatagagaattctaaatatttagaatataaaaagaatacacagcaatgtaataggtatatgtacatgtaaattacacaatcgatcatgtaattatagatatatatatatatacatgtaaaactagacatgtaaaacacaaagccatgtaagtgaaagcaaaacaaaaatataatcattggtgggggcagtggacccacttgaaattctatacggtcgaaagtgaaatggaatatttagaatataaaaagtttctatgtgaaagatctactagcaatatacatgtaattatagatatatgtacatgtaaattacacaatcatgtaattacacatgtaaaacacaaagccaagtgaaagcaaaacaaacatgatatatggctaactgggtgtttgctcactaaagatttagttgtattctgattttctctattcttgaactatatttttgtaatgaccgtaaatctaactatgaatgcttttactttaaaaaaaaaaa

SEQ ID NO: 381732 - DNA, 1789 bp, Cannabis indica
gcttttctagccgtgatgtttcaccagctaacagcaatacttgtaaacaattcggcagaagctcctgtgaaaactacaatcatgacgcctcaggaaaaaatcgagaagttaaggcgacgacaacaatttcaggcgatgcttgctattcagaacagcagcaacaacttagccaacaagtctcttcttccaaccattccaccactcaaacttgtcctcaacaatttgggggaagtgatgttcgacttgaagatttgagcactttctcttctttggaacctatctctcctatggaagaagatgattcaagttctacatctgcagctatcgatgattactctgtcaatgaatctatacttcacagacttcaagatgtgatatcaaaggtattgctagtctgctattgaattttactgttatgaagtaaaatggatttagttacaatcctattcttgctgcagttggacatgacagtgagaatctgtatacgagatagcttgttccgtctggctcaaagtgcaagagaaaggcagaatctcagtagtacaaacaaaggtagcaaggacgaacgtgaaacacttgcagtagatgtaaccaatacctctaacaggtttacatacttccttttcattttagctgccttacataattagttgtgattgttctgctgcattcattccttaaatggctgctcttccaattcttcttagtgcaattttcacttccaagatgagttgataggagaaaataattatgataggtggataattttaattttctaatacataaatttggaaagaatgggtgggttcaattcacattttttttaaaagaaaaggaatacttaacaacaatgaattacttcttttctattattcttcatttgataccaggtttaaaatcgaatacaacagttgacctgatgattgaaaacaaatagagaaacttgcctatttacaattatgacttctagttgtaaatataagattctctacagttgtatgaagatgttattgtttgaaacttactaagagatgaaagggaaatatttcttgccaaatctttggtcaaagcatctgctaattgttttccaattatgacaaacgttgttcaagaggcctctttaatgaggcatatggtgtaagccttcatctttcttgaaaagcactatattgttaattacccaactattattaatgtgaatggtgacaggagaatgtgtattccacctttcttctgcgcttgcttcctatcagcttactcaccatcgtttatgaaacaaaataaggcaaaacctattaatattagtattagtctcattagtataattgattaggattttagaggttgagttgtcaaattcttagtggctttaagtgagctatcctttagtcctaaggtgttaaaatggttaagggatacatagtataaatagagggttgatcaattgtaaaagataggggaatcgttttgtaacaaagtgagtaagagatttcttgagttcattaagaaggcgcttcagccgcattccttcacacatgtgctaaggcgcgaaattctgcttcagcactgctctgagcaattacttgttgcttcttgctacaacaggatacaagatttccccaaatataggaacaatacccagaagtggatctccggttagtgagggaactgacccattctgcatttgtatagattttaagatatctgtgcaatgttttctaaacattagccctttttctgttgtttccttgaggtacctaagaattcggtagacaacatccatgtgttc

SEQ ID NO: 381733 - DNA, 1595 bp, Cannabis indica
ataaagctgtgtacatagtataaagtgtagggaggcagtggagaatgtttcattttccctttgataatatctgtgaagaatgtttgcttgatttgcttgttagatattatgggattgaggaaatcatacacagtgtatgtcaatatctcatcaatacagtttttcttttttttttgcttttctaaatatatataaatttattttatttgttcaaggtatcagcgctatcttatatatatatatatatatatatcaaacatttattatatgatcaatattaatcttaggaaatagaaaattattcatctaatttctatagataatgaatcaaatgctttcaagtacttctgagaaaagcaaaaacacaatttaaagttttcaatatttatgaatcttattttcattttcccaaaaccattattttcagagtataaaagaaatgataattgaggctactgatctgatgacacactattacgtatcccaaaacagctgagtttttcacaaaataaacacatcgttgcaaggagccatttccaattcatatataattacacaactaatagatcaaaacaactccaagcaccaaaagaatcagaagagagatgacatactgctattgatacaaatcaatatggaatctcacacattttaatttaataaataatgtaaaaaattactaaccacatataatacactatatcagtatgacattaagtgcctaatagcattgattatttttgatacgaaaggtaagagattagagagtcaccatatatcttatttattctacatgaacttatcaaagaaccaagaaatattaattataacaaatagtaaactatcatttcatcataaatatttaatatgatagccattatgatgttacgtatgagcaaaattggacatattatgacacttatttctttttccttcatatagattaataagataaatatatattataattattgctaggcattacgtatattgtatcatgtatatattgtttatatttatacgaaattataatgaaatttttgatagcttttggtgatgtgtgtgcagtgcaggggtatactgtcaaaacataataaagtcggtccaaatatgagaagattgattgtataaacccacggctcattgggtgggatccccaaatcatggaatgtcttatcatccatacatacaaagcaactgaattcgtcagaaaagagaaagcaaaggaattaatatacattcctacacaaaaaataataaaataaataaataaataataaaattgcacattattccatgggaataatataaatatagacatttaaacattattattacttaaaaatgataaagttaaattgaattacatacatacataaacaacgtttgaaaggggaaagaaaagaaaagaaaagacagagtgagcacacgtaaaagtctaaaggttttttaaagatgccatattcctaaatagttattaggaaacgtcaccaacaacctcataatttgccaaatatatggtgcttacatacacatacataatgcatatatattattcaaattattcttacaaatgaaaacaaaacaaaaaaaaa

SEQ ID NO: 381734 - DNA, 3437 bp, Cannabis indica
aggcaattgggtgtaaaatgtagcggaagccatcaactgaaggtcgaagctcatactgacggatggttttgggagaacaaaggaggttgatgaatttttttgctatcctactaatctcattgttgtgcttaagcatggagaaacatgagccaacaagcttttcataactcgattgtacaaaataatcttcaccatcaaccttatttttatagagtaaatatttggttgagagttgttatttaacacatcaatttgcattgtttttgcttgagcatcaagacgatccacaagtagcttgtcattctacatccttcattcccttgctaatttgatgttgaaactttaattgtgcttccactatgagagctttggtaatcacattcgagagtgtacgtggtttatattcttgtaccttaattgctttcaattttttaaagaataattcacgaataaaagttattggtaacccgacaactatgttgcaatcagatcgaaccgagtccaaaaatcgttatcgagtttgtatatcgaagagccatgaaccaatcaaatggatcatcctccgtgcttgatcgaatcttccttctttaccatctgaaaccatatctgagcaacacccaatagacattttttagcagcccgtatcttttctctcttaggaaattaattatcacggaaatagtcttctatgtgaaagacacaacaaacatatcctcttcgtcaaataatggcaacaatagcactatagtagagaaccataattggtgctctgataccatttgataagaacatcttgccaataactttaaccagtagcaaaatacacatacaataacaaagtaatagaaatatcaatgaaacaatagtagaacaatggagtagaacgagaaagttgatattgaatatatgagaaaaatgattagaaactataggagtccttaggacccttttatgcaaagaattttactcaatacattgcatatccactccattcttactcacctatacatagtaatttctctctcaaaattaccctcccaaacaaagactcgtgtaccctttttaatttaatattcttgcacaccatattaatcttagggcctaacattgcaggccaccaagtttctccttgtcctcaaggtgattgatttcattaagcttgaaactcacataaggttgggtgctataaaataaccaaagctaagtgaaagagtcgcaagtgaaaggtacaaattgaagaacatggctaattcagtgaattccttgggtgatcacacaagttgcaaaagaacaaccacctcgcaatgagttgacctctatcaaaaaaccaatttgaaaatgtcattcgcatagccatcgtcttaaaaatcatggttatgctccataaaagaactccgaaatttttttagctttctacctcgatcaaagacctaacattgcactgatttcttagtcacatatttgaataagaaaaactccagagcactaacaatatttgtccattcacaataaacaaaacaaatgtgaagcccagaaggagaaggaagactccacgaagtccttagttttcctctattgaaaaactaattgtgtttttggtggttcacaagcaagtcattctccttcttgtccaaatcctcaatagcacaaatacccttatcatccagcaccatttctccttgtttaagaaccttttcttttgtgataaaatatttaataatagcagcagttaaaaaaccaccactacttactttaacaattgtatgcaatcttttatgaatcaaactttttacaatgctaggatcacccacctcaaggagtccttcgtcattcacccaagaagaagaaaaaagcaaaatgacctggatattgaagcaaaaatataaacctgattccatggcataaagtgaaaaaataatttggacaatgaagaatccctaggcatcaaaggaggattgtaaagaaagaatacaacaaggaaattgtttagatctcatgttattggtgtagcaagaacctttgaggtgtccaccacgcctatcgactagtgttgttttttggtgcaaattagagatcgtcttccctttgtttgcacatgctggaagctactaattctcttctattggagatttggccctttaaccggacaagaaaaaaggtatatgggccttaccgagatcccaacaagtcagcccgagaccttgaataattaggtgaatagcttttcctatgcaggccaggtatgaaactctaattaatggggtgagtttaaataaatgagtgaaatgggtcctggtaggatcccattggcccagtttgtgagttggaataattagggtttctttcttcatcaccgtcaatattttaatttgaagaaactaggtggaatttgtgtccaaatgtaaagatctccaaaaaaattttggttatgaaaagatagatgtcttctggaagggcattccccgaagtctgaacctgaccatctggaagtagtctcgtggaatgatatgtgtcatctggaacggcttttccggatgcctatcatgtccacatggaaggagtcttcacaaaagttagcctcccccagaaaggagttctggatggccagttgttccctcctggaagggagtcccagatagtcgactccagctgttggatttcctatttgggaagtcccttcagcgtacgctttgttctatcttttaggaagcgtacgtctcatctggaagcattttttcgtgtacgtctcataactaactcaacaacttatcattggcagccaccaactttaggatctattttttgggttaaataccaccaacacttagcatttgaaggagtaccaaaaagaaggagatcagatgagtttcgagaggtgatcttgagagagaaagatggagaggtagagagagtggtatagtgaaaagagagagattgggtttggattttgtatgaagaatcttctatagatcaagaaggttcttaggtaagagtgtgagagaaaaatactttgagagaatccacaaataatcgatctcgattgtgttgtattctattcttgctcaatcaataaagaagatttcagtggtgttccagaactggagtagagctatagatcacatcgatttataagatttgaatcagtatatatcttagtgttagttttattatttagtgctttaattgtttctagtttctaatactttgttcatccctgttttaaattttaaattttgtgttatttgttaatcttattattgctaattattctgtactttagttgtaattttccctcaataccattactctcttttattcttttatgtaaagaacaagaacttaactattttttttttgtaacaataaagtattaatgaagaaataaataataagggtgactattcaatggttacattttaattgtaaccatatggtta

SEQ ID NO: 381735 - DNA, 1749 bp, Cannabis indica
aaaaaaaaacaccattcctaaactcttgggctaatcgggccttgactctcaatgaggtaaaccttcacagtttaataatatttgcatctaaaatatctaccctaaatattacacaatttaacatagcaaaacaataagtgacaatttcaataaaaaataaataaatgtaattgattgaaatacaatttgagtacacatataatttactccaccttcatattatacagttaaatatatgctcactcatcacttgttgtatgccataacaaaatcaatagagattcccattaatttaaaggggaaagaagattgctcaatcaaacaactttgtgtctgtggtttcatgtttccatatttgcactgggccaaatattgttgactgtcccaacccaaactcaaattattattaccatactgagttctcccacataaatcatcacataaaatcactcttttaaggacaatataacatatatgttcctatctatctatacatatacacacaaacttaacataacagataagtcacattaatacatttgttagatggtaaaattagtgtttatccatttcagtacttactgctacatgttcttaaattaagtgatactgctaataatgattaatgtaactgacacaattttgacaagtgaattgactcctgatatataccatcattttttaatctcctgaaagcttaaataccatgtgtttataggcctaccttgtctattctttttcatgttgaaaaccatggaaattagtggagaaaataaagggtttgttctttaaaatgcttatctgtaccttgttagttagtgctcaacaacatcaaattaaaccttttaagattgttttcttaattctttgctgacaagtgagaagcacacttagattaatgtttagtacacacacccactactgaatttgaagtataaagcctaaaaggaagagagccacttgaaaaggcttttatccttttcctactgcagaatgtttgttgagttattatcatgtgtgaaaaaaattaataaataataaaaattccttccctcccctgtatttatttacataaacactcctgaaattcaggggaacaaaataaaacagcacatacacaaatacaagcactatcttcattagttataacataaaatactgaccattaaattttaatgtctattaaggcagtaatcaattgcataaaacaaataacaaaaggaatggctttttttttttttcattttctcacagttagaagtgtgagctgtaaatattgtttaatccaaggtaggcataacaagtaggaatttattatgatttgagaaaaatggtgcatttgttgttgatggaagagaagttattagttttggaaatattttaaggcaatgaataaaagtgtctgttgtagatgtggagaggcagacatgtgggttttgcagcttagtcatgattaaactcaataatcgataattggttaagacataatcatactattcgcattttcttattctctttctcctatctaacctttactgcatttcagatacaatgtcgggatattgaattcataaccctagttgacattttacatgggcctaaacaatttcaattaatagaacaggcaccaattttgcctaacacgtttttacgagtcaatatcgttatcggtctattgaagtatcggttctcatataatttaatataaaggtaaataacaccattttgtaagtggcataatcccaatgt

SEQ ID NO: 381736 - DNA, 2308 bp, Cannabis indica
cacaaaaaaaaaaccattgaggcatattatcaattagatgatgtgattgaccttggaggagaggagagattgatgaatgaagaggtggaaagaccaactacatttatggattatgataatcaaatataattagatggaatcatcatttttatggaaaataaaataaaattagatatttatgttgaggagtgaaaaaaaaatgttaattgtactttttttcacatcaccttcttcaatgcatgatatgtgaatattatctaactattttatattataaagcattagtaaaatacaaatgtcattcactaatttagattaaaaaaaaagagtaacctaaattgtatttagtatttcatatttatgttatgtttagtaccgggccggcccaagctttgggctggccagctattgcccaagactttccatttttaaatgcctatttttttataagaaaagtttttttttctattattataaatatattaaaaaatttatatataaaagtttagaaacatatcttttaaaaagaaaaggaataaaaaactagcaatgaaagtcttaatgtatacatttttttttatataaaaggccaattttaatcttttgcacaagaccctcaaaatatttgggtcggccgtgattagtactagagagtgagttgtaattatcaaaatacaaacttaatagttaatactctataattttaaatgatgcttacttgataatactttgtaacttgaaatccaacatatttgatacttggggcaaaataatttagtgaacaaatattatcaatatgaccaatttgttttcacttatatctataattaaatagttaaatttatattaaaaaaattgttaaatttgaatttaaaacccatgtaatgtagtttcataatatttataaaatattatcgatcaaatttgagtataaggcacaaagtttatatttaaataaatactcaatactaaataagtattactcttgaaaaactatatacgatcatatattttataattactcaaaaaacattggcagaatattggggagcaacaagaaaatgaaaaagactttttgctctctcttggagaagagcctttccagtaggaatgcttcaaacacctgaattaacaatggaggatctgcttgatcgcacgaataacttaagggttgaagacgaagatggttgggagattaatgaagcaaaggaaacggaggtggggaagtcttgccttatggggaggttctgctccaacaaaaccttgaacaaaaccctcattcggacaattctgggcagagtttggggactggcggaagtggattggggagtgaagatcaaaagggaaacaactgaagctacatttatgattttctcattcaagaataagaacgatttgacaagaatagtgaataaatccccctggctgttgaacaatggcatcttgatccttcaacggctctccaagattccgtcaaaatgggagggtgaattgacccgcttccctctgtctgggagggtgttaaaccttcctactcgttcaataaccaggagcaacatgattcggttggcttcaatggcaggcgaggtcatcaaaattcagaaagaagatgtaactaagatagctttgaatggctttttctagttcaaagtatggatatcgatctataaacctttgtgccctgggtatctttttccaaattctggggggcggatttggttaccattaagatatgagagattgcctttcatgtgtttcagctgcgggaaggtgggtcatgattatcgatcatgtgccaagaaccctgagaaaatcattgatggagagggaaagaaaggctaatgaggcgacaatgaacaagggaattaaacaacgacagtctttgggggaggaactcgaaggtgatggacaaagtaagttgagtcaggaggcagtgatcgatctattgaacgtgaaggatgggaattctttcttggacaagcagggactcaaccttgtgccaagaatcactaacaagaactctactattatggaggtaccggtttctatctcctctttgccttctgtttgttttaaccttatggataagattgatgacaaaagaatcgagagggactttgtgggtgaaggtagttcaggtgttaaacgaagggctgaaccatgggaattacataatagtgaggaagaaataaaaatgaaaacagggaaacgagtataaagggaggatcctagtttaaagctgaaatcgacaatgggtaattctgagattggaagtggatggatcgatgttcctgttggaattatttta

SEQ ID NO: 381737 - DNA, 707 bp, Cannabis indica
atgtgatcagtgagtgaatgagtgagacctggcacaactcaaggctacagccacaaaaattaaacaaaaccccacaacaacacgtcattaggtcaagactgcttggacagagctagagagtaaatagttagtgggggcaaaaaagaattctttttagaagggggcaaaaatgtaaattttgaaggatcaaaatttaaaaattaaaaattttagggaatagagaaaataccaaaacaattttttaaaaaaatgggagggagggtggggtaggagttttttttataataattattaaattaaattatgtgagatccgatatttatttacactaataatatgatatttatttagactaataataatataacattattgaggtttatgaaatagttaatatttttctataataagtattaaattaaactacataagatttgatatttatttacactaataataatacgatatttgattggaacttgttattaggacttttagtatttaattaattcgtttctaatttgtattattcatgaataagttgtgtatatttttttgtttgaataaacaacttgtttggctagttgatttttcataatttttaacatatttatgacgtgtatgaagttattatatttttaataaatttattcattgctttaaaataagggctatttacaaaaatatgggaaaataaagataagttt

SEQ ID NO: 381738 - DNA, 2735 bp, Cannabis indica
aagatgctgacagtagtatataattacagattccttctacctctatacgtaaactcctgtcaactatgcctcccccagattccagtacgttccgtgttgattttcgctcatctcatgttcattatcttaataacttggaagaagatgccatgtataagcggtggaggagcaatttaaacgaggtaagaattaaatttttcctacaaatatggttacctacttgtatggcttttggtgtggagcttgatgaattttgacagattaatttctaaatgcatgcagattttgatgccagtgttccctggacaacttcgttacatacggaagaaccttttccatgcggttgctattattgatccagctaccatatgtggccttgaggtaagtttatgtctttctatgtaatagtgattatttattgcattgtctgcatactgatatttaaataattgaatcttgcagtcaattgacatgatgtcatctttgtatgagaatagttttccaatgagatttggggttatactgtattcatcaaagttggtcaagcagtttgaaaatggcggtggtgaaatgcattcttcaacagagaaagacaatcagaatgaagatttgtcgagtttggtaatttatagttttagctttttctttttcttttctttctttcttttctcctttttttgagatattgagggaggggggatttgaacttgggacctcctctttgtgaggagaagtgtggaaccagtaggctatgcctatggccacttttctttctttctttttatcttcttcttcttcttcttctttttttttttaatcttctcgcctacttgtcttaaggtcctttcccaagtttctggttgaagtggccatgattggcttttctatgtctggtttatgttatacaaacactcttcctttatttctatatcttttttcctttgtagttttggggctaacaaaacgatcatactcttgctgcagattatacgtctcttcaattatgtaaaggaaaaccacgggattcaaacagcttttcagtttctgagcaatgtatgagtagttctgcctttatatttacctttattattgtttacatgctcattaatccttattgcgtagaaaagaaaacaaagcaattttgctatacaggtagttgcttatcgttctctgtttggtatcagaaccactgtaatcacttttctgctttttctcaaaatttattgaaatgctttgcttaaagggaagaagaatcctgtcatcacataattggaacatttgtatgatgcagtctttatgggagaaagataagaaactaggtagctttgtgggtttacaataccaaagagtttgaaggtgttatgttttctgtaaaatcctagttttgttgctttgtttgtggtttcaactttcaaccacatttttttccttgtaacccctcccacttttttctttgacatcatttggtaagatgaatagaaccttatttgtttactcattttttcatcagacgccgtaatgttttgtgtagttgttatttatataatatcctttcatctgattacaaatacagttataatagattgtctatacatgtgacagataaataaactgcggactgaatcagatggccttgctgatgatgctctagaaatgcaccatgtggaaggagcattcgttgaaactgtgttgtaagtttcaacttcttagtttctgattctttactctattttaggaagatttattgctctccttttgcattcttctttgtaatctttttgaactattttcttgttaattattcaattattttataaagttctgaattttatagcaagctcatttgctaagcaattggagactgtttttttaatttcttttatattctgttgttcgtggactgcttgtccatgctttcttataatcttttaataataataaagtatccgtttcccattgaaaatgactgttatggttcccttcttatactgtatcttcagtgaacttttgtggagaacttgaaaatatgcacacttcattatgatctgaatgtatgatgtcattttgtttatataggccaaaggcaaaatctcctcctcaagatttattattgaagctagagaaggaacaaactttcaaggaactgtctgaggaaacttctctctttgtctttaagctgggtttggctaagctgcaatgttccttgttaatgaatggacttgtcatcgattcaaaagaggtattgtttgcgattggctattttattttattctttatattttgaaaaagggaaagggatcacttgccctagactattctattatttacacttaattattttgaatatatatggattttactgaggttctatccttttttcttctctcttcttttaatcttaagatctaccatatcatcctttttgtctattaaaaaatgctttcatcttgaggtagaagtaggatatacgggaaattagttcctcttgagtgtaaggaaccgaggggtaagatggaaactgatttattaggttgcccaaaaactttactgacaaagaacaattcaacaaaatatacccggtttctcttctcacctcacctatcataattaaagctagtgaaaggtttatctggttggcgggaatgaccaagttaggtaattttagcttctcttgatatggataattaattaaagatttagtaggctagcaacatgatagaattgtctttcaaaaa

SEQ ID NO: 381739 - DNA, 1874 bp, Cannabis indica
agcttaggataaaaggcttgagattatacaaaatagtcataagccatacaatttgtttatcttctttcaaattaatcctaagagttttgaactattttgacccaccaaaagaatagaataatttttttaaagcaaaagaaacttcatttaattaaatataatatgaatacaatagggcctccataggagcatgaacattagaacaacatatttcacaatcaacaataaatctagttctcttagtagtatagtgtgcaactcagtttgcagattattttacaaactcaacatgtttacaatcttgaataagaaggtcaaataaataatttattaataaagaacctcgaatcgcttggataattaattggcttactatttcaaccactacttgctgtcggacatatttttaatccaactcaggatatccttcacccccatagcctcaatagttacaacatccaagtcaccatgtctacaactactttggacaccaactaaagtccatgagtctgaccgagccaccataacaaaaccatataggccttccctttcaaatattgcaacatcgacattgactttgtaaacatttgtagcaagtttagaccaaagctctagtccatcgccattttgttgcaaatcatacaacagaaaacagtttgtgttttgagcttttctccattgttccaaggtcactctacttgagataattacatcatcaacagagagagatttatccttctaactagtgcatttcaagtcttccatatagcccaccaaagcatagttgtcatacgtacaccctttgtactcgtcagaacaacttataatttgggatagccaagtgccaaaagagaggtagattcaccacatcgataaatagtctagctcttctccaggcaataacaaaataacaagaaagtaaaacatggagaatagtttttgcaacactattatacgacggacagacagagagaacatcaactttcttaatctgtagctgaatccaagtaggtaggcactccgatacaatttttcataaaagattttttactttcaacgagatcttaagctaccaaagttttatttaaaaataagaattgtccacctccaccctttcttatttgtcttccttgatcaaaataatggattaatttagtctaatgtacttacttttttattttcttttttcataacctaaattttcaagatgtaatattatttagtaaaaatatttcaaatatttttttattacttaatttttagaaatcttatttttattatatattacttattttaaaatacaatattttataaatttattttgaactattttatactttaattattattgcattacaccaaacacaacatagtactaatatatctagttcagtccaatccaatttagtcataaattttaatccattccaattcaatcttgtatactaggagtgaaattcagtcgattatgttcatttttttatttttgcacaccgtaactgaccgtatgatagtttataaccgttcataactgatttggtggttatgatcggttatggtcaatttttggcgatttcattcaaatacataattaaatataaattagcgtatattcataataaaaaatgatctctatcgtaatggtatgtgcagagccatcaagttggtgaaaggcttaggacacatttaaaagtagcctttatatatgttatttcttaaaaaaaaaaaaaaaattgtcaatagtgtgaaagttaaaccaataacctcctcaataataagcttgatgcttaccacactagtgctaactcaatttaaatgaaaatattaaattacatttttatatattatatttttttttttacatattatacata

SEQ ID NO: 381740 - DNA, 1484 bp, Cannabis indica
tacgattatattatataagtattttgaatagtagtttttgagtgtagtgttttgacgattctctatagtgtaaaaaagctccgatacagtggtattttgatcggactgttttatcttggggatgactgataatttatgtttggttgcacattcttgggaagtgtcgcggatgtgttaaaaagagcaaactagtccgtgacttaactcaaaaaatttcattcggtaatattgttcttgctttatctttcagtagcagcttgtataacaattttaagacattcactctgttatgaatattaacgatgattttttctggttatactgctgacatcaataagctttttcattttgagggtttgtattttaaacgttgaagaaagaagatgttgtttttttttattatgaaaaaagttgcatttatgttgactattttgaaaccaattgtgtctgagatttcacctcttgccgagaagaatgatgaagtcaagaagtatgaattgcaggttaaggaaagagactcctgagtagagaatgattttctgtgtaagaattttatttggaatggtatgtctgatgatttgtatgattactataattttgaaaaaaaaaattgccaaggaaatatggaaagcattatggaaaaaaatatgataccgaggaggcaggaacaaagaaatatgctatgagccgctacttgaagtttcaaatgaccgatgatgaatcagttgaagcccagtctcacaagctccagaaaatagctcacgaaattctatctgaaggtatgactattgatgaataatttcaaattgctattatgattgataaattacccaatttgtggaaatatattaaaaatactctcaggaaaaccaaatgaactttcttgctcaagctcataaaattagcagcaaagttcatttataaaacttgacttaacattcatattatatccaaacaaacaacaaggttagaacttttaaattcaagcaaaattcaacataaaaacacctagcttaatcctaaacttctaactcacactcaacaaaagcacaacataaaaatctaagccattccaatcttttctgaaatcaaaacagcaagaagaaagaattaaaactacctcaagtgtttttaagcaagcaccaacaatttctctaaagaattaactccaaacactagctttctcaccaaaataaaaccaatcaaagaaacccaagtggagtaaaagggatagaaggggggtcagaggtgaagggttccaaaatcagaaaatatatatatatatatatatatattcatttaattaaagagaaataaacttatacttgttttatgtaaaagttggtcaaatgactattttgaccatagggcctataaatcaatacaataagggctcgtttggaatgtcgtattaggtcgtattgtattgtattgtattgtattgtattgcattggattatatatcatatttttatataatacta

SEQ ID NO: 381741 - DNA, 721 bp, Cannabis indica
agtttaacttttggttttcatccttttccttttctctctttcttttttttttttccttttccttttcatttttcttcttttgctttttctctctttctccagtcgtttccttttgtcctcatcccgatggtagcctcagacccacttcaatcgattggcggttagtgccaaattcgatggatggtaagccccaaccccaggtaatggcaagcccccaaccctgaccatggaccaccccgggaactttgaaaccttagatcgatgatgaaaggatatgtgagatccctatccttggtactccatatatgagatcccaataaccaaataatctcacctctctccttttttttcgttctctctctctctctgcaagtaatctcaagtcttgaagggtttggaatgcaagactttgagggtgaggaagaagtcgtggagtgaggcagtgagtggaagagccaaagattaggatccacccaaaaaacagggtaaggttttagatcgttgtctttttctagatataggcttgcgtgaatttcaaatttgggcttcatggttgtcattggggatggtcaacccaatagtgatgggttcttttgggttgacgacagacaagcgtggccctgtcggggctgggcggtggctgacgcaaaaaaggagaagagaaagagagagtttcatgggtggggtagaaagaagcagaagaaaaagaaaaaaaaacaaa

SEQ ID NO: 381742 - DNA, 8115 bp, Cannabis indica
aaaaaaaaaacaaaaaacaaaggataaattcataaatagctataaatatgtatgactttgtttctaatttttgtattacaataggctaaattcaaagaaaataaaaacttttaagtttagttttcgattggggataaatatttatgtttaattctttacaataataatatttaagttatattttttaaatttctaagtatctggcctataggtgtcaagtcattattcgtgtattatttttttactgatatatttaaatcaattttttaataaataatagaaattcaatggcctatactaatcaaagactgtcacgtgtccatttaacacttaatatttaggtacttagaagtttcagaattgtaacttaggtactattagtattactgtcaaaaaattaaacttaagtatctatttgtaatcaataattaaattaagtatttatgacgtaaattatttaaaaaaatattttttaatagtaaaaacttattttaaaaaaactatttatatgccatatattaaaggttatttatattttttacttgagaactcactaattatgcagtgttttaaagtagtctttttatcaaatttttatcagataaacagaatgatgacatagttgtatataccgttaacacgtcaacaccaattaatttgaaaataaaatattttaaaaatttttaatttagttttatttaattatttttcatatgttaatctgaaaatctaatacatttaacattcaatcgaactaattagtattttcatttagttttgatgagtaattaaaattttatattgttatacataaaatatatatgtatatataaaaattaacattaaaattgtactatttttttcttgaattggattcatccaattcaatccaatacatacttgacctaaaatatttgatagatccgtttcgatccaaaaaatactaggtctaaaatattggataaaactaaactaataaataaatataaaatacatccaatagatataaccgattcaatataacatttaatggatgttggattgattgaataactgaaattaattagatcggatcaggtgataaaatctaacatttaatatataattagatcagatttagataagcttaaaaatattagatgtagtccaataaacaaacattgattttgttaagagcaaaaataaaatgtatttcaagccatttcgagttctcttttcactccttctgaatttaattttattgtttcttattgcaaaattttgcttaaacatttatcttttattcttatatgttttgtcaaatgatacgcaaacactcatgttataaatttcgtacttcttcacaagtcgtactattcaagaaaattctttgtcccctgagttagttatcatttctttctgccatttcgatggctaatttttcaatttaataaaagttgaagctttaattaaaaaaaaaatctacttcaaatgaaaaaaaaaatggaagtaaaataaacattgcaaacacttagaaataatttagggtatttggtaataaaatgtaataataaactaaaaaagaaagggaggtggtggaccattcattctcatttcatttcattttatataataaataaataattttatttatttttattaaaaaaaacaatttatttatttttattaattaattaaagggtcggttcggttgtgttgggttgggtttgtcttgactgttcattttgtgggtcccaatcccaataacacaacacactcgtatttttattttccccaaaaactaaaattaattattatttctatttttaatttttattttattttatatatatatataactgagacacaatttatttaatttaatttaattttttatatatagaagtgagagagaaattgtttaatttttctctttcacatttttatttttttttttggtgtaaatttctcaattatcgtcatcgtcttcctcatcatctcgagctagctaacccctcttcttcttcctcctcaagctcaaaccctagccctagccctaccccaatctaatcaactccactcccctactgctactgctgctcttactcctccatctttctctctttacagctgtatttttcatcatcatcttcgcggtcttcgtcgtcgtcttcttcttcttcatccccaattgtttggtagggtttctgaatctgaggtcacaagctagtgaatcgcctcccttgacgatctatctctttctctctttctctttcttgatatcttcgccgcctaccaggtgccagatctctccgaaaggcgacgagttcaggtgctggtcgtgttttctttcttagtgtttatttttgcaattccttacagatatgttattgtttgatttttaagaatgttttttcttttaacacagaatctagtttttatttgttggttcttcttaagtagtgatttttctagtttatgataccaattattagaaagtagtaaattccctagctaaaatatattttcttggattagtttttgtttgtttttgatattggaaataggctctggactatacattgtttgtatttgggattttggagtgagttaaaaggctgccttatctttatgtgagagtattgttgttgatgtattttgatgatcaagcatcttgagtatttatttatgtgtgtatctttatctggctgcactccaacagttgatggggtaggaatttacttgcattatgttgttaaacttctctgatagtgtttcaaattagcatgatatcaattgcaaaacaaaaataactttcttttctccatagagtagcgttaagacttaaggctttttgttgtgacttatgtgggattgtcttaagtcaatatccttttatatttcaatgttgctgctgtgttatttataagatttttttttttgttttatgtttaaaggaagaacagagggcccgccaaaggaagaaaatgtcaccattggtccttggctggtaaagttttgtaaatctgagatcagaggttagtgattcgtgatttgtgctttcgaaagagaaaaagaagaacaagaccccaaatccgtgtttgcatttcaagaattaatcatggacagtgattcatggagtgcccgcctttcttctgcatcgaagcaatatcaatcggcacttcaatcacgatctggttagtgcaattaaccccttttttctctgtcaacaattgctttgtgtttggaagcgctgagaaaaaaaaagatccatgtcatgggttgatgtaatggaacttgttcactaggttaatgctagttgttttggattaaaggatctctttcctttcccgaagttggttttgctttgtaataatcgcaattaataagtggatgtcaagattccatttgatatctcaaaaatttgttttgatttcatgtccaatttgggatttgcttttttttttttcccccaataatgagtcttaaattcttaaatttcttatttactgagtttctttgttaatgtttatgagtttatctgtgttgggcttcttgggtgttaacagattttttagaatttccaccaattgagattaattcgctggttacagatatgttcatggggtttgaagaaattgatggggatgatgacataagggaggagtttccatgccccttctgctcagattattttgatattgttggattatgttgccatattgatgaagagcatccagttgaggcaaagaatggggtatggctctttttcacgtctctagttgtctattttattgtgctgcaagaaaatgtttcattttggtcattattatgagatttctggttactttatatattttttgattggttaataaatggtgctttacaatagccctaagtcaactttgagaacaagtttatcctatcttctttgatggagctcccgaaatcttaacaacatgctcatggaaactttctgttagtgttacatgatttaatgctggtttgtctgcaggtatgtccggtttgtgctatgagggttggggtagacatggtagcgcacataacgctacaacatggaaacatttttaagatatccttttcttataactttttgtttgttactcacaagtttgtttttcttaatttttaacataatgatattaaaattgcctttaaaatctatcttcagtttcttgaatcttgatagtaccatgtggagtaacaaatatgtgtaactagactttagctctggaaatttgtgatataagatttttccccagcattctgaaaagtagtgatactattctttattactcttttctttccctcttcttcactctatctttaccattcactttcttttagttatagattcttttaacttgcctacctagtgatgcttttacatcctgttagttatagcttaataagcatctgtttctttgcccccttaaagtgtatttcttctctaccatttaaaacttgcttcctagtcggctaaccaaacaaacagttaattttgtccaatggcctttttatctttgtgtacgattgtgttatagtactttgaattccttaaccagtacttacatgcagcacaagaggaagacgagaaaagggggatctcattcaacaacgctatctttgttgaggaaagagcttcgggaaggaaatttacaatctctttttgggggctcatcttgtttagtgtcatcatccaatgctgcacctgatccattgttatcgtcatttatcttgcccatggctgatgatttcggcagtgttcaacctcccttttaactgaaacaagctcagcgaagaaaagttctactgagaatgtatcagaaaggtatgttaattaagtcattgtcattaagtttatttattatcttcccatgaatgtgtcctaatctgcgatcattgaaaattcaagttgttgatgatgggtctcagtaagtcagttcctttctttcatattgcattgcagaaaatcaagccagtataagaaaaaacactgcccttctctaattattattgtgatcttttaactcctgttttaattgttgtaactgggtctaattcatttgtttttttttttcgggtgacagaaaggtgcagccggcggctcctcctctctcggttaaggataaggaagagaaggcaaaaagatgtcagtttgttcaagggatgttgttgtccaccattcttgacgatggcttatgaatttcagcactggaatgaaaaccctcacagccaacttacactgcaaacctatgatatgcttgtagtgtgtatgtcacgttatatatattacaatatatattattattatatattaaaggggaaaaagaaaaagaaaaaaaaacaagagagtggaataagttgtagggatgagtgtaatttatgtgccttctgaactttagtttaacaaactccaggtattatgtattatttccagcttattgttaagtaaaagaagaaaaataatttccttccagagatagcaatttcatcattttttttttatatatttacaatgagttttttcacatgtaataaaagaagaatcaatagaatcagtaacagtgtgtacaaggtaggttatgaaatatttaacaagtttaaataaaaggtataataattcattcatcctacctaaacaattacaggacttggtcccattaagaatagggatatattcatgttcaatgtgagtgagggaattaattctataaacaagagttaataaattattgtataaaccaccaaagaagaaaaaaataataatgtccaaaaaggacaccccacccaccccattccatcaaattttaaagagttaaacttaaccattcagacaattttttatccagtttcttctgtactacgtcggctacgaaagaatcgaaacatgtgaagcagcaacctctcattagacttgctttgccacctgccattaatatgtgttcacaggttggtggtgggggcatagcaacagcttcattgctcctcctgttctcgagctcgcatgctgctaaaatggtgtttgttgaactccaagctatgtcattaaacgtaccttgggctaaatcaaaagaaaacaaagtccccattgagctttttctatttgcataccagcaaggaacttaataaacaaaactataatgaagctacaaagaaacttcaacaatatatcaaaatgcatactcaacatacctaaattattgtcccgtgacaagttctttaaatggtttttgaccattgacttcagctgttcctttgcattttgaagatcatcatcctctctgacataactatcgtttagtctattgctgcactgttggaactgctcataatctgatagtgaattcctctctgcaagtcctggccacaacgttccattgacaaaggttggttcgtgccccgtttgccttcttgattggcttattattgaagatggaagataagtattttgcactgtatgtgaagaactttcacataatgtttcctgagtgaatggatggtggtatggtacttccatgtcttgtgtatttgcaagttgaattgttggtaaccttcctgtatcaactggagaattaagatcaacgaccacatcagcacccgagttcccttcagccctattctcagaacgcaaaaagcgcatacggttttggatatggtgttggttacgatgaaaattccttcttcctgatactgttggtgccccatttcgggagagtggagaaactgaattaaggtccaagctttcattactataatttgcaatgggtgtggctgctgctaactgatccgaaaaacgagtctgggcaagggaacttgaggatccaagaccaacagctcgacaaccttcacaataccaattaccttcaggtacttccctcttaaggccgacacaataggtgtgcgctggtgaatcgcagagatcacacaataacatgagttcatcatccccaccttcatggcattcagtacatatcacattctcatagggatcgagatagctcctgagttcttcctcagacggttgatatacctgcataatcaaggaactaattataatgctcaaatatatgaaaggtcatattcaataggaggtggtaatatgagagagcaatgtttaacctgatcacgttcaggtactgttatcaccacctctctcaaatcaactcctgctgcaaatcttgcaggcttactaattgtactaaacctctgcttgcacaaaggacaacgggattccacttttgcccattcgacgatgcaggtaaaacagaaataatgagtgcagcaattaagggttcccctcacttttcttttatcttcctctgtaaggcaaattccacatacctgttttaggacttctacttttatttcctctaccttttccttacccttccttccagtagattttctttccagtggcagaaccacattctccacaattttatcactcacgatcaaaggtgagcttctcaagttattttttacacaaaactccctagcttctctcacttgctctctctcttcctcggatatggtgtactcgtattcagaagaacgagaggatgcaaaatctgaatctgagtgacagacagaacgcctccttttccgacccttttttattgcatttttctctctcaaaaccatgtcataatcttcaaaatctccttcgtcgtcatcatcacatcttacattccttttaattccacgtttcttttttaccttccttcttaatggcctttttgaaaccatggatttcctccttttcttaccctttaaagaaaccttcttccgcaatacacgcttgactggttttgcatggttcttcctcttctttgtcacctttgattcttcttcctctgaacaatcatcatcatctggtgtgaattcctcgtcatcatcgtcatcatcattattgggtgtgaattcctcatcatcgtcatcatcgtcattctcttccttgtaagtaaatcttctcctcttttgtgatggtttaaccccatttttttgcctacttgagaaattggtctgcacttttgatcttgttctctttttgacctcttccataccttcatcttcatcttcatcctcctcctcttcttcttcctcttcctcttc

SEQ ID NO: 381743 - DNA, 3330 bp, Cannabis indica
tatatatatatataaatactattaagcctataatatacaacaagttgctcttggcttaattagttattgctttccatgttttctatatatatatatgttgtaatcaaagctccattataatgaatcgagtttacatatttatatagatagattgatagatataatgtcttcagcagatactgatattttccgagtttgttactatgtggaaaataaaacaggtgaatcttgtacagttagctacactaatcctgatggagttgtgacaataaatgttttagctaatgagaagaaatttataggtaagttacttggtccaagtaagggagaaggtgtgaccattaagacaagtgattacgaagcaagtacatgggatgtgtatacaactggagttgttcaaggtgttcatagaatttatctagaaactcagaagaattttactattcatccatctgtaactactagattgtctttcgatgcccaactcaaatacgttatgtatcgcgatcatgtcgatgtttataatgttggatggatttgggatggatatttatttactttgaacaatgcttaattaaattgtatgtatgtatgtatgtgtacatacatacgtacgttcttgcttgattctctcagcgtcttcctgtacgctaagagaatctggtaaatgttgtttaatataattttcttttgtttgattttatttgtttttctttttgttctactcgtttatgtaatcgatcttcttgatagtacttaatttgtttctactcatcatcaaaagttcaagttatatagatgatgctgagccattttcgtttaatcaaggtttcacttgatgttcttaattatatatatgtatactatatatatatatatatatttatttatttattgactttcaaacagaagaataaattactgttttgttcttaatgatcaaatactactaaaactataaataaattaataattaattctttgaaacattcactacttgttgggcatcaattaaaaattacaacaaattaaaccgcaaataaatcacaggatcttagtcatgaagaaattccttccgtctaaaaaaatttattgtctattctaagcgcatgctaaaccaatctatgggccataacattaacattgcgaattaagtaaaaagagatgctctgggaaagctagagaataatgctttaattgttagaactattacttagtttgctatttctgttatttcttttgcctaagttagttactgtacagctgtattttattgttgtttgttagctttgtaactgtcttctacgcttgtatatatattgagttattactcatttaataatatacagaaaatcatttagctcaaattctctctatccttttctctctgttatgttattcctcacatgatatcagtggctgttttttttttctctgatcattcgtttgtgagtcaagcttcacttccgcatccatggctttagctgcaataattctgttgttttctcacacaaactctccatcaagcttgataatgaaaactttctactatggcgtcctcaaattgttctgcaacaaaggtcatcaactactcaacttcatatcccccaacttcacacctccacagaaatttctctctgaccgtgatgaagaagctggtctcatcaatcctcagtttgttcaatgggagattcaagatcaacttctctcatctatgtctgaaggaattctaacgcgtgttgttggctgtgaaacatctgctcaggtatggaacactcttgaaatctattatgttactcaaacttctgccaagatagataaatttgttacttagctgcagaatatcaagaaaagttcactgtcaatgaatgactatctgttgcgtataaagactattgtcgatcgattatgctcagttggccatgttgtgactgtgaaagagcatatagttgctatcttcaagggtcttccctccgattacgacacttttgtcatctctgtaaatttcagaaatgttccttacactattgcagaaattgaatctttgcttctttcttaagaacatcgaatggacagtcactccaaagagcttgattatgtcaatcttgcaacaaatagacccaattgtggatgaggttctggttatggtcgccagtcgaatccttctccacctcctcgtggatcttggaatccttatgctatcaatcctagagaaaatttctccaacacaccagcagctcctccccctggtttcggcagaagtgcacctcctcaattctccatgaatactccttcagcatcagctacaaacaattattctgtttgtcaactttgctcaaaagttggtcatattgcttctcgctattattagcgattcaaccttgattttccaggagttggtactgctaacatagataggcaatctgctagcattgccacaactaacattgtcaatgaccctgcctggtatccagactctggtgccacatctaactgcacagctgatgcaaactttcactcaaaaggactcctattttagtaatgaacaagttcatatgggcgatggtgctgaaatttccatttcaaatgttggtaagacttctttcaccatgccttactcttctaaacaattatttcttaatcttattctccatgttccccaaataaccaaaaagcttatctctatttcaaaattttctgctgataacaatgcatattttgagttctttcctgatcattgctttgtcaaagaccaggtttctaaggaagtccttctgcagggacatcttaatcaaggtttatatgtcattcatccttctcaaatgcatctttctcatcaaactccatcagttacttctctgaataaaaatacagctttgtactctgttaataatgtcaccaacagtctccacaatgtatctagctgttccaatttttctttgtagcatagcaggttggggcatcgctctgctaaaattgtaaaaagaataatgcaaacttgtaacatttctgatcctaataaaacagtccatgatttctgtgaagcctggtgcaaaggcgaaattcacaaatttcccttcttaaggtctaaaactgtttacactgcccctttacaactcattcacactgatgtttggggttcattccccttcattcatcaagtggttacaagtactatatatattttatagatgcatattctaggtacaagaaaaggcctttttaccggagcaattcgtcaaatgcgccggtaaaagttgtcgacataaagcaaaaactgaaatcccacttgcatttatgctttacttttgccggtgcaataatgcgccg

SEQ ID NO: 381744 - DNA, 4970 bp, Cannabis indica
tttcttactgagtctttcgactcccagttattacgtatatgtgcacgtaataggtagaacctaactgggatgagtccaaagctaatggtaaaaattgtacatatcaagacggttaggcctggagtgttcagggtcttcgggatagtttaggctcacctttttaatagtcatatgaagaaaacttttgtaacgcaagtattttatagacttatgtgaattttgacaggatctcgaacttatataaattatgtttatttttaaagtttaagttatataagaaaattttaattatccatattttttaataaaccctttgattacaaaaagtgtccacaataattaagaaatcacggtaacatgcctaatctagtaggatgttacaagtttttatcagagctgcgaggttgttcttcaaagatcatcaagatatgtacaatcatcatcagagataagcttgactcacagttcggtaagggagcatgcaaggagattaatagctaaataggtgtatactaagttcccatgtaagtgatcagtagattacagttttgatcgctacctgatcaagccgactcataagtttacaagcttatcctatggatggatgccgagcagaacatgaggagttgggatgatttagttttcactagtggcagatggaaagaatgggatccccttattcctaaggtcaaatttaggccgagaaaggacttatggaggttgttatgaaaatctaccacaggctccgctagaattagagcaacgattcacggagatgggagctatggtacaacaattagaggaggagattaagagattaaggaaatatggatctcctattgtgccttcacctcaagtaccagttactttagtttcaaaattgccaacagaatagtttatggctgatacccaaatgggatcatcgtatgggaaatattggatacaagaacctttggtcattttgggatatcaagatatgatgaataccccttgagtcgtgagcactaaagagcttgctcaagaatcccaaggaacttttgttattggtaggggtattactcctcttgcttttaatcttgtcaaaggtggtactagttccttgaaaagtcagaagaggaaaactccatctacatcagtgggtttgagctagaagaagaggtttggtagaaaaccaggtcggggtggccttggatgtcactatacttatctagaatacccccgatgtaagaaacatcaccccagatagtgtaattgcaagacatttttccaacccgttttggtagggaactataagagagattgcccaaagttgtagaagacaaaataagaacaagaggcaaaactcactccgtgtttggatgtttgtcactacccaaatcaatactgaagatagtccttcattggtgtctggtcagtttctagtcaactactctatttacactgtgttaattgattttggagctacacattaatatgtggtagtttggataattgataagttgggtaggcgttaagatagatatgaaataaggtttggaaccctattaccaggtagagaattagttatctccaaaaggtgaattaggtctatgccaattagattgaaggatagaagttgaacactgatctcataactttaggtatagtagagtttgagatattacttaaaatggatttcttgtatgagtacgctgctagtattgattgcaagtggaagtggtaacttttcaactgaaggagaaggaccatttgtgttataatatcagctcaaggtactaaaaatccaggtataatgatgataagagttaaaaaacctatcacgcaatgggtacatagaattcttagtggtggtattatgtaccacctagctgaggcagctcgacttgtggatattagagtggtacaagagttgtttgatatatttccaaaagaacttttaggattaccactacaacaaagatagactttgttgttgtttttgcatttcgagcaaaggtgggttctaaggcaccctatagaatagtccaacaaaatttaaggaattaaagttatgattttatggaacacttgatttagggtttacctgaccctgtgtatcagtctggaaagtgttcatgtttgttaggatgaattttggctcgattcatatgtgtatttgttatttagaaccaagcaagttgataataaagaataagtaccctccatttaggatcaatggctgatttgatcggtttcaaagaaaaatagtcttctccaagactgatctttgctcaggctatcattagttgagaatccaagtggaggacatcttaaggactgcctatcatactagatttggtgttcagagaactcaaggatttccttgatagatgtgatatatatagtaaatattgatcatattatggtatactttcaatcagaattaaagtatgagcaacatctacagattgttttgtagtggctatagaaatatagactaaatatattaaattaaaaagtatgaatgttggctattctgagtatcttttctagggcacattattagtaaagacgagatcatgagttatccgagaaagaattaattcgatagggattgaccaaggccgaagattgtcactaaggttagaaactttttgggttcaactaattattaccattacctcgtgcaagggtttccaagatctctatcccatacaagagttaaccaagaaaaatcagcggttaatgtggacatatgggtgtgaaattaacttcaagaactgaagcaaatcactactctagtgttagctttggcatcagatcaagaaaatttttggtccattgttgggcatccagaccggatctagaacgcattctgatgcaagctgttagagttattgcttattcttttcgtaagttgaagtagcataagtaatgttacccaatgtactacttagaacttgtgacaatgattttacttttaggttcttacaaagctatctctatggagaaaattgtgaaatattttattatgaaaatagattggaatatgagacaaaggcaaaggttggagttagctaaagactaagatgatgaaggccaatccagtggtggaaactcgagttaggaaatgtcctgggtgggtctccagtacaaccatgatttttttcctcattcagaggctgccatggttggtttaattttggagtttagaaggggtaaactcaataagttaacacttcaaccagatttatcagacaaaatagaattactcaattagtggatgcaaagtttgtgaaaaatatatagatcacctctaaactccaaaattaatccaaccatgacagcctacaaagtgccaggagtacaaaactgaagctgggcatagttttctacccttagatagatgaccagtctgaatggataatttagataataaaagatatgttgccagcttatgtgatgaatttttaagaatcatggaacagtatccgcctttgataaatttttattcaacattcagttaccaagttatgatagggatagttccctataagatgctaaataatttgatatgtcatttttgaaactcggaacaaaaatatatagatcaaaagtcagtttagcaaattagtaaggccttatagaagattatggccaaggtgactacttcttaaactagatagtaaaagatatatagatttgaagctcagaaacacaaagatcctgagtagggggaaatcatgtctttctaagaatatcatcagtgaaaagcgtaaaatatttttgggataaggagaagatattccctaggatcctaagacttttagcttctcaagaaaataagattaataatttctctcgtttacccttatgattagcatttccaacactcatgatgtttccatgttgtatgctaagaatgtatgattgagaattgacaaatatcataagttatgaaatattagaatttcaggcaaacctattttgtgaagagaagtaatttgagattcttgataagagagataaagttctttggaacagaattatagtattgatctaggtacttggtaaaatagtagggttgaaaagccaccatgaggactcattgtccgaagtcatccaaattagattttgacggcaaaatctttttaacagagataattgtgatgactgtattattagatcataggaattagcaaataattaaggatttaaatattatattatgattatgtacttcttagtaggcattaaggcttattgtcagaaataggccttaggaaaatattttctcaattacagatatatatttgaattctagatgcattatatatgttatatatgaaattttataattttcatattttgtgcccaataaagatggaatgcaatgattgggccaatagagttgcttaattatggttgagtatgttagaataagcggggctagataattaaaggtttggaatgtcgagatttatttggggtaatgttttggaccatgttacccttatctttgaggttactttctattgaagtaaaggggtaaaaatgtcatttggtttatattttaagttaatggattttctagataaatccttagtttttctcatattattaagtgaaatggttgtactatacttaggctttcttaattgattaagattaaaacataaaataaaagaaaaccaaaaaaaagtatccacctctttactccctccctctttctagtgttggcgaagctagaacccaagggaaaacaaagatttcctcatcatttttagaccaaaaaccaaaattgtaagcaaggtttcagctagcttggtggagaggaagatcaaaggtaagcctagtaacctttctgttggaaatattttatcaggatctagatttactaacaagtatgtttcattacaatcctaatatgaatttctaaaacaatgaaataaacacataagggtttaagaaaaccttaaattgggtgcagc

SEQ ID NO: 381745 - DNA, 1724 bp, Cannabis indica
acaaacaagacgagatggtaacaaagaacttatgagccaagcagcttcttccatctggcatatcctaaaacaagtaagaaaagtaatagagaacctgcagtaatacctccaacaaagagctcaaatattccctccgtttcgtacaaagtacagggaatgttcataccgaacattcctgcaatcagagtttcgactgctatggcaaatgacgcaattgttaatgtcaactggagctgaatgagttcatttcgctggttgtctagttgaatgttgacgtagtcttctgtgtcatcaatgtactcacggacctgcaacccaatgaagaatttagtacaaaaactcagttatcatctatacagcagatttctacgaaattgtaaatcctccacttagtgcaaaagagaagaaacaaatataaatttaaatttgacaaccccttaagttcagagagaagttacagaacagctaaaccacactgagaatcaaagctttcgattgtcgattcaccagagggtttagctacctccaacttgtacttaaaattctcagtcatccctgtagtagtctagtagacaaacaatcgaagttttatgtaaaataaagcacaaaatgctaaatgtcttgcagaatgataacttacatgaaacttactattacacttccatgtacttaaaacaaaacttagcagatatatcatgtttaaatttatgggtatataactactgctcatgctaggatcagaaggcactcacagacaatatcttgttacgtgttccatccagctgcataaaatatgcctcaagcaacatctccagatcttcaacatcattatcatcgaagcggttgcttaccaaactcccgcttctcctagaactaatccgaggaagatgagtagcactggtgttgatgctatttgaaccagaacctcccaacaatgcttcagattgttggttctggatccacttccttgtcaagtacagttgtgccatatcttcattgtcatccagaagatgttcgatttcatccctcacctgccattatacataagtctacttgtcataaatacttactatgatgtactggcatagaggaacaattaaaaccttacgggaggtttttttttctttttatgctgggaaaccatttaggagattcgttttggcgtaactgttgtttgtaaaattaagccatatcaattttctggattcactgtgtccagatgacatttattttgtaagataactctatttttcctctccacagaggatcacacagatgctgctataagaaaatgacaacgccactatatgcagatataagagaatgagagaggcacacactcagaaaaaaaaaaaaaaagtaaaggatgggaaagagcttcgtagctgtcttcataattgggtttggcactcagatgttggaaaatccaagccagttttgctcaagatagtctcccattttcttccaagaactgtcttttttttttcaatttaaccttgataataaaattgtttaagattttgaagagaagatatggcaatagtgtgatattagagaagtaccatggacaaggaaagagataacttcaattaatcttgacaataaagttgtcaagattctgatcagaagatggggcaacagtgtaatattcgaagagttcaagagtactatggacaagggaacagaggcaataatcatttgtggctgtgagaagaatttttcaa

SEQ ID NO: 381746 - DNA, 1618 bp, Cannabis indica
tatatatattatattatattgtacaatcctatgtactccctcacacacactcgcagcattatctccatatagctacttggacttgcttcaaatggttgactacccatctagagctaattcatcatcatataagagtatctctaatggtccattatattatagcatctctaataacctgttaaaaaatagtgatatttttacattttttttttaaaaaagaattgatatattttatttcaaaattaatacatgttaaaagttataataaatttagcataagatattatacttgtcaaatttgacacaataataaatataatttttttaattacaattttgttattggtcattaatataagattttaatacacatttcataattaaaatattaatattagttattttttgtatttctgtattaatgacacgtgcacttctaaggcacaatactagtcaagatgggctcattcttaggcctaatcaacttaacaaatcaacccacaaaaggagtcagcctacaactctgaattcgaatgtaagtccaccttatagatgcgacaagtttggactgttgtggtcttggaaagactatcctaccccgaagctgaaaggtccatcaggacaaatccgaataccctcttgaggtaatccagaatgggcaattgaagagacatccaaaagcctccgaataccatcctacgtggcatcctccagacataggatcccattgtgtcaaaggtttatcccctatgtcagacctagaaagtgcacgcactatcaaaataaaactacatttttgtccaacgctatattcctaaacattatcaataccaacttggttgtgcacgatagctatcatcaccaaattgtccccactcgtacagatgatcattatctcatcaatttggcctcatccaattggcctaaagttaatatatattatatgttaccttattagttggcctagttgacacctttaagccctattgagtttgggttcacccatacctgactctaacctataaatagaacattatcccttcatgcaaagggttggaaaatcatttctcagatcaaaggctaagaattaaggttcttaagctagggcaagaacacttgtgtaaaaatactttgaagtttttctagcttaataatattgattcgtgtactaaggctcattgatgccttaaccatgtaaaaattcttgattcttcttctttaatttatttctttcttaagcttatttatgttataatatgtttgcaaaaatctcggtaaacatcttggtactttgattgaggtcttgaagaaagttttgccagagttgtcatccataacaatggttgcaacccaaaaagcaacggtcaaaccatctattcaagacggttaagataattccaccaacgatgatgagaaccatctcccctaaaaaaaacggtcagacaagtgtcatgggggatggggaagcgtcttaggtaggcatctacccacggtgaggggaccagcaccgagaagaatgcgttgatgatggtcaaattgatgatgatgagcaacaaggtcatccagataaccctaaggatgaccacaataaatgttgggaattattttaccaggatct

SEQ ID NO: 381747 - DNA, 2971 bp, Cannabis indica
tctctctctctctctctttgtcgtcccttatatctctctttcaagactacatcagagttacaaacccacgccaaaacggacgagcccaacaacggtggtcatcgcctctctctcactcgaatctctcttgtgctctaagtcactctctcttctctctcgactcaacactaatgggtcaccttcgatgaagagtggccaaaatggaagccaccactgtccttcccaaccattgaaaaccaaaccttaaatgtctcaggccttctcctctcccagcgacgacgcactactcctcctctcccagcgatagtgggcgacggtaaatccacgatcttccttatttttttccttttttagtgggatcttttggtttcagctccgacaatgtagatcgatattttttaatgtaaatgaattatgtattaattgttcaagcattgtaacgatttatttgatgtttttagatatgagtttgatatattattctttatgggtttgctttttttttgtttttaattaagcatgggtttgttgataatgaatttttagctgtagagttcaaatttggctcaaagtaataatttgtggtcggatttggaagttttttttagtggtgtcagtttaacaccaagagttatggtgcaaaaatagatttcacactcgtaagtctcaatttaaaactgatacctatgcccaaaatattgttctgaaccaacaccaaaacatataatttatgtcctagtggtataggtgtcgcttcataaaactaacactacaggtataagtctcagtttaaaaccaagtaggttttgtatttaaaaaagcagaaattttatcatcataaataaatattaattgtcattatacatatatggatataggaaatatttggttggggcatcattttcgttccttactgtagaagaatttttcgtttccagaacatagttgctgacacagtttgtcgtcaacggatataagaatatcgcaaacaagtaagatgaacataagtgaatgtcgatcaaagtaaatcaatatatataaagcaaaattagcgatgatgaacataaagtttttatagtggtttactccctttcggcggtaatagactagtccgatttgatttttatattggtattttttgccctaattaaaatagaatttttatataattttaattttatttatcaataaaagaacataaattattttactacttttggtatattacttagttcacatattgctttcatagtcatatatttgatatataaattctactaaattcctatcatattgttattcatgattatagtgttgtcttaagtcccgtgatttatcaaggtactggacttattgtaatgccattaacttcatatcatcggtgatttttgttttggtggccgcttcaatcattgtttgaataaaagtcttcaggctttcagtgtgttgttgtttaacgttggtgagcgaaccaactttcagatccttgtcccgtgtggcaatgaattgcttgccaaaggctaattgcagatctttcacgctgttaatcgatttggaagttaatcgctttcaccaatcctctacggacttaatcaaggtcagggagaaacacaaacaattggcgtcagcactgacgcgagcaacttgcatcatcttgttgtatttttcaagatgcgctcgcggatcagttttcccttcataaaattctatgtgaggcatcttgaagttttctagatgtggagttttcaaaatccttcttacgtagggttccggatcctcatcttctgaattcgataatgctccacttggtttcttgaccaacttggtcaaagaagcaatttgttcttccaaccttttcatatcacttttagggaggtcgcgccctctcatcttgtcgcttagatggttcctaaggtcacatccatgtggccttgctttctcacttttgtatttttcatatttggtgtctaatcgccatcgatagtccaccaaatgtcctcagaatgccccacagctgttctaccatcttgattaactgagtcgctggggtggtaccttcgccctttatgcgtggatacttttgcaccttgcccttgtggcgtagctttacctctagggtcaaaaagggcgttcgggcttaaaagtgcccgtggccttcttctctaacgccacccgcctggaggtcagaggcgtgggagtcggcctcttacatgactgtgtctagtggagttttcttactggtattctttcgcgtgttcaccatagttgaattgagacaacaactaactaactttcctcaactctcaatgaaagcactaaaatatttaccaagatttttggaaacagattaataagagcttaaggaaatgaaaaatattaaataatagacgtgattcagacattaatgatccttagtccacgagtcattattattggccttctttggcgaatatatgagtattacaagtgtttacaatggtaatctctttataccttttgtttctctctaagaagaaatctctttaggaatttcaacagagtttttttagtaaaaattgttcaccctttgtacataaaaatgttgggttttgttccttaaataaaactcatttcaatataatcagatttactaattaataaaagatcagaaatcgtttttatgttggatggttcacaagatttatttcatgattatatttaatgtataaattttattaagttcaaaacatatataaatatatatatatatccgtgattataatgtcgtcagcacagtggaagaaatcatatattttcactagatttagacaaacatgataatcggggataaggtatacttacaccttggataagtgttatgtcctttccagggcattggtaaagtttaccagtatcggatgtatgagtatacattggaagggaccgatattaattttagacaagatatcataaactcaccgttatatctttc

SEQ ID NO: 381748 - DNA, 3110 bp, Cannabis indica
gagatatttctctcattgagataattattatcttaggagtatgacataaaactttaacaagtccctaaaattgaatacagagtcgggcggcaggggaggcgtttcttatcttgttaaagtctctctcgaatggcattttccgttgtctccttcaaccccatatcttcgtcatttgcttcttcagtttcattttcgaaaccatatctctgctctatcaagactcatttccatggtttaactctggctactccgatctccaataagccactggttgtttgctgttccacttccgatatgggttccgcccctgactccatgagtctaaggtattaaaggtcaataattgtattaacaattatggttctttgtcatgtttgagtgaattttttgttgggtgtcttaactgtttgtaaaaatgcccaagtggaatggccggcagcactttttttccccctttcccttggcgctgttgttattcattgtgaattttttgcatgggaattcccttactttctttcgagaagtgactgaaactttattgctatagtacaattggagaaatagagttatggctttatgaaaattgcgctttaaatagacacggaagtaatatatcagccataaacagttgctctgtttttttttgtttttactttggtaatgctcttgttacttttagcttcggcttacgctagtctaagattaacccaggttcttttatggagcaaacagaagattttgaactatacacgaggctagtttgtttattagttgatgatacgaaggatagcacataattattgttatgaatgaacctttcttaaagaatgatactttgaagcttcttctacctcagtgtataagttggttggaatttttctgaagtcatgagaaatgcatataaatttgtcgggtagggaaaggtgtggttatcaaaagggaggtagacattataggttgttgactctcgtacttgatatgcttgttctttggtcaatatttggttattattgttatattgcttattttcgttgaatttttgtgctttcttccacattttgtttcgtactcattttgttaacttccatggtttgtaacaggcacccccaaatgtcatctatgtcaccatttggggtgacaatgaacgaagggggtgtgtcaagatcatcgcataaatggcaaagggtcttacttaaagtaagtggagaagcacttgccggggatcaggcacagaacattgatccgaaggtgagttttcagtgtttttattcacccgtatttatgtatatatatctatatataatatatatatatttatttatatatttcctgatgttggtcttttacgccatctcttaatatagattacaatgtcaattgcaagagaggttgcagctgtgactcggcttggcattgaggtaatttttaatcctttctgtcatgtatatgaggtcatgtgtatacattgaatagaatgaatgcatgaacaggtgcaaacataaaatcacaaaagcagtcacaattatagtaccttttagccttttacttgtttctgctgttctacatgtcatagaacttcaacttctagctgcagtagtttttttctcaattccagagtcatctttgagctcaatcatttaaaaagatttttacgggaaagaagctattattgaaactatgaaactgtgaagctgaatagaagaactgtttaaataaaaattgacctattccatttatcacaccatctcaaatgcaaattagacttaactgatctaggtcttgttttttaacaatacgaaaatttcaatattctggttactttggctgtataaaaaaaaactcttaaaaatgtgttaggttgcaatcgtggttggtggtggaaacatatttcgtggatcttcgtgggctggctgcagtggtctagaccgttcctcagctgattacattgggtaatttctgtgtttggaatattgaattgaatgaatgcagcttcaattcttggaatcattgtgtagatagacacattttacatgctttcaagttatttaccactatctagttctgttctgtacattacttatccactttggctgagagtggtctggaactctacgttttattatatcatatacatattatcatggtttattatgattcaagggcaccaggtagctcaaatggccagatgtgtggttttctgccacaaggtctaaaagtgcctcttgggttcctctgttcttatatggttagacaagggcctcatttgttttaaaaaaaaatatttatgatagaaggacaacaaagctatgcaacatatccctttgctatgcaaacatacattaatttgtctaataatagcttgttaattggaacatttaatcttataatttataaaagaatgcagctttccatagtttcttatttaaaaacaaaaacaaaaacaaaaacaaaatgcaactttcattgttggataagaatagaaaacacaggctacatacaatttactgatgcctacagaaaagaatgcattgtggattgtgattttttacttttaccgctttgcttttgctgatctattagttggtcctcgagagacactcaattttaataccaaaataattgaatgtttacgcatgtcaaaaatcccctacaagtctgatctatttcttcacttgctatttattgggcgtgtttacaggatgctagctactgtcatgaatgctatatttcttcaagcaacaatggagagcattggcatcccaactcgagtgcagactgcattcagaatgtcagaagttgcagagccttacatacgccggagggctgtgaggcatcttgagaaagggagagttgtaatttttgcagctgggactggaaatccatttttcaccacagatactgctgcagcccttcgttgtgcagaaagtatgttgggttgtgttttcagtttttagaattgtgttttcaaaagtgagaatagaaaacagttttttatcattttaaaaatttaatagtgtttgggtaatattttctaactatttttagaaactttttagtaaaaaaaaaattcaatattctacaccataccacgacatgaacccaacaccacc

SEQ ID NO: 381749 - DNA, 2469 bp, Cannabis indica
aaaaaatattaaaaatataaaatttttatcctacaagtgttatatacttacttatagtttgagttcaaatataggtatacacgtattattatggctagtgagagtgaaaataaagagttgagaattttcttcctcccatatttcatagctggccacatgattcccatggtagacatagccagactattcgccactcacggcggtgccgacgtaaccataatcacgaccgccgccaacgccgccacattccaaaactccatcgaccgtgacaagaaagccggtcagcgaatcaaaacccacctcatccctttcccttcatccgaactaggcctccctttaggagttgaaaacctaaacgacgccgtttcaccccaaatgtcaagccgcatctccaaaggcataaaaatgctccgagacccgatccgaaacctaatccgagaaagccgacccgactgcttagtcagcgacatgttctacccttggtccgctgacgtggcagtcgagataggaattccaaggctgattttccacggcagcggatattttcaattttgcgctgctttggctgagaaaactgaaagcggagaaaacgacgtcgtttccacacggggcttgccgcacacgataaagctgctgaggtcgcaagtagcggattttagtggattcgggtcttctttcatcgaagcattacaagattcgaataagaaagttatggagctattatgaacagctttaccgatttcgaatctgattacgaacatcattttcgaaacgtaatcggatcaaaatcgtggagtttaggacccatttcttactggatcaataaagatttctcagacaaaacagagagaggaagaacaacaacaacccaacttcgtgctaataataattcgatcgtaaattggttggattcgaaagaagaaaactctgttatttacgtcagtttcgggagcctgacaaggttccctacgattcagattatggaaatcgctcacggcctcgaatcttcaggtcaaaaatttatctgggtaatgaaaaagaaagagaccgaagaagaagctctgttgttgtttttagagagtttcgaggaaagaatgaagagaaaagaaatgggtttggtagtaagagaatgggcacctcaattgttgattcttgaacatccggcgatcggagctacggtgactcactgcggttggaactctgttctggaagcggtgacggcggggttgccgatggtgacgtggccactttttgcggagcagttttacaacgagaagtttttgaatgaagttgttgggattggagtgagcgtgggggttacgcgctggagcttcgattggtggcgcgtgagtgaagggacggaggcggttgtggtggggagagagaaggtggagaaggcggttaggtttgtgatgagtgagatgagtttggggatgagagagagagtgaagaagcttgagatgagtgctaaaatggctgtggacaacacttgtggtggttcttcttggtctaatttcatggctttgattcatgagcttaagtctttgaaaactcaacctatttagtttcacttctcttaatgatcactaccacctatcaatatcattgctaaaagttattttcattacattactataagatttactactaattatttctacaatttaattttttagggctcctttggtacggattgtattgtgttagattgtattgtattactattagtattatttaatacaatataatgtttggtattaacttgtattaattgattgtgtaagattataatatattttcaatacactcgatcccaacactaagtacgtgtccgggtccaggtcccgggtctggttttgggtccgggtctgggttttggattcgggtgcgggatcttggtctggggttcggtgtttgggtttgggtttggatccagggtccgagtctggatctgggtgcggatcctgaatcccaggtcccagttctgggttcgagcccgggtcccgtgtcccatgtcccgggtctaggtcccatgtcccgggtctgggtcccgggtccgggtctcgggtttaggttcgagtccaagtctcgagtacggcttgaggtcggagattagtgttgatctcaaatcctttgtaaatattataatacaaactaatacgggccatttattatgtattgtattaaaaattttggtcgtaataattaaaatccttagtgacactttatttagtcattccttagaaagttggatcactaaaaaattagaagtgattttttgtgtgacccataaaattaagttctaaactttcagtattagtctcctatgatgtggttcactaagggttcatttggtacgacgtattacaccgtattgtattgtataatattatattaaattgtattttatataatatttttatttaaaactatataatatcttagtataaattaaagtttaacatagta

SEQ ID NO: 381750 - DNA, 3610 bp, Cannabis indica
agagagagagagagagaacctgcagcatattcatcagatgggattgttgcctctccagttgtagtaactgcctttggatcgccaaccaatttcctttattgtttatgaatgaagcttcagattgaccctcagtcttagagaagcccacatgattaccagatgattctctttgatttaaatcattaactctttctatgttacgatatttactattgaatgatccatgaaaatcatcagaatgaacatttccaatgcgattaagtctacccttcgcatctgtattattttgctctgattcttcctcgttatttgagttcgaagagttgggatacctacgaggaacaaccacttcaacaggcaaatctccacatcgagtttctagtttatgaaagaattctgggtttaaatccttgtcagttaagacaggtgctttcttctttaatattacaactgccttgtctggaatactaccccctttagaattaggggatgaactattagatgaatcctttaccaatgggtctttccgctcacccttcaaatttttctcgtctttttctgctgcttcagtgggctgatgattttctttatgtccaatacaagcagaaaagaaataatacaattagatacaaggatcagatggttcgaagtacataatgaataaataaataaaatacaatgtgcctaccagaatttgaagatttcttgtcctctggagctccatcttctcctttccctgcaatctttttccacaattgcaatgcctctgtcatgctatctctgacaggttttatctgtgaagcgaaccattagaattattagctttttatcggatggtaggagatttagtcgttgcataaaactgtttggcttccaaattttcttaagcattcacagttattcaaaacatctgcaaacagacaataactaaaaacaggaaaggaaaaaaatgaatttgatgaactactaaagctcatgagagccagacatgcaaatgacacttccaacagatactataccagtcgtgttcagccatctcatttaggaatgtgcagggccattctgcttttaaaaaagatcataccttgattatagagtctagattacaaaatactcaaaatgaccagctcgtcaaaaagtatcgatgacctgctagcccaataaaacatgatagaaacattcatctataacctatagaaagggggcctttaaaccttattcttccagcagtttaaattctgataactagttttgtcacacttcagaaatataagcagcaacagaatttttttgtcagtccttggtctccaaagaaaccatagatttctgaatattatcaattgcaaaagcaactgaaaagaatttaaaattgggcaaaatatcacacacgccctataaaaataaataccttgtcaaaacgacaagcctcaagcatggtcagtgtggaaacagcgccatctgcaactaagttgcttgagtgcaatcctaaagcaatcaatgcctcggctgctgctttacgcgttgcccaatctgaactccctaggcattcatggatacattgtaacagattatccaagctctgtggagaaattgctcttacctgaaacagttatctctttagaacgtgcccatatcatgaaatatttctaatatattgttctattactatatccatactcattgtaaaagttatagaacgtgcatagagtataattctcaattatcaaacagaaaagccttgtcaaactaaggcaatacgaaagtcaaaaggcatgggcatatatgcataaagctaaggaaattaattgtaagggggaaatttggatgggtatatctgaattggagaaactttctaatgcgtgatccattatatgtattataatgttaagatgaaaaatgaatcaacagtttcaatatttggatttggcacccggctattctatcaaatccaaactatatgaacaagctcaagacttggacaaggagcgtgactataagtccataaatcactttgaacaacaacaaacctgagacaaactcgacacaacaggcaaaagtgccgctttggcctgaaagttgggactgttaagcattttgcagatcctagagcacagcttctgaaacgacaccacaggtgggtccgaagcgcactccaccatcttagccaagcacattgccgcaccagcttgcacccctttgttctgctcccccattgtttcaaacaaaggcttcacaaacaaagctaccactgaccccagacccccattatcaccattgccattttcacccttcagatactgagccgacaatgcaccgatagtctcgcgacacgcttccttgacggacgaatctgagtccttgagccttttgacaatgtgggcaatgattttggtcaagtgggctgatgtggaatcaccatgggaggcacaaacgacggcgaggagcctcagggactctttcttgacggcgggttttgggtcggaggaggcttcgtatagacaattaagaagcatcggaataccctcaggggagagagtttggatgatcttctcgaggtcttcaactgcgatttggtaagtgtcacggtcggaaagcttagagagagaagtaagaattctttgcttgagctcaaccatggcgagatgggttgagagagaagacgaagtagaagatctcatggaagaagattgctgtggagttgagcttgactggttagggggtttcgtgggttttgaagttctgggcgcaaaactcatatttaggcaaatgggcagttcactttatcacaatgcttgagtgaaaatgcagataaaataaaaaatgcagatgggtaatctctgaatcagtggctcctttgaactctttgagattgaaggaacagtgagagagaggttggagatggagtaagagtcaaggctctctataaaacaatcatttgaaaggtaaatcgaaacaaacagggaatgagatctgagaagagaatgggagggagggagtgagtgagtgaagcaaaaggagagagctttcccgtgaaaaggccaaataccaatagacacagtgctatgcagtggagcctaaaacgggccagacacttcaaccttctgcttctgatttatttatttattattaatattttaataaagctgagttttggggaaaagttgatcgtaaccgttgatttagtatgacttttgtttagatgattaatatttgaaaatgatcgtgagagatcaatcatggttaggactcaggaataggaaggaagacgacccccataaaagatgaagatgcacatcagcacatggacagaggattagacactcaaatttgaaaactaagcaaaaataaataaataaataaaatcaaaaataaaatattaacaaactaattaaattattttcgatgtgcataaaatccaattacaaaagattggatgtcatttttaaatatccaattggatcgaatcagatggtggatgaggtgtccaaaaatctaatacatccaatcgaactaattagtattttcatttagtttggatgattaattaaattttatattgttatacgtaaaatttatatgtatatatgaaaattaacataaattttttttt

SEQ ID NO: 381751 - DNA, 2467 bp, Cannabis indica
ccttcagtgtagtgtcttacctagaaatatatggaagatggaattaacacaaaatatattagcacattcaatataacaaactatgtaatgtattagcatatgttataccaatgaaatatgataaaaatgtaactagacttactacttttttccttgtactttcaatctcatctgcattacatgcacaaaacttctctttataatacctctctttataaccatgagagccaagtttgacctgtaacagaaacaagtaaaacaagttctaatcattctccaaagatagcacaaaacaaaaaaatatttcactacttattgaactttcaaataaggatgaaattgtactttgtcaatcagaaaatctccattcttgaacaagtcagatttccttcgaagattatctttcactgtttgcttaagctcctttgtattatttaaaatctgcatatcattgcaaaacatacataattatgattcaaaaaatataatctttaataaaaggagaaaactaataacttacttcagaataatcacaaggtttactttccaatgacacaattgcagaacctttagatgagggtgatccatcaactaccatagaattgttactttcagcattatacgaatcataatctgcctcatcatgtacctgtagagaaatctagtgaagataaggccaccaaatagttttgatcaaacaataatggtgttaaatttcagcctgaaggaactcacagcttgtaagcaaagttgtttaagctttcgctcgcgtaattctgatcttttcttgaaaattttctcttcatgtgtcccaaccaagagaatgaacttctcaactctagatagtttgataaaccccgctttcttatcctccacctgatttttgaacatatttagttcttgaaaatttattgcaaaaatgaatacaactaactacattgaggttaaagttgtttacccggatcatatcaacaagatagccaccaatatttttcatctctttcttataaacagccattaacaaatcaattgcaccctgttagaagtaacaattgatatgcaatgtcaaattagagcaataaaaggatttagcataaaatataattataatgcaaagtgaatagtattagtgaacctcatggattgacaaagagggtatgtgaggaagaaaatcatttccaacaaagaaacacatgaagataaagtcatctatgactcgctcaatatcgaattttaagctctcaggaggattagaaatttgcatgtcaagttccaaatactccctcaatatccaaacatgcagaaactgagaatcagatcataaaaacaattagggagatgtaaaactcataaagttgaaataatatatgtgataccaacaagaacaatcacctgatacggtttcaatctaacaatggggtatccatgtttttcttctgagtttaatacattattatgaggaaactgtttgtaactaaaatggttctgctgattttgaacaatcacatcctgtgaaaatgtgaaaatggttctgtaaactttttcatcaacatagctaaattactactttaattataatgttattgataagttttcaaagaattgtaaatttgaacctctctcaaaattgaaaaatgaatttcatgaacagccaatgccagcataatgagatcagcatcctgcataacatcatggtaaatgtaaagagaaaacaagaacatatataacataacatgagattagaatcattaattttataccaatccatataagcagtgacgagtgttgggattgtaagaagggagtttacgctgttgccttatgaaagacatgattttgtgctctccttccccaggaacattagcatcagaaagaatcacctaataatgaaaaatgacagttcaagtttatcaattctgttctttttcaacttaggagactatattatatattaacatgtgatcatagttatgtataccttaatgttcctccaccccaaatcactacttaatcgtaacttaatgtagtttttaagtgcttttgacaagtcttgcatgaactttgttccaggagtgataatgttagaatcagatagttcagtttcctgctttggaagtacttgtttgccttccatttcaaactgtctcctcactctaaactcttcctcttcctacaacatatatataaacaaataaatcatgttttgcaataacaaaacaaagtaaaaaaaaaaaaaattgagaggaaaacaaaaactcacagcaatttctctgtctttggccgtacgaaaacgcctagctcgttgctgattcatcttagctcttggagcaactccatctatacataacaactttgatcatgagaaaccataaagttacttcctttttagtgattcagtaaagggtaatgtaacaccccgatttcccgagatgtcacataggatagtccgtataaaacaatttaataa

SEQ ID NO: 381752 - DNA, 1899 bp, Cannabis indica
atgtagattttaactataaaacttcataaaaactcctatctttccttttataatttatagaataatatatatcatttattacttatttaattatgagcattaattatcaagtctcgtttatgttaacgaaattttgagtttacacacatgctttccctgtagcattgtacgatggaatgcctaaaccttgacaaaacattcatcaatatgaaactaaaaatagactttgtctctagcaaattttgacacacttaaaagatttttagttatagcaagaacatgtagcatattgttaagcacaagaggatgaataagattttgagtagataataaagaataaccaatagtttgaattgataaacctgtaccatctcgaacatatagtttcttaggtccattgtattctgatgtggtcatgatgttgttgggtctggtgtacaatggttggtggccctaaaattaggataccagttaggatcccatccaaaagtagttgttgccatgttggcttgtgtatgcattaagtttcctaaagagcttcttggactattaaaggaggatggatgtgcacttcttaagattttgtcaaacttgtaagagtaatcaagagttttgttccaatcttttggcacacttggcaccgaggcttgttattagagtaggaaaatcgacctctattgctagtgtaactgcctcaaagattgtccatgtcaggatatggaggttgatagtttaggccattgccacgaggaaatagtcttttgtagagaccaaattgaaaggaagggaaagcgaaaaactaacctcctccattattggttcttggtggcatattttgcttgaaattttgtgaagtagttccaaagttggcttcaggatattcttcattagccatagctactcgagcagtcatatctacatcttggtcaagtttttcgattcttgattcgaaagcaaggagaagagctttaatttctacaattgtgtagcttttgatttgagtattcgtggagataacaaatgtgtcataccttcttagaagccctttgaagatagatgtcatatgatcacgagtgttgagaactactccaactgaagcaatgagatttacaatttgtttcaccttgagaagatattcaatgagactcaaggagcctttcttgagattctgaggttttatgcaaaactggagaatctttgttgaaacttggagcatgaaatacttctcaagagtgagccaaatatgactagaggtgttgcaaccaaccattcgtcttagtaaacttttagacatggatgacaagagccatgaaactaggagctgatcttggacatcccaatctaaataaggaagaatgatattgtgagctacaggatctccttttgttagaaatggtggaggagttgaaccttattatagatatggctgaagacaatttcctcgaactgtcgcaagcacctgttgtttctacaaaaagtagttgtgatcatttgattttatagaaagattgtgattgaagaaaattggagattaattttcatattctctatttcacaatcgttagttcgagaattctataatatagatttgttgggtttgaggtatttgaatttggaggattagtaagattggtagagtttattacggtattagccatcaatagcagaaatcttactttgataccatattaaatcttctcgacatgtttagttaataagaaagtgaaagaaaataaaagaatgaagacaaagaaaagttttacttattagaatatttctatttaaagaaataaaatagataattgattttgtgataaatgaatattttatattcattgaatctagacaaaattaattacgtaatattctatatatggtcagatttctatattcattacc

SEQ ID NO: 381753 - DNA, 891 bp, Cannabis indica
cccctacctcataataatgtttaccttataatgggaaaccaatttgacaagtgaatatagtttgaggttgtaaactattttttttgtcttttagttcaaactttatccaataatgttgcacatgctaatcataatcaattgtgtatttagtgcaggattaagtttaattaactaattatttaattataatttgatggactatgatctgtgtttatggattataattaactgatctaaaacagtgggctgccttgcccgaaaccgggatggggttatacaacacacaataccactcttataaatatatgagatgagactatgagagttttgttttattactttattaaattttaattaactcatcactactgacactgagttcgaaacatgtttagacttaattaaatggttcactattgatcatatataacttaattaataatattaagaagattattcaatattattcacaatcacttcaagaatcaacgccatcatcaattgatatgacaattaatattggacctatttaattggtataaattcaacaatatgtgctaataagaattattcaaaaacaacccagcaatgaaaccatgttaattggtgattaaaatacatccctatttaaatttagaacattgttattataacacgtttattacataatatttagaatgataataaattattagagaattataacagaataaataataaaaaaaaaaatcaaaatcaatatttataatatgttgtttattaaaattatttgaaaattgaataataatatataatttatcttgtttactttatttataaacataatcagaatgcttaaattgatatctttaaagaacaaaattgtcattacatatttaatagggtaaatac

SEQ ID NO: 381754 - DNA, 2903 bp, Cannabis indica
aattaaaaatctcccaaaaaacaatccttccaaactatgaaggattgagtaataatgatcctaatctttctacaattttctttttatccttgaaaataaaatataaaagagaaattaccccatatattgttttttaatatttttttctcaaatttacgatttaaatttctaaagtagattctatgtaagttgctatactgttttttgttgcggtttaagttgcaacgctagttgcgattaatttctatatagaattttgtaaaaataataataataaaaaactattttaaagtttaaaaataaaaaaatcccaacataaaagtataagtatcatggataatataggaaatatgttaataaatattttaaaagattatttttatattttagaatttatatccttacttccagcttaccaaataattttaaggtgccaacccaatccattccctcctatgtttccatgggccatatacaatccatccttaactcattccattcttcttaccaaacaaaggtttatagggtaagaaaattacaaaccttagaatcatcaacaaaaggagcacaaattagcaatgattttcatttgatttaaataggcctctcctttaatctgataaaatcagtacaagtaaaactctgaaaaattcatccaactagctacatactatgccttgtttacacgaattggctgaccttccaataactgcaataataaacaaacgagccttagacaaataagctaaatgaagcaacgattaagttaaataacaatgacaaatcaactgctcaaaagctgctgtatcactaagaaaactgtctattggctataaaaaaacagctgacattccaattttagtatcacagatcaccctatgaacgaaaaggaagatatatatactcataagaatcaggaactatcagtaggaacatcaatccataaacagtgatagcctgtcataggatggaaatattatcttggaaaattttcaaaacatcacatgcaaccacttctgtaccttccaaaaactaagcagcataagcaaacgaagctgataatagacaaactagatcgacagcatcataatcctgtttaccaaaattaagggttggcacatcttaaattttacattttagatatactttaggctataacctcaaaaacagtgaaggttcctgcatgtgtattattatgttttacagtactgtatgaagttattagaaccattttaagagcaaacaaatactagaaatggaaagaatgcaatcttgtctgcccaaccaagagactgccaacctgttatatccatttccattaaaaaaaaaaacctattatatccatgtaattgtttatctgtcaaaacatccatactatcacgtcacaaaaagatttcaatacccagtatagcagagaacactgaaacttacagaattgttaaatgaagagatagcagcttccacatcctcctctgatgagaaagttacaaacccgaatcttgtggactttgaggtccctggaacccgagaaaccttcgcactaagaacagttaacttctcagagaaaaagttcttaagagtttcagtagtaacagctttcgctatatttccaacataaaccttgtgaggactatcaacgaattgggaatcctcagcctggagaagtgacatgtcaactttcgacagaggtttctcggttatgtttactttgatttcccgtccaccaatctcctgttatcaaaaatcactacagattaattaacaaagaaataaactgcattagggaatcttttgagttagttcatttaaacttacagttccattcagtttttcaacagctgcattcgcatcctcaaccgtcttcatcgtcgcaaatgcaaacctccggctcctaccagaatacttatcgtacataacctatgaacaaaagagaagaacataaatttcactaaaacaattaagacaagtgtatttattcactaaaatcttctgaattgttgggtaggtcctagaatcgatcctcagacctcaactaaaatttccaaagctactctgcttaccaataatttcatgatgcttttgagatcgaaaagagacaactcttattgttaccaagtaaatgaagtttgaagcatagaaatttggaaaattttgctagcatccaaatcaatcaacttggacaattcaactaagcattacattgtaattggtctcctaattcacgaattaattctatttcatattcccagaaacaacaacaaagaaaaaagtgcaattagcatagatttcagaaaagttttgctaacgtccaacatcaatgaacttcaacaattcaactaaacattacattgtaaataattctcctgattaaggaattaattctattttacattcctagaaacaacattagaggaggaaaaaaaaagtgtacctcgaccttctctacagcaccatgttcttcaacaattttagtgagctcatcgtccttgaggttcctgggaatgttgccgatgtaaagtcttcgggcggcctcggaagatgtatcaacggaggttgcttctgcgacggcgaacagtctttgggagtgcctaggagaaggagctataatgagataagaggaagtgagtatgtgaggatgagatgttagggttggcttgagaatttggagagagagtttgggtgaagctttgagaatattgacggagtggtggaagaaattcggtggtgacgaaatggatgagattgaagccattgttgggcgggtgagagagagtgtacccagaacttaacagaaggggttttagaagaaagagttcagaaatatgggaatggatacaatttgggtttatcacattatccaacaatttttatattattattttattttttatagtaaaataatt

SEQ ID NO: 381755 - DNA, 3977 bp, Cannabis indica
gctttttaatgacacttgtatatgatttactttgaattttcccaatgccatgttgtaactggcaagtggctggcccagctttaactggctgctgcttattttgcccatcaaaactatatagttaagccttgaaaagagatgatttttatgcaaactgagcagggaccattttagccttgaaaagggttggttaaaagtaactgactaggacaatttagtctcgaaaagggacgattttcatgctaactgataaggactattttagccttgcaaaagggatgatttttatgctgattcattaggcttgaggtctgtccgtccaatgagacgaattaaattttagccacatatttttggcttcggtggctcatttgctctcattggttgattgaagtgttcaattcagtttctaagttacaccatgtttcttgttgaccatgcacatatcaaacaatcaaatttaaccatatcagttaatcagataaatttaagaagtaaattaaattaaccatgtctggactccaaattttagtctaaaattatgtaaatttaatcttggtatgaataatctttgttgcgggaatatgtaattttcttggattgatattttttttttccaccatcttaggtcaagcatttcaagaagctgttacagaaagcagacgataattcttgccctgtttacgagatgccttcgagttctgttgaatcaatgcattcaatttatacttctggtaatttcttatcttatatgtctttgtttacatacctagatgataatggtgttcaattacaattacacttggaaatagaaaatcttattcttttcttgcttcgagtccgaaccagacaagaactagctcaagatacttctgcatttcctatagatttaaaatacatcctttaccagaatttgaactatttattgtttttgccaactgcagctctcgaaaaattgaaagagacagttgagacagaagcatcacagaagcgcaaagttgggttcaagtatttgagagcagcggtgaaaacaaacgaaacacattcttccaaggaataacttattaacaatcaaagttttgctcgtacgacagatctatgcgggttatgatactagagttttggccctttgaattaaaatggatgagtgttgaagtctgaaaaaaatagaagatgtcttccactcatcatggtttcggtatgatttatacatattttatgtgcacttttatgtttccttagccttctaactaatctcaatctaaaccataaatgatcaatcttgatatacttttggtatgtctaatagtcaaattatttgtttctgtaaagtataagcaaaacactaatatgagaaaagtgaattgagagaaaaaccagcacaattccatattccattctctattgctaagtacagaatcctatgctgcaacctatgttccaacttggtgtgtctcaccgagttggaacgatggcgcagaacttagacaagacacaaaagaaaagggagatagagaatttacatgtggagcaactctactacactaatattccaatagttgttcaagacaactatggaaccaatacaacactaagcccttgtattgtcatgccataataaattgtgttatgttgtatgatattgttctttaccaacaaaaaaaagagtaatcaaccccatacaacaaaattcatcacaacatgccaacccaaccaaaagaagaagtacatgaaaactccacaagttttatttttctcatggaagatttattcagtgctcgaagattgagaacatcgggacatccttgagaaagtactttgaactcatgctgccgccgctgctgctgctacaactacgagctctagaactagcgcttgtagcggtggaagtagaagtcgaaggagaagcagaagaggatgaaaaggcaacctttgagtcattgccgcaaacatctctctcttcttccttaatggtgtcaagaactttggtagttctgtgcctcatgactgtcacgaattgtggtggtgcaacctcggtgatgaaccttgctatgcgagcattcgccattgttgagagctcgaaaatagacaaataaaataagaagttggaaacaaaggaatgtgagagaagagaggatgtggttatgaagatttggttgtggatgagaaagaatgaaccaaaggaggagaatttatagagctagaatttctttcattgcattgactgaagaatagtacatgagtctcaatcaaagatttaaagctagtgccccctaatttgctttagacattaaatggttaacaatttaagtttgtaaaacattaatggataatgtcaaggaaagaagggttatgtgtcaagatttggatggaaaaatgggttatcattagtgatatggtttttgtttggttcactatagcctacaaattttcacttttctaagctcattgtatgtggggaccaccaaaaaggtaagcctcagctggaatgccacgtatcacttggatgtggggtttgataggactagctcattaaatctctatatattaattacatacacataatatgcatttatgtacatgttaatttgagatattagtaatttctttaatagaggttgtgactagtaagagttcctcttgaaaaaatcctttggaaaatatagtttttattacctatatttaaaattcactcaagatttttttcaattatggctcaagattttcttaagtttattttttaattttaatttaaaaatgatttttgcgtttcatattaaacttagggaaagattgtggtagatctttctttcttttttacttttgaaaaatgatatattaatagttatatgataatttatattgtagttataaattgtatatttgaaccataattccaatatctttaaatatttatttgttttttttttaaagaaaaaattttaagagattttttataactaaaatggacaccatttatatatacacactaagtattagtgtatatttgtttagagatgtattagagtttctattacttaattattaatttaaataataattgtttaccgaaatttttaataataaattgagctttaaaaataaaagaaataaataaagtagacaatttttttacgtggttcaagcactaatgttttttagttcacgagtcagtatattgatcttagaaggcttgtataatgtatattacaatggtatttacagtagaaaactctaactttgttctcttggtttctcttgaagaagaagaaagcttaaagagattttgacagagattcagctatcctcttttcgatcccttcctttgtgtgaaagtaaaagggtatttataggcagaagtacgggcatgggcatacccatgacccatttagggtttctacaaaaagcccactattggggtaaaatacactaaatatctgactattgggcccccaagattattctttctcgtgtggcgaatcgtccgtacagtgaagaccattgttggtgcatgagacgtgtcgggtaaaggcttgcccttggtggacaaaatgctcaaaggagccagtggacaaagtagagtattcagagggtggtgcgcgcactaccatggcctgatacataggacaagatctttgtgttagacaagaataactgtcataagccatccagctatcacctcgcatgtggctttcggttttcttcgtgcacttagttaccgtattaggctcttcgcatgactctctagcatctgcctgcacttatagataaattgatcttcttcgggtcccagagcaatgataaggcttcctgattctggatggtcatttgctttgcaacaaacctttgtgcttttctctggtcagacttttctcgagctatcatagcctctccacgatcttctgcaattaagaagacttaatcggtgatcgtttagattgttgccttctattttttgtcacgtatccttcatccag

SEQ ID NO: 381756 - DNA, 1179 bp, Cannabis indica
ctgaggcgagctcaagaagactaccccatcaactcagggggaacctctataaattactgtgtttgattctcttcttccctaactatcatctgcataatatttttcactcatcctttgaactttgcatgcatattcgaagaaaaccctagaaactaagcaagaaaaacctgatcaatttttattgtttggtttttggtaaagttaaatgttttaattgaatgcactgtgtcaaaagttggtgtgtgatacgtggacagcttgtgtccacttgctgaattggtaaaggtcaagattgaccttgagtttgtgtgtgtgagttgactttgtgtagggataagactgtaaaatcccaacacatacattatagtgtccacaaaaatgctcatatgtctcaatattgatagtgaattcaagataatgatttcttcgtcttcgttctctatcttgatatcgatgttctctagatcaaaaactatcttattgaattcatctagatgatcttcaatcattcttccttgtgtcaacttgaatgaatataatttctgcttcaagaacaatcggctggccaatgatttggtcatatacaagctctctaacttcttccaaagacctgctgcacttttctcctttgagacccctcacaacaccttatcccccaaactcaaaatgatagcactatgagttttatccaagatctctgtcttttccatctcagttaaagttgctggtaatttattttctcctagcaatgcagcttggatttcttgctgaaccaacaatggccgcatcttactcaccatagcccaaaattattcttaacaataaatttttaatgttgaacttcgttattccaatgatgacaaactttcaccatgatcttgaaatgttcttcaagattgtcaccttttgaatagtctctgccaagctctgatactacttgttgagttcaactgtgatacccagaattatgagaaaggattagcaaaaccctaactaaataattatgtataattgaggaattatattattatatagttcaatatatgtgaagttatatgacttttaatatgttaagaccccgttggtgagttaggggcattttggtaattatgacccgagaagggtaaaattgtgaatttaatttaattacgtgcttaatagaactatattattatatag

SEQ ID NO: 381757 - DNA, 3205 bp, Cannabis indica
ccacttttctttgagatagaactgctgctaatgccattactcagcaacacaaactctgataatcttcgaagttgaaatagttgatgcagtccatgtggcatgttagtcaaagaataacatgactcattttcaagatttcttagccttcttaacttggtaatgcttctaggcaatgattggagattactgcaatgattgagtttcaaagtctgcagttttcttaacatacaaatagaacttggcaataacttgatattcacattttgagaaagatcaagataatggagattcttcaactcaccaatagaatttggtaagactttaattccagaattatgcaaatccaacatccttaaccacttgagtttcagaatcacatcacagattgactcacttgatcttccatcaatttcccatcgaaattgcctaggcaaaatcaaactctgaatctgtttcgatttagctaatgaaattggaatctgccaggatgaatctaaatgaaaatcgaacgacacgtggcgaagatgatgatgtttgctgtcaaacttgtcctcctttaaacctaaggtagcacaatcattctcagccacttttcttgcaagatcatgcattaaattctgcaacttgcattgttttatgtttcccaactcatctttcttagtttcttgaaagaaagatcttcttagtaaatccataaaatactcatatcctaatttctcaacatcttgtctccattcaataaacccctgagacatccacaaagatatgagtgtgtccacatcaaattcataatctttaggaaaaagtgcacagtaaccaaaacatttcttcaatggagttggcaaatgatcatagctcaaatgaagagttgctaaaacatctgattctttttctattacctttgaaagctccttatcatagaaagattgccattctgttttaggatctttagaaaacattatgcttcctattgtccttatgatgagtggaactcccccacactttttcacaatagcttttccaattttgataatttcagggtctgttggatgctctctttgcacaaaagccactttcaggaatagtaaccaagacttttcttcatcaagtatctgcaactcatgttgatgcttcatacctgtaatttctgcaactcttttactatgtgtagttacaataattctgctcccatatgcaccatctgataacaagtatattaactcattccatttgagttcatcttcattccacaaatcatcaagaacgagtagataccgcttttctcttatttcttggcgaagtagaattacagattgctcaaagccaagttcttcaaagtaattacttgttatggattgagtaatcctttctacaattgcttttacatcaaaggcatcagttacacacacccagatcttgagatcgaaatggcattcgattttcttgtcattgaagatgagttgggcaagtgttgtttttcctaatccaccactccccacaatatggatgaccattactttttcatgattctctttcaacagctctgctatgatttcttgtttctcttcatctctcccaacaaccatatcttgaggtacaaaagactgagtttgcctccaccccgaattcgcaactctgatctcttgagcatttggaaaaaccagacctttatacctcttaacctcttcattaatcatttctacatcattgaatttcacccatggaagaaggttgtaaacatcataacgcagaataagcgagattacacgtagtgataaaggaactccttcacatttcgcaacaatctctcttcctattacctccaattttcccaaatccttctcatctttatctaacaaagcttgtctttgaaaacccaagaatctcttcactcaaacaatccaaactgtaagacttaacagaaccagaaccagttcgccttattaagtcgtaaaccttttcactacaagtggttaataaaacacaagtacctttagcacaaccctttaacatgtcttttaagccaacccaattaagaggaatctcatcaaccatatcatccatcacaatcaagcatctttttccacttattgctcttcttaattccttctgcaatcgatccattggaggattacaattataagttggtacaccttcaccttcaacaagtctcatgacaatctttgtactattacagttagcatcatcacccatgaaaacccatctataaagctcaaacttttcttgaatctgatcatcattataaacaatccgagcaagtgttgtttttcctattcctggaacacccataacaagaatcaccctaaaaatcatcatcatcatcatcatctagtacaagtttgattatctctgttttgtcatcatttctccctataatatcctcttctttacaatgatctaaatactgagtttcgtgaagtttatgaaacgtttcatgatttcttatttttataacaatctcatgaactgttgctgtgactgccttgaacaagtcgagtttgtaatcgtgattgaaatgaaatgggcttgaacttaaggaggagaatgagaagaaagtgagaacctttttggatgaagacattattttatcacgtttactacaacccaccacaacctgcatttccactaccaaattcatgatacgtgcaagtggggtttcaaggctgagaagtaatctttcaaaatcatggctttgaacccataagagagcttcttcacgaagtagagcttggacaaaagaaacatcttttttcagacgtgacaactcttctgcaacaacagcaacagtgcccttctgcaatgttaacacctcaaagtttaagagatgcaaatgaagcaattcatctgcaagggacaacaagtatccatgatgagccatgataaaatagcattaattgctttgttattgatacttagcaattcatatatgagaagctaagacaatagctactagctagctatttcctccaaagtgttcccttcactagttaatgagaaatgctaaagggcaccagtgtggtgcctagcaccctcttatgtgttaatatcgctattggtcaaactaagtatcgagtcccacataatttaatataatagcttttaagaagtatcgctagccaatcgcaacgtgacatgtcgagaaggtgctaggcaccactggtattatattatttatttaattaaa

SEQ ID NO: 381758 - DNA, 2110 bp, Cannabis indica
atatcattaatattaggcgaccaaaaaaaaatttgccacatttacacttatgtacactgtgccagtccaccttgacacttaacaaaccaaaatagatagaatagtggagaccaaaacgtaactagagtttggacagttctacctaaaaattcagtaatagaggttgatcgtgccaaacttaaaaatttaggaagtttgatcttaaattatcttaatatttttatttaataccacaaatacaattaattaaattcatgaaatagtttctaaaaaccctaatagaattttatattaggcttaactaaaaatattctttaactcataagaatatcggaaattttcatctttaagaataatacaaccatacttatcataggagaagttagtgttgaataaatctattatgaaattttaacaaaaactaagaattatctctacaaatggcactagaggtacaaaaggaaatcaaggaacataatacaaaaattaaaaaaagagtttactgtatgtattttttttttttttttttattttatacccgtgctgaagttgtaaattattcattgtaacatttgcattaaacaatttttttaaaaaaatattaaaagtactcaataaaagagaattacatgatgcagatctcttccctactcttcgatggcttaaacagaaatgaatattttgtgttatattagaagaaaaaaattcactaccagaaagaaaaaaagaataggaatctatctatgaaaccggtaaaaataccataggcaccgcaaccattaaatccgaggagagtaataaaaacttttttactcacaaaaaaaattaattaaattcaaatataaacatttcaaaataattacatctaaaaaattatgtatcaaagtgatacctttaaaaatgtaatttcaactaagaaaaaaaaaagttgatgccaaaattttgtgttaagtgagcatggaaagtatatacatatgtacatatgcatatttacaaacatgattattgaccatccattgtttttgtttttgtttttgtttttgcctttttggctttggttttgattttttctttggcagcatgggctgttgacacgtggaatcttggcgcaagagccttaggatagcctgtttttctttcaaatgctcttacacaaagtgaccctgcaaatgcaatgccaatagtaataatacatgaacattttgggttttgatgaatgcaaatttagtaacttaaaagagtttaggaatatgaaattacaaacctcgccagaaacaatgctgaatttcttcagttgttaagcctgtattcacagagattttgttaataaaataacttttttaaactcgtatacacatgcacaaacattttggtttaaaacttgacctaaaatgttgaaaatcccgagcgggattacaacaagagttgagtttgcgaattcgaattattagatcttagcaatagcactcacaatagcttctctaaagtaaagaagctttaaaatttttaaagaaccgtattaaaaacaagctacagcaaatgctctaaatttcttcttcattttaaagttttgttaaaatacactattcatgctctatatttatagaatattgttcatttttctaaatatattttattaatgattttcgtatagggatatgtatatatattaatattatatatttgaaatgaataaaatataataaattttttaaaaaataagattttgataatgtattttaaaaaattaatgtatgttgtaacgtaaagtgtgttgtaaaataaaaaaagtaaaaattgttgggagtgctttaagtagtatacatatttttaaaaaatttcaaatgaaaactaagaattacctctaaaaattgtattggtcgaggtaccaaaataaaccaatcttctacgtaaattccacaaccatgacctaggaacatcaattggatattcactagattcatgatcagcaaacacctacaagaataaagacatgtagttagtaaaagttccaaaatatatttccaggaccggtcttaggcataggcgggttaggcccgcgtctagggcctactcattttagggggcccacataaaaaaaattatcttt

SEQ ID NO: 381759 - DNA, 767 bp, Cannabis indica
atttttaaaaaattctgaatatataatttacagtgccgaatataaaatttataaagttacttactacacgtataatacttacaagtttttgacattgtaaactattcagaattttttaaaaatttacaaatgatcctaaatagttaaaacatacacgatcataaaaaaagactaaaagactcttttaaataccaaaagagacaatgggttaaccgaaagacttaccctatatcttttaatctacccttatcttgattagccttaatttgtttattacacattatatataggctatttaattaggatttttgtcactcaaactatgatatatgcattattctgcctttgaacttttcagccgttataaatggtacttgaattattcacagtattgtatattggttaatatgtcaagttttgttaaacatgataaataaattgttcatgacatagctgtttagctaattgttacatcaacaccacttgtataatttaacattaaaaagataaaaataatgcatttttaaaagaatcattaaattaaaaatcaatcaatgtttaataaaattacataaaactaaatttaaaaaacataaattatttttttcaaattaattacacacgtagtattaacatggcactaacgcggcaactggcttaacaatcatatcattaatttgtttgccacatgtgttgaccgaggttttcggcaactaatataataataataattaagaaagctttaaggaattaagagagagattttt

SEQ ID NO: 381760 - DNA, 558 bp, Cannabis indica
tttttccatattaataaggatatttttcattccatttatatttcatcacatcaccacttcaatgagtggactggaatgtctgtcctttgctagacatatttaatttcttattaatatacatatacataatccaaacataaatatcaatatatttacatatttacactaacggatgatgataaggtgatagaaaatatttttcattataagttgggtggggttatgtcattagtcacaaattttttgaaagaatatgattaactaaaaaaacgtgtgtaccatagtagtgataatttcttgtggtttcgttactcttcaggtgggagacgtatcttatcaaaactgtcgtctctatattatagctagagcaatttggtgaaatacatcttcttttcaaaaatgagaaaactaaaaaaataaaacttatggtgctagttaaaaatgatgtcaaattttagacatactgaaaattatgataatttgtttaggaaaaacaaatatatgttattttagaagtaggattaattactcttttttttttttgtaattatatatgtt

SEQ ID NO: 381761 - DNA, 1525 bp, Cannabis indica
ggaatcaaaggctagagatcttgaacagaaggagtcattatattccgctgcaataaatgtaaggttttgttaaaccctttatattttttatttatttttttttagagaattcatatttaggatgttaattcaacatacttgttagtaaatctaaatcctggtaaaacattcccaacaagtctgcccaagaatgttggacctagttgattatacggtcgtagccggcctaagtgttgaagtctttgtaagactagtggtggaacgaattgaggtccaatgactctatttttagaaaatgggttgaacagaggtttaaaaagatttggaccaccactcaaagagctcttgcatccaccactagaggcgatggggagggagaaatttttctagagaatagagagctctggcttggaaattcaaaaatggaggttttaaaagtctgagatagtgaaagagaagaaagggattaagaaaatccttttatacctcagtcaggagttttttttttttttttgtatgaatcaggaaatgtattggctcaaaaactttgtttacaacctaatagcaaccaaggagggcctaaactaatcaactatacaattatattctatacaacttttaaaaaaaaatacaatgctaaattacaatgtaaaaaaccatgctttatcttcattcttgatctttttttggccagaatagttttattctttggattacaccagctttgatctctttgcacaacttagtcgtatcctgctgctctttctcccataaaaaactgttcctcatcctccataggtggtaaactagacttgcaatagcagctgcaagaaccaatttcctgtagctactaattttggctcttccaatccatcgaataaggttggacatagtattacttgaagtattccagtgtaaccatgctttgatatcctccaaacaatgctgagaaactgtacattcaaagaaaatatgcagttgattcattttggtgctgcaaagcagacaagtctgctccttaataatccccatctttagcagcctatcttttattttgagctcctgctgtatagccagccatagcaagaagctatgctttggtgtgtttaacattccccatacttgcttactccattgagccttagtttgggttggacagaatagattgtatccttgggatacattgatttgtgctgcaacaccatatggccattcaaggcatctttgaactgatccttgagtttgactaagcatccccaataccacctaacttgatttgctaccttgtaactccaccagtcagtattgtgtagatagacactgttgatccatctcaaccaaaggatatctttattatttgccacaaaccacacatatttccccattgcaaccttgttcaaagatgcaatttttttttgaaacctatacctcctactgacttcggttgacaaatagcttcccaagcaatggcccatggccctttgttgtcgagtgaatttcgcaacaccaaaatgtattatttaat

SEQ ID NO: 381762 - DNA, 3803 bp, Cannabis indica
atgagagattcatctctcggtcaactttaaacatcaccaccctctctctatgtatgctttttttgtttgtgtggagctcctacatacatacatgacaattcaattaagctttcaaacaaaaacaatgagtccatcttacatattcatatactcaactcacacaacatcacttacctcaaacaccatttacatcatgtacgagaacccaagatacctgtgataaatttagaagaaatgagccaattttgtactgtaaaattctgagcacaaactaaccactcaaaattttcatatagggaaataccttttttatgacatgaagtggattgtgtaacaccaacactataattcaataaagtaaatcaaatgcattatcttgtaagattatgtaataacaacacttaccttggaagattatgacaaggaaaaaagtgatggtgatgatcattgcaaggacattaacgtttgaagatggtgtcttattggcttttagtttcttcaaagccttggttttttctctactattacgcctcgcccttgaatgttcccaaatttccttgaccaacttcaaatcagcttcatctaatgaaggaccaccgggaggcctaggaggttttggatacttttttttactactatatttcttattcacttttttcttatcaacaaaattatctcctcctcctacctttccttcaaccccattaaccaatatatccaaatcatcatcattatcaccaccaatggagctcaaacacacattgttcttgcttgtgcctaatagcaacaatccatccgtacttcctcttcttcctattgttctaaatttgcccaaattcccactccgcaacttactcaacattttcttctgatttttgcaatctgaatctgaatctcgatcgtggttgtagttgtggtcgtgtttttgttcttcacttgtggatgtcatagcctcaccaccattttctaagtcaataatatcagtgccattttctttgttatgagaccccatttcatgtatttgcaccaaatttaatgtggacagaaaatttcagctatcccattacagaaaataaagggttctattaggtgacaatgttaaaggggaataaatccattaaggacacaaacacaaaggaggaaaaaagacaaggcaaggtgttgaaatgtaatgttttcatcaatatatgacttctacgtgttctttctcttgttcttacctgtaattgaaaaataaaaataaaaatcaatcaattactaaaaagatcaatacaaaaacaagattttcataataattccattttaattgtaatttgccaatttccaagaaaataaaaataaaatgagaaaccaaatagacacaatgagatatggaatcgtaatgtaccttttctgcaaaaatataattggaagagaagaaaggagtaaatatgtaatgcccaatggaaaaagtctagatcacaaagatgatatacaaatattaggttgtttggtgaaatatagaaaaatttttctttctttcttttgttttaaataatgaaagtattggtaattttgattgcttctaaaatttcacattgagggaatcaatgatcaattgacattagcacaacaatatatttaagacttgcattaacaaatttccaatgtaatacttaaaataggttacattgacgaaatctcaagtaaagaatacataggagatttggaaattcaacataaccaatcacaaaacaaccaaaacgacacataactcaaccccaacaaaactaaaactacttagtgaaaatagacacaaaacgacaacaacctatttatagctttatatactcaatcatactcattactcaacagtcaatagtttgttccattcccaaacacgaaatattgaactttcatttcctccctagaaaacactctttaatcccatctcaattgaaacaatgaattggatttttgaagtcttaaccaagccacctttgggaaatccaaacattacaaaatctggggcttctttagcactcgactggagcaccccaaatattcaaaactcaccatagtaggaggccccaaacccaagaagcagatagtttgtttagccatgaagtttttaaagctctatgaaattgattcacctttctgcataggaacttacattggacttggtgtaatttgacaatttgattgagacaatatcaacgcaataatataagatttctaaaaataaaaaccaattatactcaaaataggttccattaacataatcttaatatagaaactttcaaccacaaaaacacaaccaaaacaatacttaactaaaacccaagagcttctgtatgtagctaaagcaaacccaagagcttgtgaccgatcaggaaataatgataaacaccatagataacttgtttcatctcctccttagaaaatgcaataacatgttggctcagaacaagggacgtatttggtttaacatcacaaccaacttcagcacccaacttttccaattcaaaacaattaaaaaggtgggacttcttcagcactcgagctgccaaatgctccaaacccacctcagtcttgcatttaattcctctatctcctactataatagtatttgtattagcagagcccgttaatcccacgaagcagatagattcgtcatccataaagttgagaaagctttctggagtcttcctataatataatatacggaaatcaatcatcaggcattgactccctgaacagagtagcaaccattctcctgtactaccacgtgttcttttgggtccaatgtcaatgcccacaagacgtctctgtgtgcctatgtagtttctaaactcggctatcttctcattaagtaaaccagcgtggtctatcaagttcaccttcaccgtaactccaccaaattgaatttggtagcaacctatttttgaaaggagagccgttggtatcattttggataattttctcttaatttggttgatcaagtccacatacaatacactctatttatatgcatatatgcgatttggttaataagtaaatattcataaatttacaatcaatagaaacgttatgtgatcactactgtcctttgggatattttgattattatgaatttatgatcatgaatgatgacacgatatgaaacgataggtcatctcggctcggctctgctgttattttattaggaataaacaaacagttataagtaaaataattaagtcacagccgatatcgtatcaaaccatcccatttcttacttctttcctttgtgtttagaatcatgtgtttccatctcaaaaccaattggtaatgagtggagtagcccatgttcttatatatggctaaatacttttacatttaatccatgtgggacaatattttccaataccttattatgtcgtttctcttttgacattggtattaattactacttgttaacataaatttttattaattaataataataataaatgataagaggatatttaacgtagatttttgttagattaataatccccacgttttatatttacatcacatagaataatgacaaataacttttcataactattcttttaactttatctataaccagttatgctgactatgctccatccttctcgcaataaaaattctccttaagatgctttatcatagttcagcgcttaagtatacgtcaagtagtatttctcgcattcttctattagtattgagtgaggcatacgcgagacgcttatcaccatatgacaattgtgaggtgaaccattttttagtctttcaacatactcatgaatatgtgg

SEQ ID NO: 381763 - DNA, 2059 bp, Cannabis indica
tgagtgtgtgagagagagagagaagtggtaattttgaaggcatatatagggagaatgtgtggccttgtgaggataattgctggcctgcaaaaaagcactttggccaaatcaaagtggagacaaattatgttactgttcttgaaatgttatttattagaaaaaaaaaaaaagcaaattcttactttctttcgctttatgtataagtttattattttgctaatttactttatgtattgttattgtaaaagattcccaattgagcatgttctgatatgagtcacttcctctatgtgtcttcttggtctgattttcttgagcctcaaagtactactatttactcatcaaaaacccaaaactgaaaatttgaaacatcttttccaccctttatttcttttccatatttatgtactctttttctttcttcttcttattcttttagtaatgtggataaatatatatagaacactataaatattagttcctatgcatataataaaatgacatgttatcatagaattaagaccaaagaggatgttactaaaatgaaactattacaagtagtggaatcttatgtggcctagtatagccaaaacgcttggcttttaggaataagaaaaaaaaacccaaacccagtaattttgcggtgtaattaaaacaaaaagataaactaaaaggaatatatataaatatatatataagaaacaacaaaacaaaattatttcacccactaaatagaaaaagaaaaaaagaaaagaaaattgacagccaggattaatccatagaaatgaataataaggaggcaaattttgtaataagaatgacaaaattagagcttttaaatcaaccttttaactcctttgtccaatgacttttatgtttgacctctgataaagtctctccctcatgaaccagccttttgttccacacttttttctctttaagtgctgtaatccaaacaaagttttaatttaatttttattaaaaagtaaagtataacgtctagctagtaaaagagaagaacgcaaatacaatttaaggaaaaataaataaaagaaaaaaagaagaataagaagaagctataagggtatgctagctgagattcgaatcgttatagcaccagcaaacaaatttcaaacccacaaagataaaaagttcacagtgtttcatgtcttttgttttctgctatataaaaatctttttagatcatacaaagtaattttgcatattcatccaaaaagaaattgaatcttattactttttacaattttccattagtgtacaaacacaacttttttctactaaaacaagttaaaaaccaatgtcaaacattgttgatgtgtactaattaaacagctaataacaacgttattactacaattgaaaatttgtggatggcccccactataataagtgtcatcatgatcatgatttagtgttcaaaaagaatattttctcatatgcctcatgtttggggttggggtaaagataaatcgtcaatatatatgtagtgtagtcactagtgagggacctatatgagactcaacaggaaaaaagaaagtgcctttctttcactatggccggtttggttctgaaagttcagataccatcattacattaagaaagtgggttgacactattctttttgaaaagtataaatatttgtttatatacatgggcattgccatagcaaaagtgactttgtaatgcctaaggaaaattaaagagtgtacagtctttgtaggtctagctttcaggtaggatatttgggccaaattatgaggccattcatatggtatataagccatacccaattcaacattgggattttggactcaaccaaattgttcatgtgtggatataatttgacgcccgcccacctttcataactatccctagttttgcaaaccctctaagtttaactcaattattatgctcattcaagaaaagaagaaaaaaaaagggacaaaaatgcaaacccagaaaacccaaccaatttgctaaagaaaattaacaaaaatgtggaaaaaaattgtaaagtccttttttggcaagttaggtg

SEQ ID NO: 381764 - DNA, 8007 bp, Cannabis indica
tttttttttctcttttcttagcttctcgtcacttttttaatatgcaggcagaaatgaagggaaagcgatacttatgccggactgctgctagttttgtatcttcgcgtgttggaattgtctcaaaagctccaattttgcccaaggatataggaattaacaagcaaaggaatggtggtctcatagttgtgggatcatatgtcccaaaaaccacgaaacaggttggactagcaatctgttgatttctaatgcctgccttcatgtatgctattttcattatttcctaattgtgtcaaccttgaacacaggttgaagagcttaaattacaatgtgaccagagtttaagaagtattgaggtgatctacttacctacttacctaatatttagatatatttttgttgatgtttaatatacagctcagaaattattgttacagttttatctaaggctgtttgtgatgcaataatcaaatgattgaatgtgtcattggactgaccaaaatgagtttcttgtccttgaatgaattatttaaatttacaaactttccgacttcttgaagtttaatttctgagagaatttatattactctacctttttgaaggacctattagtatcattttcttagaaagggatgaaaaagatatggaatgttaaccatatatgaatggactgacagtcatttcatacatataatatgctgcgcatctgtggttgaactgataatgggatatcaggattgaatttggtttcatattcttttcaccttctgtacatacaaaatctgaaaatgacctgtctttgtccataggtgtctgtggctaaacttgctatgggatccacagaagagagggctgaggaaatcattagagcagctgagatggcagatgcttacctaaggtgtcgcaaggatacccttataatgaccagtagagagcttatcactggaaaaagttagtctctcttattttttatttttcttttctctttttctttgatatcatgtagttctttttatagtaatgaatcatatgcaaaagagcttcttcaacttgtttaactgttagccaattaatatttttttgaaaaatatgaatgtttaggataaatattatactaatggatctaattcatgagagcatcatcaactttctttttcttaatcacttgactttttactagaaaataacatggactactcattcctttccccactctaattactttagcttaagttacgtattcttttatttattctttcattattcatcaaatgcaaaattatttttgttcgcagcttcctctgagagtttggagataaacttcaaagtgagttctgcgctggtggaaatagttaggaagattactataaaaccacgttatattcttgccaaggtaattccaagttttcaaatcatcatatatttccacattttatatggtgggtgtgataaattacagtcctacttgcttaagaccacactggtatgactaaataatgacttaaaatgccctacaaggttaacgagttagaatgtaagagttctgattataatatggagaatcaagtaatcatcattaagagttaatttaatgaaaatatgtatccacggagtgagggtgaccttgcttaatacacgaaaatattagacttcagttttgttgttttaatttatgctgtagcatcttctgaacattcaggagaaaacagtgtgttctttacttaataaattgatggatcataagattttctacagcaaatacttctttagaagatgcatcaaaccttatgaaatctttagctgttcctaagtttgctcttggctatacttaatgaatcgtgtacaagacattcaacgataatttctgtggtagggtggaatcacgtcatcagacattgctacaaaagccctcgaagtaaaatgtgcgaaaattgtgggacaggccatggctggtgttcccttgtggcagctaggtcctgaaagtagacatccaggagttccatatatagtgtttcccggtaactccgagttctcaactcttgtcactttaatgctgatatctccattgagtcttttactgttaaaatgtccttttgactgatgttctcaaactgtttgttctcttaggaaatgttggtgacagtaacgccgtagcagagctagtgaaatcttgggctcgcccagccaggctttcatcagcaaaagagcttcttttggtaataatcacccaatttaaagtttcatagaatcattgcgtccgcctatactgaatttcttcttctatatagagtgcagaggagggtggatatgctataggtgcattcaatgtctacaatttggaaggagtggaggcagttgtttctgcagcagaggaagaacagagtcctgccatattacaggtttaagcagttcaactgttcattgcttttctttgaaaaaaatagtgtagatataattaaatattgataaaaaaatgttactcaaaatacagaacgttgcattaattatgaaatatgtatatatatatatattaaattcttggatttcttatgtattttttgtgcatcaaacataacacttggcaatctcaaatttatctttaatccaaaggctgataataattttaaataaaaacttaattgttctttttctttctgcagattcatcctagttctttgaaacagggagggattcctttggtcgcatgttgcatagcagctgctgaacaagccagtgtaagtagaactttagataccaataatatgatgatagacaggagactttacatgcatatcattttctaaattttgcaattctgaacaatatattcaattcatttccaatttatgtaccttttcttgatcaatttttagaaacataggcgttctgctaatatataagataatatgttgagatgattaggccattttcactgattagattattccaaatgaagtaatgtacagcttcagctctgtgattttgctcaacatgtttcgcaggttcccatcactgtccattttgatcacgggacttcaaaagaagaccttgtggatgcgcttgagttggtaagttgactttctatcttattttttctatgattcagtattgagattctgtcaaatttgtttattgtccctaagcattacctaattatctttcataatctacatcattttgctccagggttttgattcagtaatggtagacggttcacatctttcgttcaaagacaatatctcttacacaaagtttatatcacttttggctcacacaaaagggatgctggtagaagctgaattaggaagattgtcggggacagaagatgacctgactgtcgaagattatgaagcaaagctgacagatattaaccaggtcaatacgttctcctaattctagtatctgagaaatcttattgcttaaaacttccaaattcgtgacaaagctgcaataaatctcaggctcaggagttcattgatgagactggcatagattctttggcagtttgtattggaaacgtccatgggaagtatcctgcaagtggtccaagtctgaaacttgatttgcttaaggttagtgttaagattcttgatgcttggtcaatcatcattaataacatctgtgtctaaaagttgcaaccttttcttacctgcctaccctgatgttttatgtttcatttgcatgcccaagatattcataggcctataattggaagatggtaatacaccattattttgttcccatttttaagcttactgattttaaaacttattaaacatgaaggatttgcatacattgtgttcaaagaaaggagtctttgtggtgcttcatggagcttctggtctgtctgaggaacttatcaaggtgtgttcttttatagcaaatacttaaaagtttcagtttcatttccatttcaaaaatcagagacctcattagacattttcataatttcaagacagctttgatcattaaacacttttatcttgtggcttcttcttttctttacaggaatgcatagaacgaggtgtgagaaagttcaatgtaaacaccgaggtgcggaaggcgtacatggattctcttggaagtccaaagaaagatctcgtccatgttatggcttctgcaaaggaagcaatgaaatctgtgatcgctgaaaagatgcatttatttggttcagctggaaaagcttgatcacattataatgtcaatacatagttgaagcaatatatcaattggcttcccaaaaaattggtttgtttcattaaccattttttttcagttctgttgtaattatgatttgaaactgaaactttcattagctaatcaacaataagaagagcttcattccaattttatgcactagaggtgttctttcacagtaatttgtttggtgttccccgttcatttaattagtcgatgcttattggaaaccaattcaacacgagtattataaaattggccaagagaaatttcaaggttgctattgctaactaaatgacttttgaatcttcttcttcttcaaatccaccaccttttcttactctaatattattattttgtattctttgccccttgattaatcttttaaaccaaaattcgtttatttcgtgtgagttttaagtcatattagttaaatttctaataaaatgatattgcaaaatttagcacaattaaatactgaggatttgatttctatatatattcatgagtcataaggcagttacacaaaatgagcacaaaaaacgtcttgaatacaactggcaaaatgaataacagaaaaggaatattcagggtacaatgattaaatcatcattacacaaaatgatattgctgttgttatcgaaccaggctcttggagcttgcttcagcccatacaaaaaattatttagtttgcaaacaaaatgttgtcccctttctcttcaaatccctgtggttggagcatgtaaacatcctcctctaatgttccattcaagaaaacattattaatatttaattgtctaatttcccagccacgagtaacaacaacaattaaaataattttaatagttgaagcctttataacagggtcgaatgtctcaccaaaattgaaacctggtctttagtgaaagccttttgcaactaacctggctttgtatcttttatgtgatccatctgagttaagattgtgtctgtagacccacttgttgccaatcagattctgacctggctgcggtggaacaagaactcaggttttgctgtttttgagagcattgttctcttctttcatagccctattcaagccagggtgagcaagagcttcctcaacattgtagggcttagatgagagaggttgccatgtagcttgtcccataaagactctaagcttgaatatgcatgctttggctcgagtagtcataggatgaccagtagcagcaggatgttgaacagtttgtgaattggaacctgagtcaagtggaaacatagcttcactaatatcatgaagatcttgtgactggggtaatatgttgactaagccaggtgaatcatttcccctctcactacctgaagctaaattaccagatgaagcaataagggagtgatcaaaaagtactggattaggagattcttgtatctgagagtgtgttggtgtggaaggtgcttcttcaggcatgctaatgatgctgtgaatgaagtacatgtgagaaaattaaaagatggcaaaacagatcaagaggagctttgaataactactggtttatcctgttgataattattgagaaatcctaatttgaaaggaaactcaagctcattgaagacaatatttttggagatgtaaatttttccagtaggtgttaagcatttgtggcctttgtgagagtcactatatcctaggttaacacatttgagtgagtggaactgaaacatatgtaatttatatggtctgatgcaaggaaaacaagcaacactaaaagtttttaagaaagcatagtctggtttcttattatgcagaacctcaaatggtgatttatggtcaagaataggtgttggtagcctattaattaagtacacagatgtttggaaagcctcccaccagtatttgagtggcatgtgtgcttgtgctaaaagtgtgagtcccatttcaacaatgtgtatgtgtttcctctcagccctgccattttgagctaagaagtgaggatatgagtgatggaaattgattccattggctatgtatggctatatcttgtagggcctgatatttctctccccaatctgtccttaaggcctttgatttttctctcaaattgtgtttcaacaaacactttgaactacagaaaggcttcacttgcttcagcctttgttttcaaaggatagatctaagagaaccgagtgcaatcatcaacaaagtgtatgtaaaatttaaagccattgtttgacataattggtgagggtccccataggtcactatgaattagatcaagaatgtttttggctttgctatttgagtgtttaaaaggtagtgcatgtgattttctaaattgacaagcatcacaaaagtggttcatttccttgttggtaattttaacttgacaagaacttattaacctgactcaagactttgggagatggatgatttaatctcctatgccatacatctccttctgaaatagaaaattgatcagatttagactgatctacattgaacttgatagaaacaccagaaaaaacttgactcttgattttattggactcgattgaacttggaacatgaacaacagacttggttgatggtgtttggagctggtagagaccatccttaagcatcctttgaagaagaactttccttgttagcttgtccttcacaacacaacaatcagaatgaaattcaatgcgtacattattgtcatgggtgtgtttggatacattgagtaaatttttggctatttctagaactaacatcatttctttcaatagtaatggttttccagtgttagtgaataaaactccattacgaagatgagagatagtaagctgtgtaccattaccaactgttactttttccttaccaccatagtcttgtttttgagtcattgaggctgcatcagaggtgatatggttgctggctccactgtcaggaaaccaggcctaggtgtagcaacaaaagcagatgggttgttgttcttgccttgagtggtgttgtttggatctgaccccatatagtgttcatcaaagcgattataacacaatgcaattgagtgaccatattttccacaaacctggtaggtgggtttggaattatcaaatttgccactaaagattctcttacctcaagctcttcctcctctattagagtgtctaccaccatggttgtgagagtagtgatttgaacctctgccttggcttccaggttgaggtttatgagcaaagttggcttgaggctcggaaaaggtgtttggaagcttgttgtggttggttgagagagcctggagtctctctatcttgttgtcaaagctaagaagcatttcttgaagctcttgccaggtggtttttggtctagtttgatcaatctgtaacacaatagtgagataattaatatcaatatcagagaggacattagttaccagctgagattcagggtaaggttctccagctaaagccaacagagcccatcctttcttttgtttgagataatatgtcattatgaagtacatacatcacacatgtggtatcactcaactgttagtgtgtgactcgaggtacaacttttaagaggcatttaatgccccagacactgaagagactctcaatcaagccacgttagatcaaattcaacaactaggacacatgtcacacattcgaacaacttcctagccgaatgaagtgttgggttttatgccctaataaaacttcatttcatataatcagatttacttattaataaagatcagaaataacacctgtaatatctattcaattcaatatcacctgttgaccctagatcaaatgatcttaatcctgatatggttaggttcaatc

SEQ ID NO: 381765 - DNA, 1833 bp, Cannabis indica
tgccaatcacaccagcgctaactcagatgctattcccacttcaacatccaactcagatctaaatacacaatgccaacaactcatttccctcctcagccaacaattgactcaaaatgctacccgtgaggacatcaatactctcccagctgcttccaacatggctggtaagtcaaatctttttcctatatattcatggatcattgatagtggggcaactcatcatatgtgtgccacaagaagcctctttcaaactttttccagcaacgtttttcccacacatgtggtgcttcctactggtgcaaacataccagtaaaagggatcggtacagtccatctaaacaagcatattacacttcaaaatgtgctctttgttcccacctttaatatcaacttattttctcttactgccttcattgataatacccttaataaggttatcttcatagaacatggcctgaaagcttgaacttcaatttcgagttggacatgtgagactaacccttctctcatgtttgaccatttgagtttctcctacttggatatatgtagctctaaattactatgtcaaaaataatgcacaatacatatggtgcatacttataaatagagattaaaacaagattgagaataataatttaaaaaaaaaaaagtaaagagaggagacatgaagaagataataaaggaataaaaagatttgagatctgtaaacagacaaatatgaattaaagtatgagtgaccgacaataaaaaacagaaaagagtaatatgtttaattctaataataatacatgaataaggtcatctttagaacataagatcagattgtatatccaaaattttatcatgcactttcgttatgtaactagagaattatgtttactaataagtaataagattcaatgaaaaggtagttagttttttgtttacttattttattaaaattagggaagaaagtaattttattaaatatgggataaaagaaaataaatatttctcctactatttttataaagaatgtcactaagggtaatgatttttatttattttttaatattaaatacacaaggataattttgtcttttaaaatatgtcttacaaaataactgccatatattataatttaattataaatgaaaatttagtcaatttttgcattccgattacgtttcctgataaagtaaataaaatatttcattataattccatttttaaacaatttcagcaaacaacatattacaaatattgattgcgattattttttatttattacgttaaatttctctattaatttattccaattatgaatactatatagtaaaagtgaatagtccttttcaaaaaaaaaaagtgaatagtcagccacctaattgatccatctaccatgaaatattttaatctcatttagaaataaaataataataaaaaaaaattgccttaatatacactatttgtaagtatcacccttatttctgccacaagagtttcagccattacatgctgaacttttagcaactcgagcgggtgtacaggtaggcttacagagaggatttcctagcttttgcttagtcagattgtttacaggctatacagttaatttgtattaaggatgagaggtgttgggatgttgatgggttgttgaaaaatattaggactgtgtttcttaatgattgtgaaaaatattagcttttgtgcatagagaagctaatcaggtagctcatgtgttagttaatcgagccttgtactacaaaactagtgcaatgtggattgggggttaatcccccatgtgctagtcaagatttacagctagacttgcctaatcctttgtaattgttg

SEQ ID NO: 381766 - DNA, 3207 bp, Cannabis indica
actccggacccgaactcaaaccctggacctcgaccctgaccccaacctgaaccccgaacctagaccccagaccccgaccttgaccctaaccccgactcgaaccccggacccgaacccaaatcccagacctaaacccaaaccctagacacggacctcagacccgaacccaaactcgaatccagaccttagacccagcctcgagtcacgaaccctcgacccggacaccaaagtcgaacccaaacccagactccagacttggacccaaacttaaacccgaatcacggacccaaattcggaccccgaacctgaactagaaccccgaactcgaaccgggaactaaaccccagatcccagacccgaacccaaacccggatcacgaacctgaacctggaccggatccagggtccaggtctagggtctgggtttgggtctaggtccggggtccgagtctaggtctaggttcgggtttgggtccgggtctaggatccaagtcccggttcaggttgggggtctaattctgggtctagatccgagtccgagtttaggttgtggtcgagattggagccgagtttattgtaaataatttataattttatataacctattagtacaagtcaatatcaaacatagtattgtattaaataatactaatacaatacaatccaatctaatacaatataatacaatacaataaattatcgtataccaaacaagtcctaatattattaaagattgctaatgtccaataacagcatatccaactaaaaatcccatttatcacagttatttactttggtttggtatctccattaaatatataaaataaaataaaataaaaccgttaaaccatacccaaaagccacatgtaaaaactcgatcaattttgtcaaacccaattcattgtttgcaaccaactatctctcactcactataaattttaataactctacttgtctttgggggatgaagacagttgtacattaatttgtctcacgtgacaagcacatggtcccatcactaaaatgtaaaacacaaggtatagacaagacaaaaaaagtcccattactactactagcacttgcttggcttgacattccatcttatttattcctttgtgaaagttcaagttccgaatgtgtatttttcatccaaggcaatttttaccaattccaactccaagtcaaaatcaagagctcattgtttgccttggcaatatcaaaaataatttattttatccacaacacaacacaatacaaacgagtttagtttagacacgttcttgtgatatgaatatattgaattattatatctaagttaacagccgttatatacgaaagtgaaaaaaagcataaactcgaaaatatacgtattttgtctttggtttgaccggttcatggctctgtcttcaccttgtcgtttttcatttctgtctcagctatttcacgcgggtaatgtcgttcattgattttcagtccatagctcacctcctcgttcttcttcttctgccggagctcaatgtctgcggtacggcttcagattgaagaaggcgctctgtaatttattcttcttctaatagtgtcgtggtttgaatccaagctccgctcaaaattggtactttttccctcttgtttctgaatctgtgttttttatatgaaaccctttaatgggtttttcgtttattgtctggttcctgagaaaaatgtatagagaagggtatattaattcgttagtcaacttaagctcaatttcccatttgagttagttcgagttaaaaattctcgagcttttaatgctaacgctttttctttttcttttttttttttttacgaaactttttggtgggtaattgttcttgtttcctttttaagtttacatgagaaaactgttcagaaatggacagaaaatttcaactttattctctagtcaacttaagctcaatcatgagtctggttttgttggagttgatgattttctaaggtcttatgttgtttctttttgcttcagtgaagttatatttggataacttcgtgttatcatttctgtacgtgtccaagtctggagattcagctagattttgggtaagttactattacttatagttttcattatggaaatatctgttaatttattattggatttggatgaaaattggaaaaatatgtgtatgcatatatactatacatgttgatgttttggcattatggttgagctaagagtctgatttctgttatgttcgttaaaatgatgtaggatatatatttgttggccactgtagtgtatacactagcctaggccagaaaaatggtgggtttgaggtttccatggaagagttctgcggagaatcctgagctagtgattggaattttggggtgtgaagttgttggcctgatgtcaaaggtggttaatttatggcattgtttaagtgataaagagattcaaaggttgagagaacaaattgaagattcagttggggttaaaacacttgtatccgaggacgataattacctcattgaactagcactggaggagataattgagaattttgggtgtctttcgaagtcagtggtgaggcttagttggagatgcaaagaccctttatatcaccgtcttgaacagttctttaaggaccctcttcaaacttactttcaatggtttggtttggtgtatcgatggaagaaaatggagaagaaagtgaagaaaatggaaaagtttgtttctgttactatgcaattatcccaagagcaagatgttttggtggagcttgaacaaacactgcggagaatgcagaaaaattctcagttagatcgggtaaaattgctcgagcagcagcagaaagtgatgtggcagcgtcaagaagtcaaaaatttacgagggttgtctccatctgtgagaacttatgattacattgttaggcttttggcaagatctctctttacaattctagagaggctcaaacttgtctttggagtcattgaaatggcttctgcagaagggaaaaacaactgcgaacctagaaattctgattttcttcgagcccattccttttcagctcatttaaattcttctgttcatccatctgagactaatgtttgtgacttttcttcaggacctcctgtggggtcctttgcaaaggaagggcatgtgcgggcaagaacagcctgaatgacttgttgcaacaagatcctcatcagtcgttgacacaacata

SEQ ID NO: 381767 - DNA, 1676 bp, Cannabis indica
atttatagagtagatttgagtagttgattgagctagagttagttacaattcgtggtaactaactttattcttgatgtggttatgtaatattgttgagattcttcaatgtattttcttttaagtgtaaaaatctattattgtatgctgatttggtaaataattagaactggttataagtgaaaaatttaacaaacaaagataatatttttaaatttaaaatacaatattatagttttattttataaatctaattatttgaatattataaaaattaagaataacaatcactgaaaaaagaaatccaaccaaactcaccaaattattagaggagttaaatttttttaggtaagtctacagtacacccttaaagaagtatttcgatggattccttatctgtttcagcatacaaaagagctttttagtccaatttttttttttttcatgatcatgtacattatacttatttaagaacatttataaattttcaaaaaattctaagtaatttacaatgctaaaataaaatttatatattttgttgcacgtacgactatttttcttatacacatagtaagtaactgtttaaaactaattttcaaagttataaactatttagaatttttttaaaatttacaagttgtcttaaatttttgtttatcttatttttggccaacaacactgagtctaacaagcaatctagaatcaattagattcaacgagaatatagttaatattaagcataaaccaaaaacacaagattttatagaggttcagtcccattatttggtaataacttactctttttttagttgtatttaacttatgagtagagaaacaagtataacttgatctctctcgaaagctttacagcattacaggaaaatgagtggtgtaatagctcttagaagaataatttcgaatccttttacaatagaattgttccactatttataggagatgcttataatagaaattggtttctcaaaagctgttaaactacaaaaataagaaataaatgactttcttaaattgtgagaaatacatagaaatttccttaaattggaatttgattacatataaaatgggaaataatctttaacgagtctgttgcacgcggtttccctaattggatcacgcgaggttctgaccgcttctctctgaccagtttaacttcgtgcaatctgtgcagcgagttttatcttgcttatttgttattacattcgacaaggtgtatgtcttgggcgaacactttgtgaggttatttcctccatataagcattgatgccatgatacatgtcattcaaagaaacatgttacgtaacccgaacaagattcaggataacaatttggggagggggggggaaaggagaggtggagggagactttttccctctaaacataaaaatttcaatctctcctaaaataaagagatttgagaaaaagacaaaatatatatacataattgttattgttgcccctgattttgcccaatgtacgtggaccaaccaaacaagggcacgtggagacaaaggttctagcacttaaattaatagctaagtctttgtaaagaaaggcattatcctagatatgcctcccggagaaggcatgcaaggttttctatgctcccggagatcaagatggcatcaaagcatctccgggaggtgtcaggcttcctctga

SEQ ID NO: 381768 - DNA, 1424 bp, Cannabis indica
caaaattaattttttaaaatttaccaaaaaaaatgttaaatctttctctttttttttttttgaaggaggtacgatttgatagttgtcaaaatttaggaggaaaatgactaatttacaaaaacatgttagcatttaaacggaataattggatgaaacctaacaaaaagactaaaattttataaatgtaaaagttttgacagaatttgtaacaagtcatatattttatggggcaagatcaggtggtgtcgagagttcaaaggacaattgctaattattcattactaaatattttactttaataataattatagaaaaccgctaataactatcttacatcgtgacccaatgagatttgaatagacaaatgtgtttgagccgtcaattacatgattactttataattactttgttaaacaaacacatcaaacctattacttactttgaattacacttaattccaatgatcaatcgactttccaaacacacactaaatgtatttcaataaaaataattaaagaaatacaaattggggtgaagaaagaaaagaaaaagaaaacaatttttgaagaatctatgttatacagccaactatatttacatatacatatacatatatgcttatagaacatctcacatagtacaagcacaccatcaaccatatttccaagcaaaagttgaaatgttctttaacacttgtactctctaatagtgctgtgaactattgactgagctgtcacaataagatacataacaagatgttttctatcatattatacatgacttgcactagaagcttttatcaattaaattcactcacttcactattggtgtcttgaagcattggatgagctagctgaggcattcgcttgatggtagcattgcacctgactccatgcttgtacttgaacccaatgaatataaggtaggatcagacccttgtgcaattcggctcagtaagtcattgacatcattgaatttccagtcaaccaagtaaccaggccttgaaacttcagtgttcacatcagtgtctcctgaaagcaatgccacaactttggacatcgacgggcgagctgtaggtgatgtgcgagtgcataaaaaagctacttgtatgattctcctcacttcttccttattgaattcagatagtgttgaatcaatgagctcaatttcacggttgtcttcatacatattccaagcctagtgagtataaacaaaatggtaaagctctttttgttaggggaaaatgtacttagtaataaaaatttatgctaattagcatgacatgtgaggcatgagaagactttgcaatcttaatagaaaacagtatagtttagtacccattcaaaaagataagccttttcttcagctaagctctggtcataattcggtctgccggtaagaatttctaatgccacaactccaaa

SEQ ID NO: 381769 - DNA, 2430 bp, Cannabis indica
cccttggacgaaactcgttaccttaacgatattctccaagttatctccaccgataaactctacgccgccgcttgtgctcaggccattgccaaaagagtcggcaggaccaaaaactggatcgtcgctctcaaatctctcatgcttgttcttcgaatcttccaacacggcgatccatatttccccaaggaagtttctcacgccatgaaaaatggcgccaagatccttaacctttctaatttccgtgatgattcgaattctagcccctgggattacactgctttcgtacggacgttcgctctttaccttgacgagaggttggcttgctttctctccgggaagcttcatctccgccggaaactctccgatggaagcagccgtggaggtcggcatccgaaggttgagctcatccgggatatgtccccagcgactctgatcgaccgcatttcgaactggcagagattactggaccgggtgatcgccactaaaccaaccggcgatgccaagacaaaccgcttggttcagagctcgcttcatgcaattgttcaagagagctttgatatttacagaaatatgtctgatggattagctcttcttctcgatagtttcttccatttgcagtaccaatcctgcgtcaacgctttccaagcttctgtaagggcttcgaagcaattcgaggagctctctgaattttatggcctctgtaagagcatcggcgtcggaagaacctctgagtacccgagcgtacagaaaatctccggcgagttggttgagacattgcaagaatttctgaaagatcaagcttcatttaccggtagatcgcccccatctcaattgctcctagcgccaccgccaaccaacgagcatacttcaatctccacaactccagataggtcctcccatggggaatcggaatctgtatctattcgctcttcaattgatcgttatcaggaaccgatgagtgctacaaattcagatgaaacagaggaagattgtttcgacgctgaagataatcaggaatcaaacacagattcgaacgaattctccttcaattgcacaccttcactggagaatcaagatgaagaattgggaatcgattcaagagaaaaagattgttgggagcttgtgctggtgaataccgcgaaagagtctgatcaaacgacaacgggttttgatattttattcgataaacgacaatacaatccgtttcttgttgaaacgacagacgtagtgcctgtcgttcctagtccccttagtaacgatattaaccgtaatcctgagaaaacgacattaacagctgcaacgtttggggaagaagagatttcgagttggattcctccaactttttgtgcacacaatccaaatgggggtctgagtttattttgcaacgatccatttgaatcaacaaatcctcagctcactactactgatttgagaaatgggtcagtgaatgagctaaatttcgtctttgaacaaaaattgtggttggagcagcagaagaagattatcgcaaagaatgagttgaataactcatgtgtgtaattatatgtacaggtttttgatgcgttattttttatttacgctagtttgctctttttcataagaaattttgtgctattgtgatctgttcataattaaataaacgagattaatattaatattattattattattattattattattattattattattattattatttaaacaaaaaaataaatgctgtgttaataacaaatttctcattttttttttttttttcagtttggtttgtgcttattaatcatatttttgttataaatttaattaaataattgttctattgttagaacatttttacaaaatgagagtgtcttttagtgtgtctaaaagaatgagtctcacatgatatatatgagcctttatttataagggtatataaaatataattttagcattcaaactaagggtacctaattttgtgcgaatgtatgaggacacacaattctatgatcaatgtttttcttcccgttactactttctatgcatttttgttattgtctgaccgtgtcaagctggtgtggtgtgacacactactataaaacaagtctttagaggcgtttatttttagcttagtaataaataaccaacgtcataggattagaaatttattgacggaaattgtacgcctcttatggcgtcgattatttggaaataaccaacggcattgggtgtgcccccgtcgattatttcaaaataacagccaaaaggggtttattaccctactcaaccctttgtcttcctcattcgatcagccaacctaagaaacctcaaaccctctccgtcaaccaccacgaaaaatcacccctatttcaccatttttttttcactattttagctctttttttttttttttctaaatcttctgttttccatacctaaaactatata

SEQ ID NO: 381770 - DNA, 2360 bp, Cannabis indica
cagtcacctcatccgctttatcaacccagcaatgatttagtggcctgtagggatcctctctgcctagccttgcactcacccggcactcccagatgtgacaatcctgagcaatgtgattatgaggttgagtatgcagatggaggttcatcactcggtgtactcctcaaggattctttttctctcaactttacaaatggagtccaactaaaacctcgtttggcccttgggtttgtgactttgtctccatgatttctcactttgatcatcctcataaattagtccattcaaacaaatttccataccgtgcttctcaatgtgaaacttaaatgcaaatatcattattgcagaatctttcaactttctgattagcaattgtgcaaaaacagataaatttatatattttagagtacgttatgagaagatagtaatatttttgttgaattttatttctctagcaaacctaaggaagagttgttcagagggaatatccttaacaaggccaggcattcagttattgccatgtttgattttctattcactggttcttatgttctgatgaatgatgatctgctgtcttcagatgtggatacgatcaacttcctggttcgtctcgtcaccctgtagacggagtacttggcattggcaggggtcaaaccagcgtcgtgtcccaacttaacaatcaaggtctggtgcgaaatgttgttggccattgtttaagcgggcgaggcggagggtttctcttctttggggacgacctttatgattcttcacgtgtgacttggacaccaatgtcacgtgaatacacgtaaatcaacccttcgaattctcattttttattttaagcaggaaatctttcttttgatccacattttaaatttgactactgtttaccaattcttcttcttttatgccagcaaacattactcacctggatacgcagaactcaaatttgatggaaaatcaactggtgttaaggatttactcacaatttttgacagtggtagctcctacacttatgtcaactctcaggcatatcacgctttgacagttttggtgagtgcgtacttactctttcccaaaacacagaaaaaaaatgcacttaagcatagatagtttcctatattaaactcatacaatagactctatgtgacattgaagatcaagagagaattatctgatagagtcttcaaagaagcaccagaagataacactctgccactttgttggaaaggcaaaagaccatttaagagcattcgcgatatcagaaaatatttcaagaccatagcattggacttcaccagtggtagaatcaccaaaacttacgaatttccacccgaggcttatctaatcatatcagtatgtctcacttcttctgtatctattctcatttttgtacctggttattatgtccctccaagtagcaattctgttatacaacacataacacattttctttcagtctaggggcaatgtatgcttgggaatcctcaatggtgccgaagtgggactgcaaaattctaatatcattggtggtaagatttccttatagatacacctggcctggtttggagtctacaatttttttagcaccctattgattttctttctgaaaaatcactttgttttttcttctcatctatagatatatcaatgcaaaataagatggtgatctatgataacgagaagcagatgattggatgggtcacttcgaattgcgataaggtcccaaaaacaagaacagggagcatctgatggtacttccagtagtctccaaccatttctttattaaacacaagatggttatagagcattcttcaaaacaaaataaaaacataaaaacagtataaaatatacgtggcaattgatagaattctattacatataagcggtgtttgtatgtctgtatcatgttaataatgtattgtgtatgtatatattcattagtattgcgctttagatgtgtcttgattggctgtgaaaaagttataaatatttatagttatatttggacatgctcttaatgttattacctatgaatatttattctattattagtcatggaatcaaatctaatggttgatatttataactattaattaaatttttaaattaaatatttattattttaactgttacctgatgacatggaagtcaaattttatatctattttttctagtttttttctcattccatatatctttatatattaaaagtgcctatctaacggcaattcttagtttaacagaatatacttaaaaataaaaaatattctgttaaatttaacgattagtttgatctcccgttaaaaaataaacccaataattaaaccaaaaaattaaacaatcttttaaataaacaa

SEQ ID NO: 381771 - DNA, 2659 bp, Cannabis indica
aataaccgctgcaagaaaaataaagaatgtacaatttagagtaattcccacaaagtatattcccaacttcagtaagcaagtacgaaatcgcttatttgaactactgattccaagatataaatgcctaaccattcatgactaaaaaatctatcgaaccatcaagaatatacgcgcatacatatgtataaattaatcatgtatatcatttgtaaacaaatgcaacaaacaaaagcaacagaaagtttaagttagatcggaaagatcacacaaccaataaaaagaaaattagtaagagagcacgcgagtgaaatggaggcaggattaccccttctagtccaggccttagaccaagaaaaggtcataaatttgcaccctataaacgagttgaataggtgtattacaaaaataaatgtatacaaacaaatctagaactataagaattttgtatacaaattaactaaagaaatgcttacaatcttttccttttcagcctgtgcactgttcttcaatatatggaaatcaatcgcgtagatcccatatccaggctagaaagaaaaattaaaaatataattaaagagagattacagcacgcttcaaaaacgcaatgtacagattttttagaaaatatgctaccttgacatcaagagaaacaagaatttggcccatctccaactgtggataaaatctgaaaaagaggacactcaacaaaaagattcaactaccatgtaaccaactaggaaaaacttaataatgctgaaattagattttaggaaatgtttagttgaactaagctcggggaaaaaaattgaacactaaatcagatcaaaattcccaccttgtcatgactgttgcaatggtagaatccacacagctaggtgccgtgttaacattccccggactgcagaagttcatctctatctgtaagaatgaaatggatgaatgaggaaaagggccattaaaagccatctaatgcagaccataaattctaccaaaaaaaagtaataataaataacataaacagttaaaatatacaatagtgtagaaacctcattagctagtgtataaagttccttggtctcctcttctgaaaaccatccacctttacaagcattctgcagagtacaacttcataaaagtcatatcagtcattttaagagacatctttaaagaagagaaataataattaaattaagttaataaaatatgatcagaaaccaaatgggtttcagtaaaaaggtctaattgttagttatgaacataaaaaaatttgcacatcattggatgcattttaacatttaccttcacggaactcattaccatcataatcatagcttgtaaggagagatcacttttccgttcaaatatctacaaagacataagaagaaaagtttgacttaaataaaaaatcttatgtatgagagaattcataaatctggagagcaatgtgttatgccaatccgtccccacgaaaatctaggtgaatataaaaatgcagataaattcatcaaagaacaaattgtacccaataacatttaaagttttaaagaggtgtgatctcatgttgtaccgatcccataaatgcttgaagttgttgtctaaattcctttgagtcatcctattattaactagatgcaccaaatctaccatgtccaaatttagtatagtaagcaacgctatctaaaaatcgctcacaatcaagaatgcatttgcaaaattaaatatagaaccacaatgattcatacaaagttactatcattcacttgccacttttatggagaatagttcctctacccaccacaatacatacgtgtacaaaaggaaatggtattatgcaaatatgaagcgggcaataatgcgtagtaaagttgaatacgtgagggagtggccggtgtgttgtatttgcaagcaagatcgacaaattttagtcaatataccacaaccaaacaataccaaatcacgctgtttactgctcaaatcttcacacatgacagcagtatctaagtaggcatgtaaatctttctgtagtttacaaccctacacaaatcttctgcataatatatgctaattatacaagccaaaaaaaataggagtttgattataatcagaaaatcacctgcttcaccaatgtaaataaatcatgagatttagttaatttttccttgtatgcaactgcaaaatcaatacccctgtattttcaaagtaaaccgagccaagtaaaagacacaattagaaaacaacttaacgatttcaacagacacaaacgaagcatcccattcgaagaatgaagcagctaatcgacatgacaacaaagatcagaaagatgtgtacaatatctgccgattaaaataaaccgaatcaagctttccccccatatcaggttaaataggtcttcttgttacctaagctagttgaccaagcgttttcttaaaaagtgaggtggtctttgacagggtaagagaatacctggttcaaagatactaaaatcttaccagtaacaaccatatgaatctaaaatttactcataaatcccatacattgattacatctattccaaagaaccaactctgtaacaatatggttactaaggaaatgattaaaggctcactctcctgcttactcttaaatcccattaagcttctctttcaccaacccaatgatt

SEQ ID NO: 381772 - DNA, 2165 bp, Cannabis indica
aaaaaaaaatattgttgatcaacttattcacatgaaaatctttctttttcagcctgggccggtccaattacgattcatggccttatggcccatatctctcatattaacaaagccccataatatcccaccaacaacataaacctcaattttgacaaaaataattcatcttgtgcccttcaataagtacgaaaagtggatcattaaataaagtttgtagcttttcaaaaaaaaaaataataataataaagtttgtagaaatcttcaattttaagtcccgttgtagattgattaataagacccaaactgactatggatgtcatctgtttgttttggaaaaaatgtagcaaaatagtaatttgatttactcattagacaaacttatttactatatcaattcgactagatatattcaaatttttttagagaaaattttattaaattgttttactgaatatactaatttataattctagaagaaaaaaaaagaatatactatttcataatattaaaaaatatatatgtagtaacctatataaaacatttaaaagatatattatgtaggggtgttcattgtgcagatagtgcggattgtagctattttttcaaactaaactgtatatgttatttttgtaatttcttaaactacaatcgcatatcttaaaattacaaaaatcatatcgcgaaaatacattgtggtacggtgtggcttgagcgatttacactatcatcattatcaaacattataataaaaaaaaaaaatctaaattttaacaatacaaaaaaaacattattaaatttttaacttcataacatatatgttaatcattaaattattatattggattgcctctaaaaaataatgttatatacatatattatatatttgtttgaaaaaggaataaaaatcatattgaaaaaaattggtaattttgtaacatgtagtgcggtgtgatttgaactgtaattataaaatttaaaactgcaaactgcaccgcactgcgcggtttgacaaaaatacaaatcacaaccgtaccgcaaaaaatttaaaaccgtattttttaaacaatatggtgcagtgcaagcagtttttacactgtagagagcttgatgacacccctataatattaggctcaaacttgaaagaaggtgaggaaaatatatgagatgagttcggaatatctattttttatatctattaattaaaaatatttttatattatattttattcaaatatactcatttttttttagtagatttcctaatatactatcaatctttattcaagtctaacacatattttatattaatttaaagaatataatggagatactatttataaaaataagtattatctttgaaaaaatataaaacttaaaataaataaagtaaaatggatagataattttaatgtataaaccataaaccagttactgagaaattggcctaaatgctaatttcacataggtccataaacattcaataatatttttataaatgtgcttcatagttatggtatttttgcaaggatttctataaagttgtcatgttaagaaaaatttaatacatgagaaaaattattgttgatcgttaatggttgtatcagtaaaactatgttggtgaatcgtaacgttggtgttttatgtagaaattgttggtgtgctaacaatcttcgaactttgataaacaacagagttcttttctttttaaaacaactgagttcatcggctaccaaaataacaaaataattaattacaaagggaaatttgagtttctatgcatttttaatacctaaattaattatctaaattaatacttataactcttgaaaaaatagaactacttttacctaaacctcaaaatacctctcattattctcaaccatttctctctcttcctcctttctctctcaaatcaaacccaccaaaacacactgtcgatccacttgccttccacccaaaaccaaccatcgcacgaactgaacggcgaacgccacctccgaccgagacgccgacggagagccaactgaacccacacctccacccagggccggcccaagcattttgggggccttgtgcgaaattttaaaattgggccctttagaaaaaaaaataaaataaaaaacaatacatgtacattaaaactacaattctattagtagcttttt

SEQ ID NO: 381773 - DNA, 2131 bp, Cannabis indica
cgttaatgatgtcagagttgtccatctcttttgggtccactttggatttgtttctctatattagagtctttactcagaagaagtgatatgacgcttaataaaatcaatccttcgaggtttgaataatttgagtacataaagaaactctaatattaaactttcatctttctaattctaactctagaaataatttaacttaaaattagtagtggtatttactctataattatgagatggtatggtaaagtcaactaaggacatgaacatgattctaaggttgaataattctcttctttttaggtaacaaaaccctcaattatggtgctgttgtttatgttaacaaagtttctatttttgactattgttggttcatgtgcaccaaggccaaaagtaacacccttgtaagttcttaccttgaagtgtatcaaagaaggttgaaacatgttatgggcttagacaaagaccactgttgttattgttgttgttatcgacataggttttcacaaaacaacaactctgtcggtgtcataaaaagtaacatcaatgacacctctgcaaattcaattttctttttctttgtactccttaagttttacgtgtaactattcattataaaaaaaaaaaaaaaaaaaaaactattcacaagtggataaaattaagcttcaatctcaaacacttttttgatctaaaagttgttagtctcaaattgttttagagaatgacactaaattttgcagccatttatatattggggaattattaaaaacctttttgtataaagtttatttattttgggactacttttgctatatagataggtgtgtgttgtgatccaccataacaactaatgagatatttttcttcttgttgttcttatgaggattgatatttgaaggtcatggtcctggtcaagattccatatatgtacacaaacaaatataggtgaagagaggtcttattatttcaagggttatattagttgacctcttgttcagattgagatagggatatataatagggtcccccatttatttaatgataaattggtaaatgataatgatcttccttggcattttattttgtagtcatcctcctgatcaacctcagaccttataatttagcaacaaccattggccccatattcattctgacattctttataaattttttctcatatatattctatatatatatatatatatatattcaagctaacgagatggcccatgaatcacaacttggcttttttggctaattataagcttgtgattaacaagttggtatcatgtttgggttaaattaagctatatgatatgctattctatggatattgagttcaagtacatacattttttttgtacatatatatatgtatacatattaatacaagttaataagttactgcataaacattgacaatacatactcaattcaaactaactcctccttgtatatgttgcaaatcatagaagccacaagtggtctggatttcgcaatagattttattctaacccatatgtatgtgtttttttttttttaatttaaatgattttatcaatataatagtgacacttttcaattttgacaatgtagctagttactaaaaagtaatttttagaagatgggcctgtttggcttagtttatgtaagtcttttttaatttttaaaattagaaaaaaaaaaaaaaaattatataataattatctaaaacataaaaataagtaaaaatttatatttattttatacttctatctatctataagtaaagaagtaaaaatttaactaaagaaagaccatgatgaatggtaataagttaagcaaagtatttaaggaagagtaattgtgagcaagtacaaaatgaaattctcacattgttgtccaaaagattcatgattcttaaaaatatttatgaaactagagagagaaagaggtatatatataatatattgttattacctcccattcccatgcaatcatgctatgatgccccaaaaagcagaacctcaaaaaccctaataagtttttggctttttatcttttgagtaaaaattaaacaaaagtagagacgtgcacgcaagcctaggctgatttgtcctctctttctctcccaatccaaaacccctttttgtcc

SEQ ID NO: 381774 - DNA, 4780 bp, Cannabis indica
caagaaatggcgcaatctgatatcggaatctcatttcgctaagttgcatttcgctcaagcaaagcctcaattcttgatccggactctggattccattcgaatttcgagaactctgtacttggttgaacctgatattcatggtggctatggttttgaatcttattttgatctctgcaggctttcattggatgtagaagatggctattatatttctcctcacatgaaacttaatgctaaattgaagatcccggtacgcaatgccgaaattgtgttacaaaaccaggacgatcctgtaatgaagaagaagaatcgttgccttaatttgaagccaaaagatcacaagtacaagattgtgaactcttgcaatggtttgctttgcttgtccgagccatcgcgaaatgatcctgttgcagtgtgcaatccagtaaccggagagttcatgaaccttccaccgagcaattgtgatgatgaaaatctcaacgatgccgttgattgtggattgggattcagtccagagagtaatcaatacaaagtcattagggtttttcatcgaaacacttatgtaagacgccctgagcaccattgcaatgccttttccaactatactaacacatacgcagtggtacacactcttggcacagattcatggcgtagtgttgataatgctcctcactcaaagtttaagctaggatttcccacttatcttaatggagctctgtatgggctttatgtcgaccatgggagaccaaattatctgatttcatttgatttcgacaacgagaaatttgagctactcaatgttccacaagaatgtgaagatacatggataacagatatcaccatgggagttataagtggtgatctttgtctatgcgatagatctgatctttcattggatgtttggatactgaaaagttttagctctgatacaaaagcttggagtaaattgtttaccatggactgggattggccatatattttatatcaacctgttcatggcttcaattctggagctcttttgatttttcttagcaataacggtcaactgatgtacaaaaagccactccccattgatccctcattagttggtttccattccacactctgttattccgatcccacatacattgatttttgtggtcttaaaacaaggtacgaaatcatagttcacactccgagttttatttcactcagggacacttttgctgggaataataatgttgagatactcaatgtcaatacaaggtaactatgtgtttgttaatcatagaattgtagatgtttggcaatgtacacacacatttgttttcaatgataactctgttatcataaattgaatgattgaaaaactatttgttaactaaaaacatggaaacttgataggtacataatacaggttattgtgtttttcaatgttgatacacagatgtgggagcttaaaactgcgaggagagactaaagatctcattttgaagggagattcttacccagatgcagtagacagcgatactttcgaaattgaagaagtctattggaccaattactggtggaaaaagaaggtgaggaactgatgtgttctttctttcgagtgttgtttaaaggactagaaggaaagttaagctagactttatgtggatactgatgtttagaacttctgtcatattttggataatatgcttggcactttgatctcaaaagtgcttgcattttacactatgggctctttagtagtttcaaatgcaaagtttaaggcagcatttaacctcctgcccttttcataactttgtatatgtgtatacctataaacaaatgtagcaataaattgtttacggcagtaaatcttattcatattgtgttgttcatagctcgttagaaatagtccccaagtttttttataatgtgaaattttagggtgtttcatgtaaaattttacttttgaatttttaaacataaaaaaaaattcatcttcacaaagttacaactagctttaatttattttcttctcaagctgatgtacataataaacaaacaaggacttgaagttttgaaatagcaaacaaatagcttcgagctttctacttaagggatagggtggattacaatcttccctgtagctctggaagtctcaaggtaggaatatgcctccactgtcttggaaaaagggaactggcctttgggatcaatcaatggcttcaccttaccactctctaaataaggctcaagcttctccaaagttgtagcagttgaagtcagaaaaaagaagattgcttcaggtgcagggcctactattgtcacaatctttccaccttctttcaggaccttcacagcttggtcaacttgccctgtttttgtatgcaaacaaattatcattctaacccattttaggaaaacattaatactgcaaaattaatcaatgagaatgagaaagataatcttaccaactgtatcaaatatcacatcaaatttctcaggaacatcttcaacattctcttttttgtaatcaatagctaaatcagcacccaagctcctcaacaagtccagtttcgcagtgctggctgtagcagccactttcgatgcaccgaaaacatgttttgcaagctgcctcagattaaacgaaagagcacatacttatcagaattatcaactctggtttctgagataaatataagaagaaaagaacaatgaagctttacctgaataatgtgagtaccaactccaccagcacctcctagaaccagaacagatttaccaggagcaagctcacctcgttcaagaccctcataggcagtctccatagctaaaggaagactagcagcttccacaaagctaagattctttggtttgagagccaaaactttctctgatgcagcagtgtactcagccaaagtaccaaacttttctggctttactgttcctgtctcatttatatctccataaacttcatccccaactttaaacttctttacttggcttcccacctttacaaccacaccagcaacatcccaaccaggaacaatctgtagattaaaggcactaaaaccaaattagaatctgctaaacactttttagccccttttaaccccaaattcaaccaaatccttaattagatccttaaccagacatgttaacaaaaagcaaatttcacataataagccaattggtacagattttgatacaaaggaaaaacctttacaacagaattatagtcatagccaattaatttacaaaatacagagtgacccagattagaaatagagagaaactcacaggtaggtcatcgacggcttttaagagaccatgcattctcttgaaatcaataggattaatggaggcagccacaaccttgatgagaacctgatcatctctaggttgaggaactggtacgttggggtcaagcttcaagatatcggaggagtttccataatcggagtaaatccaagctttgttgacagaaggtatggaatcagaagaaggagcagccatgatgatgatgtactaaaaagaactgtaaacgtgtggaaggagatcaagaacaagatgaagatgaaggtgtgttaataattattatgatgagatggtgagatattaatagacaaaaggtgtggacagacagcaagaaaaacgtggttattttgtatattgcaattgtagcacaagggtaaaggtggtgtgaatggtattagctccactacttgatgggttccatccaatcagtgaaataaaattttggtgtgaatgcaaataaaaagtacgaattataagtaaatttcaaacaaatatgaaaacaatagtatttgctgcaaccgacatggcagacataatggatgagctataattatataagttctattatttggattcttttaaaaatagttcttaactatatccataagccttcaaactttatccaacttaacaaaacataataagaattagaataaattgtggtaaacttttaatagttttactctattaataattaacttcaaaaacttatattttgggtaaaaccctaaagtcataatagcattagtaatttaaagtttttattcaaatttaattgttaattgttatttttttttttttatttacaaaaatatggtcttttattatgttgtattcttgttaatttactgttatctgtaagttattttttgttgttgtttttatgttatttagatgttttttttttgttaattttatataattttcttgttattttcgtgttgttccggtagaaaatcgtaaaaagtgtaaaaaaaaaaaatctttaaacgtaaaactaaaaatgaaattatctttaaaaaaattgtgttgtatgtaattatcttttttattaatatcttctttttgtcaaagaaaaaattatctgattatcatattatttttatttaaaatcttttgccaaatttaaattcaataacagatttcttttttaatttttcaaaataataataataattaaaactaattttaaattaataaataatttaaaagatatctgatatttgttgacgaggctaacgcggctggaaaattctattttaaatactttaattattatagcaaataatataatctcatttaaattataaaagatataaaaatttgaattcaaataacatatatatatatatatataacaaattatgagtacttcattaattggaagagagaagtatagagtgtgagagagcaagcaaattaatatttttgagatgggttgcgtttggagtcaaagcaaagaagatgagaagaaaaaagagagaaacaagaataa

SEQ ID NO: 381775 - DNA, 1593 bp, Cannabis indica
aaatagtttttgatttttagtacattcttttttttcaattttttttttccaagtaaatggaaaaacagaaatattatttatttatctcttgctgacttaactgaaaaatgtttccagtttgaagaagcagggttgaaagttgaagtgtcacagcgaaaaaacaaaaatgcaagactgtgattcatcaggcatagatcaaaggtttcaagttcgaaggctagaactcttggacaaaagaaaaggtttcatagagctattgcaacaactaactgtttgtgattctgtaactgacaaggactttgaagatagatttaaagagttgagctcccttggagatgatcatgttattgctgttatagaagatgagcaatctgggatgattgttgcgactgggagtgtgttcattgaaaagaagttcataaggaattgtggtaaagttgcacatattgaagatgttgttgttgacgccaacactcgtgggaagcaattgggaaagaaaattgttggattccttaccgatcatgcttgctcaacggggtgttacaaggtgattcttgattgcaatgttgataataaaacattttatgaaaaatgtggtttcaagcagaaagaagttcagatggtgaagtatttcatttgaaaaacatttgcctctaatttcaaaacatcatcttttgagtttttgagccttactgagaaattagttttagtttgaataagtctcttctagaaatgaggaaccctgactacactgcacaaatcaatattggcttttctttgtttattaccattattcatattctttgcttacataaaaatcagaatagcttcattctagatcttgcaattaccatctctataatttgtgcaaaacaaacaacattgaatcaggtctttcgatctattatttatgctaataaatttgtcattataaatttcactcttgctgggttcaagtttaattagatagaaggaacttgggttgagaggggaaggtcaattaaagcaaagaaaaatacaacaacaaaaaagttggttcttcctatgcttagccaaatatgtttaagttttagtaatgggtgtatacacatctgttactttatgttttgtctaaatacagatttggtatctgtatttttaatcatgcttatttggtaccctgtgttttgaaattataggtatttaatactctaaatttaaaattttcacatcatcgtttcgtgggagaaaataaatttttttggatggaagtcttattatacatcacagggaatagttcggtgactatttttagcgggttgaaaagttcaagatgcacaatcatacatgtgtaatagttcggaaggcaaatatcataaataaccatattgaattatttaatatttattaaatatatatattcacatgactaacaataaaataaaacaaaatctctgacaacaaattaaaataaataaagcaaaaaaataacaaatttaaagaaagaagaaaaaaaattgtacgtatgaaaaatgtttaattttgttttagattatattttccttataaataggaataaaatatacattttgttataaatattaataattatgt

SEQ ID NO: 381776 - DNA, 3742 bp, Cannabis indica
ttcttagtctttttgctttaaaaaaacaattaccattaagtagtattagctttttgtaggccctaaatagtgttatcatctgaatttcagctaaatgtagaagcttacataaattgttgggttgaattttggatatgaaatttacattttgaaggtaaccacctgcaaaaacttgtaaccagttacctctttgtgatttttttctcaaactatcttgtaacattctccatcttaatcgaaattccatcttgttctcttattttataactttttttgcaagtaacaataatcattcaatgtacaaaatatgtccataatttcgattgttttatgttgtcgaataatgaaaatagacaccaatatgccattcaagtaaaatagacacacacattcttattaatttctaggaagtgagtcccatgtgctcactaatttgcttcacatatattatttggttactaagaaaaaaaaaaaaaaaaaaaaacaaaaaaaaaaaacccaaagcaaacaaattggaaacattataatatgactatttatgaaagattataacaagtgaaatcaataattagttagtgaccaaactaaagtaaactacaaaaatgaaactagaagaatcaatatttttcaatactttcaaatattgtattattaatttcttcttgttgaaaaatttgtacatagttttattttatttaaataatatgtattaattgataagagcacattttgataggaagcacaaaaagtcaaacccgagaagtgttattattatgtattaataatatctaacattattataaagttaaatgatgaataattttttataataatacttaaattaaaatatataaaaattaatatttaattatacaaataaaaatatgagccctcaataatattaagaaccatgttcttagcatttcactatattatatacttagactttggttcattccatatttcaagttccaaaaattttactttcaacaaagcaacttttgagtatatgataattttgtgtttgaacacaaataatttcatagaatttcaatatattgttttttttcccttttataattataacttcaataaattattgtaagaccctaatgagagatttttataatatgccaacaatttttttcttctggttataatgaaaatattatatttaaagtatttggggatgtattaatattattaatgtatactaagcactatagtaactataatttatatccatatgcatgtgggtcaatacaatatttataaggctagttacaagatttatatttgtattttttggtgaagtagttacaagatatgttatagtatgtcaaccattataattaagaaatcaaactacttaacataatgtttgttaactaaggatgtgtttggtaggaaagatggggagagtatatgattaaaaagattgtggagaaaataaattatgaaattactatattatctattataaatatttttacttttttagtcatttcacataaaaaaattgttaatgaaatttaattgggagtaaatattaataagagattctctatcttcctcccattcttctttgaaaaaaaaaaacatttaggaaagattttcactccttccacttcttctctccctcctctagtcctttctatgaacaaatgtatttatttttctttctatccctctccatttcataataaatcttatctaccaaacataccataaatcattcgaaaaattattagctttaagcccttaattgggatggaatgcgaattcttcttttcctttttagggaattttttttagttatttcacataatttagaaacttattcacttgaactcgttaaattttttaatagagttgctatgtcgacagggctaagttttgactacggtgggttagggtcaaccagtttaggagcctaaaagaaatattttttttaaaaaaatatgcatactttttagaggaatttggggcgaaactctcttaatattttaatttttaaccccttatctttatttttggtggtaaaatcccttaagtttatttttatttgcaaatttaaggtgtcaattaaatattaccgttaaattctgatttgattactattgtatcgactttgaggttttactgttacaaatacacatatgtatacaatggtcattcagttgatatttaacagtaatatttaactggcgtgtcaaatttgcaaagaaaaataaatttaaggaaggttttgtcacaaaaaataaggatattaaatgtaaaaattaaaatataaggagattgtaccgtaaattactctattttttaatagttttcgaaaataccacttattttcgtaataaaaagcttaataattgtttttttaaggcgtaccaaatctcaagctaaatgtttgattttctcataagacttttgaaattgaacattgtcaacattttacaatatctatgttggttatcttttcttctagattagtattaactctttaagcaattattagtaaggggagtactattttcactaacccttcaatgaaaattatcattatcactcaaaagaaaaatgtggcgtgtactattgatgttctcatgtattgaccaaatgttaaaagaagaaaaaaaatatgtggttgattgtgattataagggtatcattatttgttttattctttttttatatatttatatatataattgagaagatgtttctatgtggtatgctgttgttgtatgataaaatatcataaatttttattgaaaagaaagcattgctaggtggtacgtatggtgtttagcaccacgataaactatcgtttatatatagttagtaatttttataatatttattaaagtaaaataaatgagatctgatattaaattataccaatagtgatattacacctcacaagggtgctattcttagatgaaatgggccttagaaaaaaaattgagctcttactataagaataaatggtatttttaaaaattattaaaaaatatgtatattttaaaatatatatactttttatttggactcttaatgagtacgccttaagcgctggtctaatccgcctttatactaaaatcaaccttggctaagcaccaccaataccctttaactatttactaaccaaaaaaaaaaataaactacaactaaaaaattagtgagtgtcaatgtcattgtccatagaaaagatgtaagctatatatatatatatacataaataaaaataggtatagtagagtcaatttaaaagggtccacaactaattaaaagaactttattataagagaaccctactctattatctcatttccatttttagataaggacttgtttggttttggtttgaataattagggcttttgaaatggttaagtcattttcaccaatataactggcttgcaagtaagggtgttggttggggtccaatccaatccaaattttcaaggttaagactatatacacaaattttgaactaatgcccttctcaattattgatattctttaatgatttttttatttatttatttattttggggaatattgtttttttatttttattttcaaagatctaattttgatgcccattttagtcttggataatgtcttaaaatccaatacccacttactactatattatctccataaaagctgtattttttcttagttggtatttggtactttgaggatttttatgttcggttggtggcatttaattcct

SEQ ID NO: 381777 - DNA, 3773 bp, Cannabis indica
taattctttagtaagatgaagtataataagcataataattcagagtgattctcatgccttaaaattaaattgtttttttctctgtgcacttaaaaatatttacaagtttacatcttcataaaaatacaataataagagttcaaatttatcacaacaagctttcatttggcttgttggctcagcttttgctgaattaataaatgatccaatgatagacaccaaataggatcctccaatcaatagcacagacagtagacaaggatagagagataacatggaaaatcaggcagatctagtaattatttcttttttgaaaaaagagaaaggatcctcttgtctttaataggaccctccccaaaatgaattgaaaagcctcacttgaggcggaggaaaacagatctaggaattatcaatgaatgaagaaaaagataagcacatactagaacaatgagatattcaagagacctcactctccctagaacaaagttcatacaaaatcacaatccacgtactgggattcacttagcaaaacagcctatgccaactaatccactaatcttcttcagaaagaaaaaaaaaaaactaattcactaaccatcaatttagtccccctattctaccattattctatcagttccccagtgataagaccataaagctagcatatgctactctagacacttatctttatgtgataatattactaaccgaagcaaatgtctttagagctcgaggtccaggaaatgacttccccgatccgtggctcttaggaagaaggcgtccctgaacttcttctccactgactcctcttgcaatattccataaccaagtactgccatttgtttaaaatatatagatcaatatcaacatagtaaattgctagatatgcaaatgggaaacaaatgctgtatcggttagataactatacagctgaaaaagaaattcataataataatgccaaagtaaatatagaaaaggcaaaatataaacaaaacagaacaaaaccttaagttggaaccctgcttggccaatatagggaagtaattttgcacacagtacaagagaatttattacaagtaataagacaagttgtaaatatatactcaaaatatctgtaaagaaaattgttaataataaatagtcacccagtgttcacgccataaagttcttgcagcttttcctcgggaaactgcaacaaatctccgactgtttttacacccagatcactttgtaaggaactccctagcttacctccaagctgtttcctgccaaaaaaaaatcttataaaataatacaattagtaataaaattatccaacgatacgtgcattcataataggatagctttaaaatcgagtaatttgtgttccaataagaataaaataagatctgcagatactataagtgtaagatcagtttttgaaaaagagaaagaggtctttgtctaagactgaccccagtataaaatatggtcatgaaattatgggcaccacattcacataaacaaaagtaccacaagcaatataattaactataatgataaatacattttttttttggtatagtggaacaaaataataaaaggaaagaaagaaattaaaacaaaattgaaaggaaataactgtttggtttaagttttcataaaagtcattggaataagaatattttgattacttattatctttcagggtttgtgtgtagttttcaatagttatcaagagtctaaaagaaactatgtagttcatttgtaattgaaaggaaatcaaagttagggtcctccccaaggattgagattcccttattcattccttcagagattagggtgtcatgaaaactgatgcctaattttacaagcaatagtaaacaaatgaacgtgcggcaagggaaccacctcttccattctcagtaacatggcatagtgcccagctggattatagagtaaatcatatctgagtaaaaaacttgaattatttttgtaatcaaagctcacattttctttattggcaacgaatcaagcaatcctttcacagatgataaggacacaacagtttgctgtgcaggtttgttcataccacttgctagcttggccaagatctgcaacaaaacatatgtttgcttataataaaatagttcaattcatcaagaaaactatttttgtgcaagctgaactcagtaaagaataaaacaaaactgagaagaagcacttcgcttccaccttattatgagcaatgccagccgaacaagtaaattctgtctccttcaaaactttcattctaagctcggcaacaatgatagccccacaagctaatagtttatcacgacgatcagcatctttcctgcacagccactctcttacgttttccttgtcatcaatttctctctgtagtcaaaacagttttaacataacagagactgctcagagaaaatgagtaagttcacaaccaaacagagtcaagtcttcattttttttttttgaaaaggggcaagcacacatctcaaggacacatgtcaaggacatgccaccacccaaaattttattaaaacctcgaagaacactatgaatacaaagccttgattgcccaaaggcaatcagaaaggcaaaagaaacacaaaaaaaaatccagaacttaagacaaaactacatcagagttttccattctctacataaatctaagaaagagaaatcctgaaaatatttagtcttaaagacccatgtagctgaccagaatttgattttctcccacaagtctaaataaaaaaaagttgaagcccattttatagtgtcattggaatttcaaacttaaaactttatagttcacatacctcattacaacatacccttttagagtagatctatttttaattggctgaattttttgggctttttacaggaacattggctaaatttagaatgaacaacagtttttttcactctaagggactacagattgacgatcaatgctaaactagactttaagttatccaagcattactagtttataataatttaaaagacaattattttcactaaacctcattagtaagccccagaatatgcgacttaagagtttcttcatcaacaagttcaaaatgttctggaggagcttctgctaacattttttctgctgcatcagtcagatcaagatacacttcatcaattgaagccctctcacatcgacctgtccttgcaagaatagaaaccacctgaaaatactcatgttaaaattctctacaataattatcggtagtacattattgaagccattaatttcaaattccatagacctctgaaccagcattgcggtacgtattcaagtcagctttaccacgtgctactgggacttgaaccagctcaatttctgggcatactgttttgcttcatgacctcgcattgaactaaaacgtatagcttaatcataatttagagagacctggttattatgcaaaagcccttgaatgtagatgggaaaaaaaatcaccataccgtttcacaccatatgtacgggcctcatagctaacagcaatcaaagccccaccttgccattcattatattgtaccacagctgtaggcaaaccccgtaagtgtggctgttttcgctgctccactgcaatataatcacattatatgaggagtttctgaaagaagggaaatcactgacaatttggcaccacattcatggatattcccaccgtaccagcaaaaataaaatggatgcatgtatgatggtatgataaagcaacttcatttatatatttatgtatatatgttaagta

SEQ ID NO: 381778 - DNA, 3518 bp, Cannabis indica
agagagagagaatgagttcagtggtgggatggtatggaccgcttatcgatctctcaagtgtcgctcttcacatcggcgattttgttcagcttctcgttttcgttcaccgatccactcccgttcaggtctctccctctctctctcttatatatttgttttgaaattttgtgtttgtttcttggtaaattaccgataccattagcaaatggatgtgtgttgttgtaacgtaaatatatatttatatatatgcagtttaagttatggaagggaggagaagtaattaggagggacattcaggtaggtgatgatagcaggccctacttccccatttctatttggcaaaagcaaatggcatcaatggtcgtacccggtgatattgttttgcttcaaagtaatttaattttcccaaattccaactccttttaattttttacaactttttttttttttttaatttgttgtattgtttttttcttgaaaaatttcagatgttaagctaaccaagtatggagatgttgtcgaggggagaatgattcattgttctaccttacttcctctaattcaccatcataactcacttgcttccaaaggtacaattcatattcatatagatagtgcttttggtgtgaagaaattttgccagattattagatttagttcctttctaatgtgtagaaataaattgtcatatataagatgaatcttttcagtttggttttgagatggaaccccatgtatcttaggctcttccatttcaaattctaacagagattacacgatggtggtgggtttgttgtttggtataaaggataagtagaggtaaattgggtactcaaaaagcaaaatgtaattatatagctgaaatctcatcctcttctttcacttatctctagtaccagacataacagtgaagagtattttctttcttgtctgatttctttccttaatatttcttacgaaaatttccgcctttctttttgaaacactagtaaatttgttgccaagcattgccctgaatgaatgtcttcgtaggtatggatgagctagtagaggcatgtagaataggaacaacaactaaagaaaaactcacaaaggtaataaaatggctgcaacgaacagggttcaccttttgcagcattcaaccacaaggccatccggtaatttatacctttttgaggttactttaagtgttcaatcctttgatgtcatgtcaaatttttatttattgtagtttgttaaagaataaatctatatacctcttgcatctctaacttgtatgaattttgatttctgtggtgaaaattgtatttcaaagttaagagctttgggtttgggatgatttgttgggtcttatatttaattgcttgatattcaaaaatcgctgtcacaactttcttcttcaatgtggcttcttaatcattttaatattaatctatacttgggtcagggtaactgctatttttatgtttttcaattgttgacattttgtttggggtaaaatatgtccaacttgtgaaagttgaaacattgtcttatcaaataactaatcaattgccaaaagtaacttatcaacgttaaaattaggaagtcagtgtcgagctaatgtaatgtaatgcaatgcaatatattatgcatgtttaaaatattttaaggaatcgaaagttgtacatgaatctgaagaaaaattaacagatcagatgactgtggcagtttttgggcattatagggaaaattggatgtccaacattttaaagagggtaaaatgtgttatactatcttacttgacatttgtttcttgcatttcctgctccatttatcatatactatattgtggtgattatatagtccttggtgtttctaattgcaatgtgatgcttaaagtagggatcaaataactggtatttgaatacaatggttaaggattgatttgtagcagtttgatgttctttataactcaaatactcttctcctattctgaaaattactttatatttgtaagctcataccataagtattggtggtcatacatagctcttataagagtgatatgtgtcgaaatgtgcatttagttttggattgaattaagatatgatgctgataattacatatttctgttcattattgttctttcattattatgtttcttatggttacaaaactcagtattgctgttatataattactcctcctgtattgctttgtagaaattggttagaatggatgtgtattatacctatctccttaacatgtctggtctatgtcttgcactaaactccagaggtttttgttcaaatactgaaaacagtacccgcagaagaagatacacttgaaaagaaactggaaacttccagaaaaaagagaatcaaagaactgtatttcactattggaagtatcacacttaaccgattcatgtaaagctgtctttcacgcatgtgttggagaaatttttctaccatctatctctacaactctgagtgaatctgataaagagaggatgttcatcagcagaaggctatttaaaacaagagaactagtttagtaactgatctcatatgtactggctgcaaactatgcggttctcctttggatactcagcatgagtaaatatcgtttgtaaactgctgcttttatagccaagtcaatcaacttgagaactgaatggtttcttcctcttctttgttgcagcaggtcaaggttagagaatgaagcagctcctttatattgctcaaaaagcgtaaaccgccttcatgtagtagacttcatatacaggcctttcatggtatggatgttatcacattgtttttctcatctcatgcaattttttttttggccttatcaacttattttagtgttttgaattttaatctacacctagttatatatatgggatgaatctgagtataccctgctcctcgtcaaaaacaaggcagcagagctcttgtttgggaacatcacagctgagagagtgtattcgagcttcagagaacgacatggtgaccaaaatgttgatccagatccagtagatgcctcactgctcaaacgttatgggatgttagaggatttgggttgttgtacatcagctgcaaattcaagcttgaaattgaagagcaaacctattgtaaatactgtgaacttttatctgatctggttaattcttttaagagctttactgcaagaaagaaagaacagtccattgaaatttgaagtcagtgtaaatactggcttggataagaaaatggaaggtttgaaatggaatctgtttggattccatttccctgaatcaacatttccatctttgccatttacttttcccaaattgctcaaaataaagagttggtttagtcgtcatggttcttgttctgtgcaatttttatgcttaggttctaaactatacttgtagattttgaggtagtatattgggaaaaaaaaaagttatgtttcataacttaaaaaactgttttctgttttttaaaattgaaaacagtttttaaaacaaataggggtcgtttggtaaaatt

SEQ ID NO: 381779 - DNA, 814 bp, Cannabis indica
aaaacaaaaatattatcaaacgctaaattaatttttatttttcccattatcagttaatctaaattgaacggggcacaaaatgtatggatttataacggctatacacatagcaaatattttatgaactttgcgggaaaaaaacatagtaaatattttatgtgaattggttagtctagagattagataaacaaataggtagtttaaatatgttaaaaatttaaataacgcaaatcgtcgcaacaagtaataaaatgtaagtatttcactcccagagagtatagttattttttttttcttattcttcttcttcatgttcaataggagggcaaaatacttaagtggcgtttggttgaaggtaatgaaataaaatagaatagatcattttcattccattcatctgtttgattgtgtttgaaagtattagaatgtcattctaataaaatgtcctttatactattttgttggaattactattctatttttaaattaaaggaaagaccattccaatataacatgagaaaaaatttaataatttttttaatcaattttttttttatacaatttaaattttattccattcaattatcattcatattattatttccattcttgttattttattttcatttctaacaaatgataatgtgtgaatatcgtttggcaaagtcgatttgagtagatcgagtgtttgttggtagttgcttgaccacgtcaatacctgcctctcatgcatatcatgcaggccggtcctgaaatgtagtgggctatagggtaaaaattattttttaggcccttatttagaaaaaaatggtat

SEQ ID NO: 381780 - DNA, 1644 bp, Cannabis indica
accaagaattgaaattgttaagagcctccaagctatggctcaaacatcggcacaataacttcaaccaatgaagataaaaactaaatataagcaccccacatagagattacaacaaccataacaaccccaatgttgacaacaccattattcataacaacaacacccttagactttgacgacttgtccccttccgccgcatccgggctaatggattcctcagaagaagaagaagatgatgaagatgatgaagaagaagacgaattagtatctttcgaaggcttcaatggtgtgggagaaggagccaagtgttttgtcttcggtttcggaccgaaaattccaagtggaagtaacaccttatcgactttgtaaatagcaagctgattatcctcataaacggtaccagaaatggtagcgttaacaattccagtagatatgttaaccaagcttccttcaacagtaacatttagaggaaagtcattagtattgctagcttgtgtccgtacagggttactgagagtctcaaagttttggagtgaaactaaagaaggaagaatgtggtattggacaagctgaactttgtcttcagtggagagtgtgttaagagtgccaggtttcaaagcaccaaaggccccatttgttggggcaaaaatggtcaatgtgttggaaacattcagttgattctcaatctgaatgcttacagaagtactcttaaggaggcggatgaagacactgaagataccggctttttcgaggattttggtgacgtctgttggtgtgtaaagggctttgtggggtggcgcttggacgagtggcacttgagatggcggctccaccgcgggcactggcaaagctgttggcgctttcgttggggttaaggccttagctttagttggggctgcagcagctacatgttttgatggaggttgggctggagagtgagctaatattgtggctcctttgcagtggtaaaagaaacacaaaaacaagaatgagaagtaaatgattgcttgcttgttcattttttctttttctttttttactatatatgagaatggaattctagctaaggctacttagtattaattagctaatgtttatgaagaagtggattatatttgatgatttgtgttggagtattagatgttcatttatataggctatagacacgtaaagcaattgtatgaaaataataatttttaaagctaaaaattatgtattatgtcattgttaagaaaggtggagtgaactaagttgtggtagacgttattagatcgattaatggatatatatggttggttgatttgaaagaaattgtattagatcatgatcatgataaagtgggataataaaaacgatcgacgtacctgatgatttgcctatatatatatatgcttttataaaatatttatataatagacatgtcatccaattaagtgtttatcatgataggggagcgtaaaccttattgattgagatgctaattttttaagaataatttatgatttaaatatttaaatttaattttgaaataattacataaggcactattttttgtaaaatatttacatttttacatttaaagaatgtttttttacatttttacagtttttcaaaaataacatgaaaataacataaaatcaacaa

SEQ ID NO: 381781 - DNA, 2306 bp, Cannabis indica
tatataaaataaataagttactcccaaattttaacacttttttgggaaatgataagactttttttatagtacacctagtgggatataattatatgatttttgaagcactttcactaaataaataattagaaaaaaaaacaaacaaacatataaataaataaatggagataaaatgagtttttcatgtgtatttttttgtaatattagggattatgtatgtaggcctaagctgagacaagaaatgatggtttacccattgagttcatcccaaattttgggtgtttttcactatttatcactactgtacggacacatcaatttaaacatatgggactccaagtccaaaccttgatagggacaaaaatggtggggtttgttaaaaggataatttaggggtaggaggggtccctttttagtcaattcaatttataattttttttgaaaaaaatatggggttttatacagagacatattagttgtagtttatgttctatgcatatcatacctttaattacatttggtaggtgtgtatgtttagtgataatagtgactattttggtataaaatgaagtttgaaaaacaacattttttaaagagaataaagattgggccatttgttaagagcccacatgtcactttgggcttggccttgttaaagagttgtgcttctagatctatctttccaactcttaccaagattgatttttttatgattaaaaatgctgaaaggaattgctcgagcccagatggaaaattgcaaactactcaagttactgtttaagtactccttcttggattatattttttctaatataattcgttcttttaattttgtagctcataatatggttaagtgagtttttacccacaattggtatgaccatttcgatgttagtgatataccttttcaaactcatacgattattggtgcaattaaatttcaaatcttatataatttaatataatatattttaagaaatatcgctaatcaatcataaaatactatttttaaaaaatactaaccaccactaatactcgataacaatatcctaacttagaatattcaaggaattttttcaattgtttgagggtgtagaaagactattgccaactagctaatattgatcctattgaagtgggtctcatatgccacagaagtatgttcattttatataataaacatttatatagacccggattggatttattatacatatatcatttattagattggattgaaattggttgagttaattgattataataatttttaaattgacaagttatctactccaaaatagtggtacctattttcgaagagggtggtaatagtataagctttttacaagaggaaaaaaaattacatattaattaaaaaatgagtcattacaataacttaaagttgaagaatttagagttaggtttttccaagagcaaaaatctaggcttttttggttcaaacccaaaagaaagaaagatgtgagtgaaggggacatttagaatttttcatattgtgaatatttttagtaatgctttttctctaagcaaattatttggaatttgcctttttttttcttcctatgttgaaaatgaaatattgcaccttgagtctttacctatattagttcttaccataaatagctaatatacaaggcttttttgacaactttttttcttcttctatttgactatattttctctttactatttatatgtccctttctactaatcattattcatcaacaaaggcattaccaaattttaacaaggaaaaataatccaaataattttattttcggattgaattaaaaataaaatctattttttatttttctaaaaaattaaaacttgaggataatataattttataaagtttagaataatttcacatatatataaaaatatataatttaaaaaataatatcgtataaaaaaattttgaaaaatattttcctattaactatttcttattattaatacttccctcttaaatttttcttttggtaaaatccgaaacaaaaccccaaactatagatattttcattaatacttaacaataacaaaaagtttacaaaagtatgtatttacattttttttaatatttataaaaatttatctttttattttacaaaaatacagacaattatttttaagaaaattatcacatatacaagttttaaatttttttttccaaatttacgatttgaattgctccgattgtttttatggaggttgttatgtgaattttgattgtgatttaagttattccgttagttgctataaggattgttatgtgaattttcgta

SEQ ID NO: 381782 - DNA, 2399 bp, Cannabis indica
attatcccccactgatttggtgttcccttttggatcatattccacactattttggtatataatttgtactaataaattgttcattgatgctcttctattcattgtttgtagaaatgtaatattatgtattttgtgtaatatgagactttgttttcatttcataattctaattttctcatattttattctagctttgcaattaatcaattaagttttgatagtcccatatgaacaaataaaaatacttcatataaataattttaactcttcactactcttaatgctaacacagtaaaagtttacttaatgcttttagtcctaaatctacacatatatatatacatgaataataattaatcgtacttaattttgtttacaacaaattaattaagcatgggctctaatatatttaaatcatgatcaaagctagttccaatactatatactaagtatctattactaaacaaaactagatcttgcaccaacaaaatatatatattcacacatagatcaactcaaaacaaaagtacaaacaaactaactaagtacacatatatataaccacccaacacacaaaacagtctgacataaagtaattaatcaatttaaatttaccacttatattatatatatataatataaatatagatagagagattagtgaaatgaattaactaacctggaacttgaatagtcataaagcttgccagtacttgagaaaataataagaccaacttgagcatcacatagaatagaaagctctttagccttcttaagtaaaccatttcttctctttgagaaagttacttgtctacttgttgaattgtcaatccttcttatcacaatcttacctctccccattaattattattaattaacccttgatctaataattaatctctcactcttattatctgcaagatctacaaaaaattaacaaaatttccaatttcagttcatgggtattgttcatcaacataaacatgtttgaattattttttttttagaaaaaaaaaataaaaagaagaagaagaagatgaagaaataattaatacaaaaaaaaacccacttaattaaaagcaaagtataatagaaatcttacttttcttggaatgtaggctggaagagggaagaggaaagttttttttttttttttttaggttaagagaggagagctataaagagaaagaaaaaataaataaaaatttatgctttttgtggaaatattaaggaagtcttttgttgcaggtacaaaaaacctcttatttttggaaactaaatactaagagctatcattttaggcttcaaaaaaccacttcctggttttccttaatctccacgcgcatatgtttttctactcgcttggaaaagtcgacacgtattatagtgaatcaaactcagttgtcttgggcgagaggatatcagagatcttgtactagaaaggacacgtgttgatttttaagatggagcgtggaagtgtgggaatgatgcgcgtggggaaaaatagaatcctaggattttcagagaaaagtccttgattcgtggggcgcgtggaaataggtgaaatgattgttgatgtgtaacgtatagatcaccgacacgtggcgcaatttgaaacgaggacactttcttcccttttttgggagaaggtacaaataaaggatcattatatatttttttaatttggttagatgaaattttgtttggtgtgcctttctatttttgaatagtacttttattattttttttttcttctttccatgtgattattattttaattatgtatatatttgttttatataattagtgtttcttgcctaaatattatttttatataaataattagtgataatgatattaattgattactttaattgaattaatatgagagagaaatgttaataaatattagtagtgcttaatggattaagtattaataaattttatacattttataataattattataaaatgttagacattactgataactaataacaatacttaatttaataatattgatgaagaacaagctccccaaacgactaattaagctgactaatcgagccgattgacttaagtggtcactaagctaacttggctggatgaaaaactatttcttattgcaacttgcttattttctatgttttgttaatattatatggtgaattggtgatactatatgaatatgataatgttattattcttggaaaatacaaatatacactaattatttttaattttatttcttctttggtagatgatattaatatttactcctatatgtttgaccctctcgtgttcatttatacgcatacatacgcatgatatatatatatatatatattagcaaaaagttacctacgacacacatatattaaattttatgctaatttttt

SEQ ID NO: 381783 - DNA, 3988 bp, Cannabis indica
  modified_base (66)..(66): a, c, t, g, unknown or other
  modified_base (70)..(70): a, c, t, g, unknown or other
actaatacagactctgttttaactttttattccaggctcgaggagccatttttaaaccatatatanctcngtgcaataagcacacatgatctgggaactcatcatctttaaagccttgaggttgtttcatatacatcacttcattcaatgtcccattgaaatgcattgcttacatcaagttgtgtcactctccaattgttagacacaacaaggagagcacagttctgatagtaacaggtttgactacatgggaaaaagtttcttcatagtcgattcttggaacttgcaagtatcatttggcaactaaccttgacttgcacttgtctaatgtcccatgtgcatttaattttactctaaagatccatttgttgctaatgacttgcacgctcaatgttcacaattgcagtagcattggaaacaacaagaatagaaccagaattagtgttacttgtgtaaaaagttgtagatggagactgagatatgcggacatgagtatttacctattatgtggtgttggattgaggtgagcatgttccaggataacatgtctcattgaagacaacatttctggcaatgtaaattctgcctttgctgttttcacataagtatcctttgtgataggatgagtagcccaggaatagacactgttgagatctcatgtttgttttgtgagagttgtatgtccttagatgggggaagcaggcacaaccaaatggtttcattatgttgtagtcaggtgctttcccaaataaacattcaaagggacttatgtgagatagaataggtgtaggtaacctgttaatggtgaaggttgctcatgagaaagcatgccaccaataggtaagatcaaggccagcctgagcaagtagggtgagtcctgtttcagttacatgtctatgctttctttccactctcccatttttctcatgagtatggggacaaggatgactgtagagaattccttgatatgatagaaatttggcaaagggcttgtattcaccacctccatctgcttggacaactttaattggtaattcaaactgatttttcaccatgctcttgaatttaacaaacatgtcaaacgcttgagacttgacagttataggataaatctaataaaacctactgaaatcatctatgaacaaaatataatatctgaaaccatcttcggatggaacatgtgagggtccccacaaaatcagtatgaactaactcgagtggttgagtggcatggctattgaatgagggaaatggtaatttatggctctttcctaattgacaagcattgtagaattttaatgtttgtattgtgccagagtgaggaagttgttttaacaatctgtttaaagtagtttggccaggatgtcctagtttacagtgccaattattcacatcattattggcataggtaataaaaactgaggagaatctgaggacaaacatacatttttattgatgaaattggaattacaagaattaagagattcaaagatctcattattatattgacacgtgtgtttacaagacacttagaactaatctcagaattttcaagaaaatattctgcagtggagcttgatgaataggaggcatcaccaagagagtaaagaccatgcttacgtttccctttgagaagaaaaactcccgtttgattatccttgacaaaacaataatgtttgtaaaattcaagaataacattgttatcatcagttaacttggaaatgctgacaaggttcttagtaattgaaggtacatgaagaacataattaagagctaaggaagatgatgaggtaagagagggcaagaatgtggaacctgtttgggaaatcattaatttcttaccatcaccaacaaccatggtttcaggacctgtgtgaggtgtagggttgtctaaaagtgtaccatcagaggtgacaaggtaggtggcccctgtgtctgcgaaccattggcaatcatcaccaaagtcttgaaccattgtagtagcatatgccataagatcatagtcaaactcttgtttaatgagataagcacgaggattgttggggttaggctttggaacttgcaagttcttgtcaaaatggtaatgacaaacaggagcagtgcggctagcttttaaacacacttgacatatcactttggatgggggaaatcttgagtaccctctaccacgaccttgagtttaatgtgagccatcatttgagctagatctgttttgtggaataaggtcgagcaccacctgatcttcctgatccaaaggcaagattggcttgtatcctcattgttagatcattcatttggtggtgatgttctagcctgctttcatgggacagaagaagagcttggacttcttcaatggtgagagtatcacttcttgaagtgattctagagacaatcgagtcaaattctggtcctaagccatttaagacttgaagaactagatcttaatcctggacaggtgaaccagccaccgtgagagcataaaaaatagactgaactttttcaatatacttagagatggataggttacctttttgaacacgggagaattgtcccttgagttgaagcaatcttgctttagtttgtctagagaattttagttctaaggcatgccacacagagaaagatgaagtgtaagtggcaactgaggcaagataacttcagacattgaggaacgtagccaagaaagaaggactggtcttttttcttccgctgagtgtactgcggattaggatcaccattgatgaggttcctaggtgaaggaaggtcaatagacagaatatcaaatttagagaagaataagaatgagaatgaagataagatttttggcttgaagtctcaagactaccatgtgttgttacaatacttgatgctagggggcattcaaaattttttgaagaaagaagtccgggatataataattaaactgtgtgtatttttctaaaattgtgctcgaagacattgaatgttgaagacttgaagagcatgcaaaaaagtattctggacattctttgcaaattggaaactattttctcactggcatatttttgacataatggtttacttggtgatgtatttcctaaagaagtgatacttggggccccagtgcactacatgtggatgtatccaattgaacgagtcatgtccgtgtacaaataatatgtaaaaatttgttcttaaccggaaggatctatttatgaagcttatgcaattaatgaggcattaagcttttgttccatgttcttctaggaagttgaaactcaatttaaccaaccagatcgaaatagtgatgtcgtctcaaataagcctgaaagggttctctgtattcaagcatgttagtcgacccattggtaagaggaccgtcgtgttttttccaatttaagaaaagcttaaggcagagtggtacattttgaacaattgtactgaagtggagaagtatatcaagtaagatactttttgcattcttaatttactatttatgtgtagtgagcatatgaatgagctacaacttgggggtgatcaaaatattgacacagctcaagagaacgagttttccagttggttcaagtctcaagtaagtattgttttctattaattttgtcattcaaattcgatttgttgtactaatattgattatatttttcactcaatgatagatcaatcaactttgagtgaataaccctgggaaagaatcagatgagttgtatgccattgtaaatctctctaatccaacatgctattattatcctgcatatattgttaacaatgttaaattcctagttgaggatcaagatgacaatcaaacacccaaaacagtgatgttttggtacctggagaaggtggtaaaaaattttgtggcatactcaaacaagtctatgagttgactaacttgaaggattatagtgttatcatttttaggtgcaagtggtgagacacaaaaggaaacaagacagaaagtaataatttttttcactagtgtctgtgtcgcccg

SEQ ID NO: 381784 - DNA, 2709 bp, Cannabis indica
agaaaaagaaagatatagctctgtgttctatattatgattacatattttgttttttaagttgctacagaaaatttggtatgctcaatagttactaatttgttatgtagtgttcaacatgatcattttcgccgacgtttaatcttctgataaactcattttattataactgatatggtaaagcttgaaagaaagctattgaatttgatgacatgccatcattgtgggcaactattatttgcttcatgctataataagcttgtttgatcaagcaaaactctaatctttgttatgaattttttaggtttaaagaacttgccacttattcatagttatgaaagcattgaaactcttaccaaaaacattaaaaaatcggaaaggaaacacgacattgtcattgcagtaagtatttcattaattcatatgattcttcttcttctgcataaacttttgcaccatgtatttagcatcattttgatgatactttcttgtttgttgtttttcggtgaagtcttatgttcttggagagattccatctttgaaggaccgaataactacagtacgccagctgtgggatcttacaaaggatgttctggtatgttttcaaaatatgattagtatcgaatctaaacatgtccatctttgcctgatttcctttaccgttatgatatctataggttttggttgaacccggaacaccacaagggtctagtatcatttctcagatgagatcacatattttatggatggagaaaagggtacaaagtcctttttttaattgttattttgaaaaatattcgcattgtatagacaagagactgattctgtgtaaattgttcttcatgatttcttagaaattacgaaaattaaaaattggaaccaatgatgatacaacaaaggagaaggatttggtggccgatgctcagaaaactggtgcatttatagttgctcctgtgagttgaatagtgtttttttagtccttatttttctctgatgttagttcatcaccaaagacgagtcttttatcgctttgtttgccaatttctgcagtgtgctcatgacgggacatgcccgttggagaaaggtggaacgtactgtcattttgttcagcgcttggagaggacatcgattcaacgtatatacaaggtttttctcaattaatgtcacatactaactaattttgctctggtgacaagtttaactgatgatttttctctcgattttcgcgtgacatccttcagcgatcgaagggtaagcctttgcgtggctttgaagacgagaagttctcttatgttgttttcaggagaggacaacgaccaaagtgagttcttcctactttctttttttattttgatagatttaagggttaattctattttgaacccggtcttttgtgaaagttaccgattgtactatctattttgttaaatgatgaaatagattctatatttttcaaaataggatctttagctcgattttcggctattttttttttcttttaataaaccaagttaaagataattattagcacaaacagtagaaaacataattagtttaatcgtaacacctatagatcgaattattattaagtttaattttgataaaaaatcagttaagattactattttgtaccaactagaatccttctttttttcgagccagttcctccaccattgcgagccccaattagattcaggcataatacactttttagttattgggagaaccaattactctcttgtggatctaggaaaaagttcttagagatttttttttgtcgaaaatacagtatccaatttgttacttacaaaaattagaataacttttgcaaaacaaaggttccactatgatatttaccctatctttaatcaccctaaacattgtttttatccaattatcaaaactctatcattcttataatattaaaacttcaatatccagggaagcttggcctcttaacggtatgaaattcgatacattgaaggaacaacatgctaaaaggaacccagaagatttagaaatcgattacggtattcatttcctttccttttttccgtttgagtattttgtcaaaataaaaataacttctttaatgttttgttttgatctttgaccagaggatctagtcaaacaacaacagcagcaacaacaacaagatattgttctgtacgaggaacccgatccagttacctacgattctgatgtcatggaaacaactgatgtcgacgaaatcaatgaaatagatgatgatgatgatgaagaaacacctgctgatctcggtagcggttggggtaggataatcttttcacctattcgaagggggaagcaagtgacgatgaacatttgtcgatcaactaaaccagacggctcagaaggcgcatatgaccgagttattgtcactaagagtaagaacccaactttacatcatcaggctagaagatcactttggggagacttgtggcccttctaaattttgcaaagcaaacttaaaatacaaaacaaaacatttccttgtaattattcatgtataatttattgtttactatatgaaatatacactaccaaacaataagtagctttatccaatcgcaattttgaaatcaaatggaactttttattttgtttagttttttcttcatgtcatggtttggaagggattgttttttttttttttaaactatgaaatatcaacttcattgaaataaagcatt

SEQ ID NO: 381785 - DNA, 4868 bp, Cannabis indica
aaggttgactaagaaattgtaatgggaagttgacggtagccctcttctaaatcatatctactatgtatgtactttgaagaaactgttatgtatgaagaaaaaaaatagccaacaaaacatagaagctgaaaatcaactgcactactaatacttcaaaactgtacaataaccaaagaccactcagtcaaactccacaagtcccagaattggtaaaatcttgttttatattgatgttgcctaaggaaaaacaaacaaacaaaaaatcaagtttgatttgaggactgctttattagtggttgtgaagtctttccccattcttcaggtgggctcttaacttccattaacaatgccacaacttccttcatagttggtctttctgtaggagaagagttgacacaaaacatagcaatgcctagtgtttgaagcatctcttgcaccatttgatctggtagaccttggagctttgtttctagaatcgacactgctggttcgaagcttcccatcttcttcttcacccattcgacgatgtgtagcccgtctcctaactgagatggagactcaacagcacttctcccacttagtatctctaacaacacaactccatagctgtacacatcactcttctctgttatgttcattgtgtatccatactctgaaattgttaattaaccaatattgtcaatacaatgaagattatatattatgaaaagttaagttataacaataaaatagaataaagaattttgataaacctggagcaatgtagccataagagccagctactcttgacatagcatggtgatatgtaggtgaattcatcagttttgcaagaccgaaatcagccaaataagcttcaaactttgaatccaatagtatgttattgcacttaacatctctatgaagaattgcagggacacaatcatggtgaagataggctaaaccttgagctgatccaactgcaatcttgtacctagtttcccaatcaagattcctgttttcttgcagcagctgttgcaggttaccatttgagatgtagttgtagagaagaagcttgacacttctattcgaacaatagccaacgagtttcacaatgtttcggtgtctaatgtgtccaagaatctgaatttcagctgcaaatgaatctattggttcttcctcttgctttgtcttccacagcttcttaactgcaattaactcaccactaggcatatctgctctgtagactactcctgaacaacctttaccaattatgttttcttctttcaagcaatccaagatgttgtcaatggtgaagttgagcttttgaaatgggatgaaagtccatggataagagaaatcttcagctcctgatgatgttgcatagggtcctaaagatttctcaaccatatacttgtttctagtaatcagaatccatgaagcaagaactgctatggttactgaagccaaaatcactgagattatagcaatagttttggcagatttcaatccagttcgacgcatcatacttgaagagcaagtaatcccatcagtggactcacaaagcttagagttttgaagatatgaattgacagatatagttctgaagaatggtgtaactgggattggacctgaaaaattgttgtaagagatattaagagaagtcaaactagttagagaacccaatacctcaattttcccattaagcatattatgggaaagatcaagggattgtaactgagtcaaactggctaacttctctggtatctctcctgtaaacccatttgaactcaagtccaaactgattgtcaagcttgtcacaaaaccaagttcaggtggaattggaccagataggctattgtagctcaaatcaagtagagttagcttctgcaagttgcgaatagatttcggtattggacctgtgagtaaattgttgttgagaatcaacttgttcaagtagctgaagttcccaaaactcccaggaatgttgccagtgaagctgtttttactgagatcaagaagctctaaattgacaagctcaccaagctctgatggaatttctccacttatgtagttgttgtgcacatctaatagttcaagaacagtgatgttggcaagctcagaaggaaggcctccagagaaatgattcatgtacaaatcaaggaaaacaagattctgcaattgaccaatctccctaggaatttgaccagcaagctggttttctccaagccttaacctcactaaagattgacactttgcaacacttttaggtaatccacctgttaatgaatttcccagtagtagaagcttgctcagcttcttcaaactgaaaatctcttctgggattgacccagtaagcttgttccttgaaagatcaagtgcatagagttcagtgcagtttccaaaggagggtggtatagttccagatattgaattaccccacatgaagaaactttgcaataatttaagctcaccaacctgccatggaattgtacctgataattgattcttatcaagctgaagagtagtgaggctagaacagttgctcagctgccatgggattcttccactgagagaattgtctgaaagatgaagctgttccagaacaagtagcttccccaagtcaccaggaatttctccagaaagatcattagcagatatatccaaaataacaagtgaggaacagttggaaatctcagctgggattgctccagataaggcattaccccaaagaagcaagctagtaagcttttgcaacttaccaagttgaggagggattgaaccagtgagcttgttcatgtgcaagtacagattcctaagctcagaacacaacccaagttcaggtggtactgaaccaaatatctcagtatcataaagagccaaagtttggagatttatcaagttcccaaatgaaggtggtatcacaccagaaagtccagtggcagcagcaccaaatgtagtgagattagtgagcattcctaactgtgatggaatctctcctgttagatatggattcccaccaatccttaactgttgaagagaaaccaaagaaccaagttgtgatggtatggaaccatttataacattatcttggatacatagaatttgtagagaagtaagattagcaagctgttgaggtattttaccagacaacctgttggagttcaagaaaaggaattggagagaagaaagtgctccaagctctggaggaatggagccagagagagagtttgatgagaggtcaaggaggcgaagataagtgagtttaccaaatgaaggtgggatagtaccagagacattggtggatgaaaggtttagaagctgaagagaagagagagaagagagctgaggtggtaaagatgaaaggttaaggaaaacatttggtaaagatagagaaatgactctgttctgtggagaacaagtgattccctgccatgaacaaggagtttggcttgttgggttccatgaagacaacacagaagaggactctttagaagaagggtcagcagcagaaagaagggacagaagagcttctccatcaggggacaaaccgttgactaaactcctagtcatgtttagataaaacaccaccaagaatgaaaagaaaagatgagtgtttttttccatttttgagttctgggaaagaaaaaaaaaatgacttcttgggttgagagggtgaagattaagaaatggggtttgaagaaaaaatgaaggtgcttcttgttctagtgagcttgatggaaaatggtaatggtgatgaaaaaagaaaaagtccactctaaggagacaacatgcatgtgaaaggacgctcaatagttatggggaatgcttaaactttacatcaaggtgtcaaacaatgcatgtgagccaaaaacaacacaataaaaataccagattttctcctcttttttgttgctttctccaaagtttcttcagagtaaaatacacaaacagttgttgaacaaactcaaaatcattactattttcagactagttaccagaaaaacaggacttcccttcttctggggtgagagtgagattaaaaagaaccaagctttgctactcaaacaatgaggtgttcatataaaggaagagtcttttgttgtttagtccaacaatggtggacatgggtgttaatggatggatatttagaggtcagatagtgatggcagagtttggaaaattgaatgtgaaaatgggagaagaaagaagaggcaaaagagaattcttttgttttgaaaatgaggttctttccttcatttgttgtaataaatattgttttaagatatcaagactagctttgaaaaaaagtctcatttttcactatttttataatccaaaaacatattaaaataaagaagaagccatatattgtctattatattataaattaccgaccgaattgactgaaattaattagagttaccatatataagtgtagttaaattttggtgtgatttgtggacttgattggtgttataattagaatgaatagaatgacaaatttaggaaaataacacataaattagtcaaaacttatttgaaataaatttttactatataaagaaagagaactatccattttaatatataaatatttaaattaaaaaaatatatattcacaaactacataaaggacttaaccacttgagcaactctcaagtggtcataagtggttgtgtgtcttgaaggtcctgggttcgagtctcagataaaatatggctataatatataaacgcttaaattaaaaaaaaaaaaaaaaaactaacgtaaaggacttagtaggggaaaatagtcaattcatactacagtagaacctctattcaagaatactctattcaagaataacctctaatttgttataaaaaaaaatgaagtcccaatttgggcca

SEQ ID NO: 381786 - DNA, 2514 bp, Cannabis indica
gaagggccatctcctataaaaacagaaaagaacataacagttggaagctattgagatgatgttgaaaacagaaatcggagaaagtgaattgttgagcaactcttacctgtcccttgatgatcctaccagcacgatcatactccacttccttctcgctttgccccagtaaaagttccctaggaatttcttcctcggtagctgcattgccatatttttccaagatggtgtcctttgtttgggacttcagtttctcttttatgacctggtagttcttgtaaagcagctcggcttgggacggagccgcttgcatatgaatatcctgtcccttgtcaaatgcttcccaagaatgaatgttcatttccttgaactccaatgcttggccactatttctatattggttatcaccctacaaatttacaagtgataagaaacaaaacaaaacacacaatagttccacaaacaaaaccaaattttaaatgcaaggcacatactaagtagaatttttcgttcgggtctgcatctggaagaggatcctcacgcatagaacgggtcttgggatcgtaatgtgcagagttaacatcaagattaagaagatactttgctgtgtcctcacgaatacgcaaattccttgcagaacaaaacagatagcaacattaatatatgacattacacgcaacaaaaactccaacattgtgcaagtcaattaaaatgatggtgctttaaattaaaccatacctgacagttcctgtgcttccaccaccagtagtccgcacacgcttttcaactttcgcaaagtccatctgtttggactcatcaactttggcttcatcaaccctatcttcatcaacatcttcatcactatcccctccctcaccgtcacctccctcaccatcaccatctgcattattattcttctccaattttttaaattgctgctctttcagaaacttccttcgagcttcatccctcgcttcatatctctcaatgacaagagaataggtcgacgcatcatatccattccaacgatcacgttttccatcataatcaagctcaaaggtctctactttttcatcaggtgcaatatgcttgttcgtccacttcgctcctactttgcggggtctgtccatacaagcttttgcatcgtgtgtcatagcaccacaactgcatcaaacaaagaaatcaatcaattcgtttgaagtcgaaaccatcagaataaacacaaactagcctcaaactttgaatcaaacacattacacattccacctacttttgacatgctccttttcggtatttatcagcttggaaaatcttggcacctctatcataccaagatttagtataatttggatcagatttccacttcctttgatgttttaaactctgataaaacaaaacaaaaaaacaaactttaagcattgagaaatcatatcacataatatttggttcaaaaatcgaactaaaagagataacttacaggtctctctgagttgagataccaaggtgcagaggacatatactgaggaatatgaggattaatctcttttccatcttcatcaacttcagcaggagcaagccccgctttacgagcttcttccaattcaatttgctttctatgatcttctctagatttgaatgccactgcaaccccaacaatcccaattgataaataaacctaaagctgttatagtctctaattatgtaaacatactcgaaagcagctccatttagttaaattcagattcgagatttctaaccctaaccctaaaatttaattcaatcaaattgcacaaatctaaggcctaatggaaaccctaaacatcgatatccaaatcgaaaatttaaacaaaatagaggaatgaaaagaagaatagaatagaagaaagagatttgaaacgaacctgatgcagtcgccatggcttctcttctcttcggagaaaatttttgagcttgaatcgaaaaggattgttttacgaactctgaagaggtttttagtgttaatggctatgaaatttatattaaaataaaaataaataagtaaataaataaataaataaataaagtcggttatatcataaaaataaaagataattaaatttatattttatccttttcttttccaaactatattgatatgattttccctttcaaagaaaattatatccattttctaaaaattaaattttataatttaaagtttatgttaaatttctcagcaataaattggttattatattaaaaaaaaaaaaaattacattccatacactttttatattgtcatcttttattttcacattcttttttaaaatctatcatttttaccttttttttttaacattgtaccaattttatctctgtcacttcaagatactctccatctgactttcttatgttagggtattttaggtacaatatataataaaaaaaaatgtatgtttcaattaaatataaaattaaaggtaaatttagattaattaattaatataagtggtatttttcaacttacctcaaaaaatt

SEQ ID NO: 381787 - DNA, 1543 bp, Cannabis indica
taaatgttttttcttgtagtgaagattcagtcatcgagaatagcaatcatgacactaagagttgatcctgcacctctcaataaagaaatgctagattgaaattctaattagcttgatttacatcactgaggaacagtgttggtggcgccacatcttgaatgaacctttgaagataatttccttgaatggtagcaacaatttgctgcttccacgtgataaaattgtgatcattcagtttaatcaaaattgtgtgattgaagaaaaccaaagatctatctgcttctttgtttcgagttccaaaagctacattcagcacaggctgaactaagggaagatttgagctcgagtctccaaatcttgtgcttgccatatttgctgttaatagtagaaatagctctaataccatataagatacattgtatctctttaacatgattaagaacaaacacagtaaagaaagggaaaggaagagaagagagtaaaagtggaaagaagagttggaaagagaatgagacgaaaaaatatccaactatgttgaatctgagttgaaaccagtttatatacaaggaaaaccaaaggctatctgtcttgaataacaactgtataaccgaaacataatagaaaactaacccttttaactaattccataacaaactcaactaacctatttacaacaacacattccattaagctattcatttcttttaaataaataaaaaataatactttattaaaatattatcccctcctaatatataggagaattacgactctcttgacatgaattttctcttattcatttgtatattctatttcttcttactttttgttcgaaaatgagaacaaaaggaaaatagcctcaaatcttgacatacactattagaagtagtgagtcggttagtttgttaggttagttggcaaggggtcaatgttagttgcttagctggtctaatagattttattacgaatctttgtcctgtaatcatgtataaaaggatctcaaatgaatgataaagatttgagctcactttttcactcatttctattttttttcatttctttgaagttatagttgccaatggtttagcttctatccttttagtgaaatagtcaactgtgactacaacatattgtactcctcctttccctttacaaagttatccaatcaaatctatcccccatatagtaaagggccaaggagactgcatttgtgtgagcttatttggtggagctcttgggatctttgagaatctttagcaattgtcacatttcttgacatagtccattgaatccttgatcatggtaggcaaaaagtacccttgtctgagtatctttttggaaaggatttatcctcgagcatgatttccacagaatctttcatgcactacaattaatagtcgtttagtttcttccttagtgacacatcttagaagtagaattgagaagccatatctatacataactccatccaagataagacaccgggcaactttcttcctcatttttcttacttcgttcctgtcttctggcaggactcatgttt

SEQ ID NO: 381788 - DNA, 5066 bp, Cannabis indica
ctctacaacctgatatacagaaacccaatttagaaaaagagagaatcccttattaaataaagtattgacaacgtgtgtaagaaaccctgatgcagctcagctcaaaatatatatgtatttgatacttacagactgatcaactattgggatgagcgattgcagcaccttagccacgttgaacttgatgttgggtactcttgaaagtgaaaattcaggagagcaatcaaaaatcaccataccaaatcatatccttgctacaaataaagtttatagctcacgaattaactaggtacctgtccttagatgcgttgacaacaacaggcagcagttttgaacaggtaatttctgaagccatgactggggcaagaagagagattgcacgcaatatagtcatacgatacaaataatgtgggttgttaatcatctccaatacctgtccagataacatgacaatttctgctgaattagaaatatatcagcatgtaagtttattttcatcaaaaaagacaaataaaaagggaattcgaactgcataatatgattttctttttatatttatttttttgaaattaggattctaaccctacaatatttggggaccaagaaactagaacaattgctatgtaggtactaggagggactcaaacctcagcactgccttatgtgataaatacacaaaatattaatttatcaataactgaacaaaaatctcatttaacttaaaacaaaaccatcaacatataaaatctcattgtaagcagttacttgaattccatcccaaaagttcttgtaatgtgtcacccaaaaaatttgaaaaaaaaaatgcaaccactggagttaaagcaacaattgcaaagtcaaaattattaataaacctgggggattatatgctgcattgcccagtctggaccaaattcttctgcaagacgcttcaagttgttagcagctgcatcacggatggagtgaacctgcaatgaagcaccagaataatgggcaacccaaaaaaatgcatgagtagtcaattatatactgaaactatctctaagcaacgaatgcatatatgcatgtttgaaacacaaaagtgctataatcttgtatcagcaagaaaaattatcacataagtaagaaatttcccaatcttcttacacgacttcaaatggtataacttcataatttgatgggatcatgaatcatgctctaaatggttcaaatattaaaattctgtcaaagtttgcacctttcaccactcacagacaaaaaagtatactttctacccagaaataatcgattaacaaacacagagatcatacaaacagtaggtaacactagttgacatgataaaacacagcttacaagttacaacaaggacgaaaaaatggatgtatatgtcagaaaaagtgaagaaaatagtgatgtgtcgttcaaaattggtggcattcaaatcggaatcacacaaaccttatcttgtaaccactgcatgcagagggcgccaagtttgtcatcaaaaaagcctacacccaattggctagctaataatggtatatactctataattgctagccggaccctccaatgtctatcctcagcaagctcaacaatcgctggtaataaggattgagacagcagatcaataccaataacctgcacaaaaaggaacaagtataatagaattagattgtacattgtgctttacaggtagaagatgttgaataataataataaaaaaataaaaaaaacacttagaagtaacagatgaatttgaaaaccagacctgattcacttgatcaagcttgctaataatattaagacgcacatcaggaaattcatccttcagaagagagagaaaaattggaaggagctgttcaattgttgcatcctgcattgacaaccaaaaagatttcttaaaatcacatggcagtttataatatgacaaatgctaaaataacgttgaaagatcaattgcatattccagacttataaaatcaacacctatggaatttctttttttttgtaaggaacacctatgagaaattgtagtatttattgaattgcatttttttttttttcaaaatacatatattttaatgcaaggtaactccattgtgagttgctggaaaaagaaataagggcattgacatagataaaattactaatgatatatatacaaaatactttaaccagacccttccgcaacatctcagataatactttctctgtaatttgtatttgcataataagtttagaaggattgatgtgtcagactagaaagggtataggtgttaccatttggagagagaaaggagtaataatcttttaggatctcatatatggtatattagtcattatacacacatatatattgaggtaagttaaaaaacctcccactaatggagtgacgaaaatagagaacacaagaggtttatactgcacttatcatttccacctacaatctttcttgccaaacaagaaactttttatcaaaatcccatctatttcccccacacccacttcttcctttgacaagcatagccttgacaactgaaggcaatcaaaccatcaaaagtaagtgtgctcaaacttatgtatgcaacaataatgctaatatccagagaagattcgcctataaacattgatgaagagtataatataagagcgtcacttaaaatggctcttagtttctacatccgtagaagacttgcggattatactaaccctaaaataaagatttaagttgctcaacctcatttaaaagcaggcaacatttggcagagggagacatagatggatggaaacaagtagagggacaagaataggagtggcaaaattttccttgtttacaatgattgtaggataggagagaaaatctgagttagttcattaaacaagattggccatcagttcggatccatccacaactgaaagaactttttataccaaatgaaaaatatgttcatttaaaatcattaaaagataattaaaaggaatataataattttgcaaataaaattaaatctatcatttcaactctccaaccatttactacaaacaataacaatttaagggattgttactgttttctcactttatcctaaggcctcctccttcctcttattgtatgtaagaggaattgaaactctagactaacataaaaataaaaaatagaaatagaaaaacctttcctctaatacaccaaccacaaccaaagaaaaaaaggaggaaacaacctaaaaggaaaatagtgaaagaattagactattactaaaactctaattactgtataattgtaaaacggcaaaagaatataaatcaacacctcagcagatgatagttaggtgcaacacggaatccttaaagcttgataatgagataaattcttagctaaacaagctgcctatgtatgatattcttacctttcctaagattggagccattcccattatcacagaagctaaagcagatcgaacatgttgagaagaatctgatgacaattcctacagagttcattaataaagcagtgatatggcagatgcttaagaaggaactggcctgcaatccaccaaagtggcagaaaataataccagcaaataaaaaacttatggtaaacatgtgcaccttcacacaaggaagaatatgctgaattgaaagttctggactcaaaatccggcaaaatttggtcactcggccagcagatgctatacgtacttcagcctcattatctcgaagcaaccgcacgtatgcagggaccaagtccgtcctgaaataacatatatcaataattcatgtttctcaacatagataaagatgcaacatttatttagagaggtctgaaactgtcaaacaaaagatgattgaaattatgtgtcatgaaataatgtcatataatctcactcaacaccgacaaatctgacattaatgaaattcattaccttgttggctcaggccccactgcttcgcaaagctcatacagttgatttgctaccatgtaacgaacacgccaagacttatcctaatcatattcaaggcaacataccagcttatggaatcagtgaaatgcttatcagaattacaaaattatggagtcagagaaatgcatgtcagaattagaagcttatgggatcagtgaaacacaaaaccagctatctcataaattccaggtggcaataattaaatgctaagcttgtcaagaatgctatcagctcatatattttttttgtttcccagtaactgaaaatatttcaaaatatattatttgtttacgaccagaagtgtgtacaacagtaggacacactaggtaaattgtcaccttaaatctccagtattagtactagttaggcaccattaataataaagacattattagatttaacatatacatattagaatatcagtagaaaatatgacgtacagatacagacatggcaattcaaaaatcaatggaattgaaatctctgagaagtatgcaacttatagtcttatacatggtttcctagaatctccatatacttttactgctctctcatagcccaaaattatgcgtaaggtgtacctgagagaagttaacaataacagggaggatatgtgcaacacaatcttggggctccaacaattttccaagagctgcacacccctcaacggccaataatcgaacagaatcttgatctgagataaaattaattatgagaatgtcaaaagtccttgcaaaatgtattgtggtataatatgaaagcttactttaattcttaaaattccgatctacagaaacttttaagaaataatgatgacaattaatgtatacaaacaaattatttgaacgtaaatataaacagcactcaattaccatcttgggtaagatcatcaaatattgacatgatttctagcttcaaatgagcgggttcaacagttgctgcaaatttccccagattcgaggcagcagacctcctgaccattggcatgtcatcttgacacaattggttgtatattgatcgcagttctgtcttcagtgcatctggcgcactaggatatgcaatatgaaaaagcccacatgcagaaactcgagcagtgaacca

SEQ ID NO: 381789 - DNA, 1161 bp, Cannabis indica
gttgttaatccttcttatttttcgatcggctcatcatcaaattattgttagtagttgtgaatagaactatttgcaattgaaagattattggtagtgcagttatgtaccttacacaatagttgagtgctcaagctatgtaggttgaatgaacatgctgcaacagtttctactgttgtgtcttctgagcggtggataaaatgaaatataggagtttttaaggttaaatggatgctgctaatttttcattctgtatttttatttttagttttttttgtttttttttttttttttgttcaaacaatctaggaattaggcaactaattatttggtcccatttttctaattctaattctagtcgtgtctccaacgaggagatgtcctgggttaattgcagactattattttagttgattgtcattaataaaattccattacttattacaaaaaaaaaaaaaaaaaaaacctattatttaagatatcattcacaaccaaaaaaaaaaaaaatattttagccatattaaattttatgtctacaattgttaagaaaaaaaaattctaaatctacatgaatgtaaaaattgtttccatattttagtcatatgatagtattgttttcatcgaagttaatgtgaaagagtgcatgtgctttaagatcttattgaagtattcaactactactgaccaagtggtcaactttaccaaatattaattgtgttccagtagctgggttcatcaatctgcccatggtttgtcggctaatatttttgttacgaggtgactccaaattttgacagatacttgggtatgcttgggtttgtgggaaggatgaaaaaagcttgggtttaaatacatgaaggatcacatttggaacaagttaaagggttagaaacgttctttgttctttgtgactggtaaagaagtattgattaaagtagtggttcagacgatgctaaattatgctatgagttattttttattccctaaaaatacgattattagtatcaatagtatggcttctaaattttggttggcttaaactgagtgcaaccaaaaaactcattggtgtgagtgagaaattctatgcaaaacaaaggaacaagaaggttgcactatagtattaggcacggttcttaaccgtcgcctatacccagttataggcga

SEQ ID NO: 381790 - DNA, 3184 bp, Cannabis indica
caatggattcaaactgtatggaatatgagtttaggtattctgtgaccaggatccacttgcactattctaagaactctttgatgtaactaaacctaagtcatcaaaagacacaaccatattttttaatctatggcatttgtatcttgttcatagtggttttgacaagatcaatctctgcaaagagttaatatgcctatatccactgaaagtagttcatctcattcgcagatggatgtacattcaggggtggatatgagtttttcgttgtattcttaaaacgatcactctagattcactactacaaatttaccttttagtgacacatttgagtgacacacatttttttgtgtgtcactaaagaattagagatgagctttagtgacactcacaaaataactctaaaaatacaatgttagtgtcttagaatttgggtcactaaatgtatgaagtgtcactaaaaagttattttcactttttatttttatttttttttataaaatatactggtatatagtgacactcctagcgcgaatgaataagtgtgtccctacttgcatagcgcgtcaccatatcctaatctattttttattttttttttattttctttttaaaaattatagttgggatccgtgtaataattattcatttttttcctttttttttttttaaatatggactgatttcaaaattttaataatgataataaatgaatttattaaagtagcaataaattattgatttcaacaaaaaggcattaaagacaaaagagaaaacaattttcaaaataaaaaccctagagtttctctgccttctctctctcgaacgatgcttcccaacccagacggcaccaccggcttcccaacccagacggcgccatcgacttcccaacccaaacggcgcctctcgccgactctgaacctgacggcaccgaaggaatgactccgaacctcaccgtctccgcttcctcttctctctgccttgcccacgcgactgcagatttgaaactccaaggtatataaactggtcttcttctctgtttattgtctctctctctctctctctctctctctctctctcatcttaatttatttggttttaggtcttttctgttctttagtctgtaaattttataaatgtggcatgtaaaaattgttcaacaattatgttaaacatgggcaatctctgtaaacttcatgcataaaatgggtattgattgtaaaatttacagagttgctgtttgtgatgatacatgtataaaattgtaaccacatcatgtaacacgagaaaatatgttctccattctctagtttgtttttcccagtttctttcttcttctgtagactagggtatgactagttgtatgcctcaattcaagtatatgtgtaagtaacattatcatctttgtgcgttttttgatgaattttagagcttctagtatgaagctactatgattttgtgatcatttgcatgtaatggtttaagcaattacaaatttttattgtattgttttgtgctattttgttttaccagcttaatgtcaactggtttccaccctctgaggcttccctaaagcgtactctaatccagaaattgatttttgaactccttgaaaaccgttctcgagatgtttcttcatcaacaagcagtgatgaggttcaaccctcgaaatttcatgaaatcaatgaaaatgaaggtgtggaatttatctcagctagatgcagtcctggtctaggtcgtcaagagagtttaacaagctctcaagctggccaaggaattgagatcactcttttatcagcatcttccatgaggaacccagagtgtgttaatgagtctagtttggttctcagagatctttttgaacctggaacctctgccggatcattactgggacattgccaatcttttaatgagaagtcttctttttataatctcaatggaactataccatctatgcaggtaataacttttctttttgttgcccgagagatatatacaacgtaaacatttaattgtgcttaccagttgaactgaactacatgtccacccataatcagttctcaatgcatctatggcttttaggttgtttctctaatgtctcttgtgtaagatgaagtggttatcaacatttttttttctagttattgaatagttgcaattcttgcattcctaatgatttgtttgtgtgcttgataataggatgacgctgaaactggtgagcaatttatgtacttgcattctagagattccaccggacttgaacatatgaccggagttgcttctcaaacatgtgcagttccttattcatcgaaagatactagtgtacataactatgacataggaatctctttacaagcaaaatgccaggaaatcaactcagccaatgaaccatcagtacgcgcctcaaatgattcatcagatgaaggaataaaaaaaatttgtgatgttgctgaatgtttgagtccaaagccagaggaagaatgtcatgagccaaaattggtaccagtcgaaaacatggaatgcacaccggaaggccttgtttctgctccctgtgagttgctagccgcatctgcagccgttgaaggttcttgctaccatgatgccatgcagaacgacaatgaaaacggaattcctgttccttcattccctgattactcgggtatgccagtgtctcaagactccagtgtggcaaccaatggtattggactgtgtgacaatgtgcagttgattgaggatggcgtggtgattccagactcgcctggagagaaacctgcaaagaagccgcgactttcaccttctgtagaaagtggtgaaggtgaaatagtgtcagatggttcaaaattgtaggaaagtacataggcaggacaccatttttcccctttcaaatttaagaacagaatcgatacatatttgtaaatgagtagggtatgtatcgatttgagattctgttaatggtttgttggggatatattacatattatggtttctatgtggactgttagcttaatagattcttaattttgtttttttaaagtcaattttcttaatttgttgatggaaatgaattagttctctctctctctctctcaaaaaaagaagtgcttttataatgattcgagtttggacctttcttatgtacgatgtcagaggttgtctcccacgccacgctaccatacagagcatgcat

SEQ ID NO: 381791 - DNA, 1774 bp, Cannabis indica
gtaagtttaacctcttggttttttctcttttcacactaaaagtaccaaattagttaaagaacaataacagtgattaatttcagtcaattaagctcacggaattcttcatatggatctatatcccagagagctaaacgtaaagctacaacacaattgcttcgaagttctacccttgcaccaaaatacagatgcaaacaataaagcaagagacaagaaaacaagaacaaaacaaaccaagcaaaaccaaaaggagaaacactagaaatagaaaaaaaaaaagaaaaagaaaaagaacaagcagcagtcaagaaccagcttcgcggaacaatcttttcaacatatatttttatatatatatgtggttcttgggaaacagacatctggctaagcaatgaaaaaaatattatattttatatgaagcaagctggtaattaaacatatattctacatcaaagtcatcagtcaaaaagttagaaaccatctaccaaacacaaatataatgcaaaaataattcaccagcaaaccaaagttattattatttcatatatttatataatataaatattaaaggatacacccagaatccgtagagaggggagagagctttgaattgacactcgaccctttgaagaaaaagcatggcttccttaaagggttttgaaagctcttgctcatacttggtcaacatctcacagtaagcctccatgaactgatccaaagccggatcttcacctaggcagccagtactactgctcatttggcccattgcagctgctgatgagcaagcttcttcaagtcttccaaccacctcaaccggtgctccaacctaatttatatatatatgtatacacacacaatcacaaaaacatgtatattaaaagggtttttttttttgttattgtttctttctgcgctttaaactagtagatcgatacttgaaactaggaaaaaagcatgcaaagttgcttttttttttttgttttctcaccttttgacaattgacataagcagccaagagacgtgggtagtgaggatgagccatgatcttagccttgaaagaagagatattattgatggagtcgttgttgttgttgttggtgatggtgttggtgttgtgatcggccatgaaataacacccaggtgtagggatattattagtattgttgttgttgttgttgttgttttggtgagaatcttcgaccataaaagaagatgagccgctactattactaatacggtttcgatgatcttgattgtttagggatggtagaggaagaaatattggggtattgtttgtgtttgcattaggattattattaggatgattatgatgatgctgaccatgatgggaagtcattataggcatcatcatcatcattggacatattccattactgttttctccataacccatcatgcaagaagtgccattagaaccaccttccattatctctctctctctcttattttatccttaaaagttgctaagtttcactacaactcactttattcactcttaagagagacaagtcctttttgctcttaaagaagcagaagcagaagcagaagcagggtgtgaataatgagtatagagagagctgatccctttctcttcttccagggggctctcccggattttaagctacacaagttccacctagcaggcttttcagctaacacagagaaataatattaataatatgatgcatagacaaacacataaacatatcccaaaacagtgatactcggtcagtttaggttagaattattagga

SEQ ID NO: 381792 - DNA, 4936 bp, Cannabis indica
gtatttaatttagtcatatagcaaattagtgtagtgcaatcacctatacatttatgcattacccagcattcaaaatgtatgttactctgtacaagactcaaagctcttggcctcccgtaaatatatatgaaataatcatacatctgtagcctatcataagattgcaattaaacagatgtctacttgcagattctacaacgtgcataatttagagcacttggtcaaacacaattaggcatgttatagcctccattacccccttttgaccaagtatgaataaaaagtacgaggccatatgattatgcactattaaggaatatatggtcctcctaaaacaagaaatagttgttttgagagaagtaagaaacacgctgatcaatttgctatatgactaaattaaatacaaatattttatagctagatataaagcgtaccttagcattggggttgaaaaatagcaaattaaactctgggctgaccctcaaagtagaaaccagctgcacaattcaacagattaaacaagagaaaagcttcagcaaatgagatataaatgacagcatgactatgaaaacacaaggaaaagaagacagaaacagtgacaaggaatatcaatgcatttctaaaagtgtaagagcttctcttgcttggtcttaactccaaacaaaatacctgtaaacgcactccatccgtaagaacattctctaaattctcatgcagctgaacataattattctcaccagtcaaatcaccagagagcatagcaatagcacgaacaatacactgagaagcaagatatcaacatttcagctcacacccattattaaacacatcataccaaggaaaacttatttttataatattcacacattgaagtgtgtctagaaactaaggaagtacattaaccaggttagataatctgcagaaagagagagggggaagaaaaagaagacaatttataatctaatgtcaaataaatatatattactttatcatacgaaataaataagataatggtagaactgcagctcaagaagataacttagaattgaaacctgtcacactttttagcatggaaggagggtgatttacataacacaatcatgaacataaaccccctatcataactcatgctcaaacgaaagtttcacaactgactgggaaatacatctaatcattcaatactgaattgatccaatatcaattcacaataaataacgagaaatggaaatccaacttcaataaaatctttagcccatctcaggccatgggaacaaaacaattaacatgcttgctattttcagtaaaatctgagtcaaaacttatcttagtaaattttcctcaagaaaattcacagtaaaatcatgcaaattggaatgctttgtaataaatgtcaatgcagataaaaacagacaaaatatcaaaatttggttgtaccagcccagattcattttgcaagcgcaaaaacctctcccaattgtacttagtccccttgtaattatcagtgtcctcccaataagctaagccatcacaactacttagttgccacctcaagtagatagaagaggaatttgcaaaagcttcgccagtattgctaattccaacagcagctaatcgaactgtacgcccattagctacagttattggggtgctgcgaattcgttctgaactccggtcagcttgaattgcagtccgtatagtttcaagcccatttactgaaaaacaacatgtcacatgttaaaggaaaacatggataagtaaatattctaaaagcaaatcatcactgcatatagccagactaaaggaaaatagtttataccaggttcgtcagctatgaccgcaatagaatctggaatgctacaagtaagagacaacagaactttctctaatactggttgaggatggtcatcagccaccagattaccacgttcgaaagcaacttcctgaatcatttaaaaagaaattaatgtctgcaagacattgaactgaatctaatgaattatgaagcaagtatattagaaagaaaattacaaagtgtcccaatgcttggcatgaaactctgtacaaactcatatagccaccagataactgatgcacacgaactccgacatcccctcgatcataatccttattcaaagtgtctactctttctatgaagtcaatatttttatcccattgttcaggtccaccaactagcataacatctagatatgttttaggagcaaggaataacttctccaagctttccatattattaccagcttctgcttgatccaaatcaaaccaataaccaccaaattggtttccatcacctgcctgacgaataatgagtggtggatatgctgcaatacgtgaagatgctttcaaaataattggcccatgaaaagagctatcaaaatggtcatattctttagaaaatgaggcatgcaacaaatcgcgaccagcacgagatgcatatatgcttttccatgaacaaggaggaccatgaaaagctgtgaagaggtcagcatgccctaacacatctagaggaggtgtctcttttgttgtgtttccaacaatgaaaaattcgcttcctgctttccactttatgaaggaattaaaagcatcacatctataaaaataggcacctgccaataacatactgcagttatagaaagttgactaacacttaaacaaggtaatacataaagtaatgtaacctaaggcattaccattaggtgctttcaatgttacagcagcttggagataagatcctataacagtctcgacagggaagtttcgaagcatgaccatagaagatggaatggaaacttcaatgatcacctaatataaattacaaataacatataaaaactaagataaagagagggacacttaacacatggaaagtaaagatgcaattataaaaaggtaacatgatcatacatttccaattactacaaggcgcaacgacttgatgatacttttaaacaattgggtctaaggaacataggagctatatataaatacaaaaataataatatatatttgtataatgaagacaaactgttttataatgagtcagattttcagccactaagtcggcacagagcacacatctagcaagtattttgtgatccatacaaagacaataatttgcaagagaacgcactgtaataatatatattcttaggacaaaacaattagctccaactgctttaaaacaaaacaaaattacttgtataattaatatggttcctattataagaagatagagtgtgtaatatctagaactaacaactcacaccacgatagtctggttctttcagacaatcgtgaacaccttatggtcaccctaggttctttcgaaagctacatccatggaaagcattaacataaacaccttatgttcacttctgaaattccaattatgtttaatggcttcaaactccctaaattcctttctagaatttcgtccattactcattaggttatgaagatactaccatgacacggtggggtcatgtcatggtgcactcttcgttcaggtccaaggtcaaaagggccatggaaaccctgaacaaccataaactcacgctacgatcagaaaataagagatagaattctaagaaaaacttatttttaaataaaataaatgtactctaattttggaaagacaaaggtaaaaagtcaaagcaaagcctctaatgttttttataggtttgatcaacataacaacaagagcaaaaatagcaacaaaattttgcatactgcatatgttaatgaaacaaaatttacaaatgaatgagagagaaagagattgtttcaatcattcaatgttcacttctatttatccaaaaagctacagagtgagcacatgtaaaacctaaacagtaaagatgttacctcatcatagttgaatgaatcaaagatagacaaaactctaatagtagctttaccaggcttcttagcctggacaactccagaagttgacacagatattgtactcatgtctgaggaaacccatttgtaatcctttgatgctttagcacagcctacatgattgaaatagagctcgggcctattaatgacatatcatgtaaataattgagtgttccttacaacaacaaaaaaattagtgatggtaacacgctacaaacctcctgaagcctttagctccagctcttgaaaaacattgggagcccatggtaggataatactttgagatgcaccacttcttttgtcaaagtgaaacttcacttgatcacaaaccatgacttcttggactaccttgagaacctgaaggggttatttatcactaatagttactactagaaaaaccattagtgttcaaaacagatcaaacaatgatggtaacagcataagatactaggattaaatgcaaacaagaataaacaaaaaggcaatacctctttcatttcactatgctgactaaagtagtagcttaaagttgctgtcaattttcccagtccctgtgaagttgcttccagaactctggaattttttctgccatatgtggatgcgatattatctgaaactggaatcatgttccaattgtctgtacggtcatcatacaagttgatatcatcgctctgcattcatcaaataaattctgagcaaagtgcagctaatgacaacgagaaacaacatggtacgaagattaagcgattataaaaagattgcgtaacctttttcgcttagtttatttttctgtttttaaacaacatgatttatacattcctaagcaacacagaatctcacaaattatttatggaaaatcctagtccaggttcttactacagatccggaccaaacaaaacaaattctaggaaacaacaacgaaaagtttcaatttcaaagaagaatggctcatattgagacagaattttaagttaccatatcttagacagattatgatgcaggcaggtcaccttatgtt

SEQ ID NO: 381793 - DNA, 2476 bp, Cannabis indica
ctatatatatatataagcaaatttacaataatctagtccaagtgtaaaattcaagaatggaaattaaagtatgtacttaataaaaataaaaataaaataatataaatacgtatttatatttttgttgttattatacattttaaatatttatacatttatggattaaattatttctaaataattgtgtttcgtattataaaattaaaatctcagtctccaaaattcataatcataatataataattattatacatactaaaatattagagaaattacgtatattattttttaatatattttttaaaatttatgatttgagttgttgtgttagatgttgttggagtttctaagtagattttcataaaaaaaaatcttatatataaaaaaattacaaatttgtaagcttctattacataaaaatattgtaattactattaaaaaaacggttttgttatgggcgtttatatatatggtggatattaattagggaaatttatataatgcacttataattagattctttttatatacttttagattttgtttcttcttatttttacaaattctgtttctttcaagtttttcacttgtttttcacgttactctgacgtgaaaataatattaatttcaaaacaacaaaaaaaataatactttatatttttgttgaaaaacttcgtaaaaatataaattttttgttatttttaagtatttatgaattaatccctatttatcagggtgcctatctcaatcagttctaaactaaaaaaaatctaaataaccagcctaatgtgcaccttttactttgacaaaagattaaataatacttcaatgaaaaagtgtaaaaataacattaaataagaagctaatcattatttactttttctaaaaatcaacattgtttatttttttaatataaaattatgcacatatgtagtctaggggtggtaatttgtgtctatgagtcatgtttgtatcttgttgagacttaggtattacaagtaaatattaaacccaaagtcgtcatattcattaatcgtgtcaataattaataaaatcatacctaacctagaaagcctgttgactagacccatcccgtctaattcatttatataaaaaattatgcttaattttggttaacttgacaattgattaacatatttataataaattgaacatgtttacatccgttttatgacacatttatgagtcatttcacatgtttatgttttatactaactgttatttaaatttctacacagggtgacgtggcatctaccagggtaacacgtagaacagattctatgacatggacgaaagaccccactcgtaatgaaccatgcagggggatctaatgctcaaagtccgtaggagctgggactttcgatcagggtatgcgagaacacctgaccagctccatcatgtgggtagcttgcataagctgcccatagagtgcgagttggacattttcacaggatataccccacatatcctcgtgcttgcaagacacgtcaagatccctattttaatgagacagatatgaagtatcaaggaagaaaggcaacctgcctagtttcctatttttcttattataattatagaaagtaaatagtttttacattttatttcttactagttttgggaaaccaattgatgtaatttctccccataaatagtggaagcatcacactatattcagggatacgaaattcattcagaaaatatgagagaaatctagattcaagtgtgtaagaactcagagatcattgtaagagctttcgagagagatcaagatttttttgcttctctactcacaaatcaatacaactaaaggggagtaggctaatcaagggatcaaacctctataattctagtattttctttactttacattattcatatttattgtttaattatttttaattgctttaatttgactcactatcattggtgctttcattgagagtaaagaaactcgagtctttgttttaagtcttttcaggacacaagatggttgtacaaacatggagaggaaatcagactgatccaatggctacgaatcctaacgtacaaacacctgcaaacctcagagatccagtcaagatagatcccgatctaactaatcctcatcaacctataggcccacaaatagtagggcaaggagtgaccacccatctagctaggttcactctgaacgtgcaagaaacaggaacctagtacaccaagcaaactagccccggtactggaattccatctgctacaaattctcaaaggtcaagcggtgatgacaccgagatacaaaatttacgagctactctagggcacatgcaagagcataacaacatgttgggttttgtgtcctaaataaaactcatttcaatataatcaaatttactaattaataaaatatcaaaaatcattttatgctgcatggtttacatgatttatttcatgactatatgtttaatgtataaattct

SEQ ID NO: 381794 - DNA, 2984 bp, Cannabis indica
aattagaaaagtgttttaaggaatgaattacatttgcttgaatgagttggcaatgtctaatagggcagtaaaggtagagggatatatcacagtttcgatcacttattatggtagacaacgttgaccatactataaatggagtttatttttatcattcaattggaccacttttctttatttttgcttaattatgttatgtgtgatggtccccctataccaagtgatcattaaattcaacggttctgcaatgtacgttttcttttacatctaaatttgggtatccttttcactctttctttccacaactagaaagatctatttatatataaatgtattcatatataattaagtgtacccaaaaagtcacggaatttgttagtttggatttttttgcttttcttgttttatttgcagatatattttcaaagtttctccacatgtttatacctatcttagatttttatggctcttattaattttgccattaaacttcgttttatgtttattattattatttttgccaaatttggatttatcaaagttgggacttgcgaggaaagactatgctacatgacttcctaaattatttacgccaaataatgtgtgtgagagcctcatctctaagggttcatattcattattccaccaagatgtggaattttcacattattctattttcatgatacacaaaattgtataatttggtgtgcaccaaaatccacactataaaattagtgcataattttttcttttcatcctaacttttttgtttttttgtttttttgttttaaaaaaatcataattcttttcttaaaatatacatgatgttaacgttaattttgtatcatctaataagcaatagcaacaaacgaaaaaaataataactaaagagagaataccataatttatagtagttcactccttgtatcgcaattcgcaatgctgatagaattatgtctacttcgagcttttattatcacaaaagctaattgtcttacaagagaaatcaggaaaaaattattaagtctagcttcacttcacaattttagagagaaaaagtatgaacagagagaagttctggctttgtaaagagaatggaaagtttcaatttatagcgaaagaggttctattaaattacaataaaataatagaaaaatcgcactaaatttgcttggaaatcctgcacgagtacttcgcgagttaattttgaggcccgaattaattgaattgcagcaggagtgtgagacatacttagatccgtcttgaaaaaagctttcatattcaacttaaatcgtgccatttggataaaaaaaaattaagagagttatacccattttactgagaggtgtacactgctgaaactgattgcgaggtgaggctaaccttgggcgcccaggttgacataaacatcaaccaaggcacccaaaacttggtttctttggctttaggcatatttgagatgcttgaatgatttgatagctatccttagttcattctttgacattggtgaagttctcttggtaattttacttaatatgcacggggtgatgccaggtgaatcactagtgacgactaggtgacacctgggtgatactagtgtacatgggtgtcggtggacttgcgtgtgacacatgtacatgagatattaacttgtagaagcatcgaaatcttattttgggggaaaaataagaccaatgcccgaagcgaaactgccatttaatggacagaacactgagtcccaagccaatgtcaacttgggtgcccaatgtgcttgcgtgctggtgcctggtgatgcctaagggtaaatcaccaatcaaacgatattttctcatgattccaagtctcatatcttgttttgggagcaacacaagaataatgcccaagacaaaatcacaatcaaatcgatggaactaccaacgtggtggctatatcaacctaggtccccaatgttaggggagttgtcaccctgggcgcctaacttttaatttgagctctagttggctttgtttattttttgaaagcgctttaatcttcattgtggacaaaaaataagggaaattctcgtactactgaaaattgggatttcctgactaattttaacagtcaggtatagtattcctgtcggtttctaagaccaacgcctattcgaccattgtaaactgagtagaataggcatcagtgaaaaaacaacaacaaaagttattctcgacaccgaaaaattatcggcaatactaagaagaatggctgtcagttttgcacaacttcctatacttgcaaagccaaatataacatatggaatgtcactatggcagctgactaaggtgttcatcgaatcatgaccactggcggctgctcgtcctcctcaaccagactcgaggctgttggatctgactcaaaaagccttgtctccgacagtttctaaatagtggccaagcaaagtcgtaaccgcgagcgtttggggttataaaatccaatgaccacccacctgtaaaaaagaagaagaagaaaacacatatcaaatttgcaatttgaagatgagaagaatgaaaattaaaaaaaaacataaaaagattgacgatctcaaagaagaatgaaagaagaagaagattagaccttagtaaatctcaagtcaggccaagtcgcttgctctatctcaggttgaagattcataaccccgaaccttcaaaaactaaacccaccggtgaactacaacctcgaaccttctaccctcatgtctacaaccaaactgtgtccccatctatggccaaaccactaggaaatgttgttctgtctcccaccaagtgctccagcgtatgctttttttatgatgacggctatggctttttgaatggagaagatgaaaggatgaggaagagagatatgatttttttttatcttaaataaatttgacatgaatgaaaaagatgaagttttttctaggaagtgataaagttatactccaaagttataataataataataat

SEQ ID NO: 381795 - DNA, 2106 bp, Cannabis indica
gcaggattgcttacatgtttacactttactaacacttttaatgataattctgttgataaattgtttgttttgtctacacacttatgatttgttttttttattgaactttccactgatattctaaacataaaactctcaacaacttttttcattttttgctttttgatagtaaattcatacaaggttatttcaatcactttattgtgttctattttgtcatttgtaagtagtattatttgaagcatgtttattgcaataatttcgttagcttggagttccaatttaagtttcaaattctttttaacattttgtagccggaagctcctagcatagatagagaattgatttgttgccttgatatatcttggagatattttgtttcaattctaagggtggaaaaatgaacttttcttcatgatattagacaaagactgaagattcaaccgagttttctggtagtgctatttgggctagatgggtattacagtcaagtaggattgggcataccttttagaaaccatactgttaccattgtaattattttcaactaaaggcacttgagttctctttggcaagtgtctaagtaattgcaccgaagaggcaaatgaaatcaaagagtattcagtggtttttggaggcaaatattttagctgttaagatataagtttcttaaagttagcttctctttgatattttatagttttctttccttactcatgctgagactattggcattctattgcagtatggtagcagcgtttggttccggagctatgttttcattggtaagtggcatgggcggtccaaatcagatagccaatgcagctacttcagggctttctttgcacttgttcaaggtggacttttccaggtaaaagcttcagaatggtagagtttagcattttatgagtagaagaaatgcccagatggccaaacttctcataatttcttttgaatatcgtctgacaatttcaatttccatcatataattatcacaccggccaaacttttcacttcaaaacacctccctgctttgtcgctatgcagttggggcaaaagttttctcaaccgccagtggaagatacttactattccaaaacgagaagcatgttgagtaacctcggtctccagaattacgagaagaatttcaagaaagggttattatcagacaccacgttacctcttctcactgataggtagaagtctttcgataactttcatcgaaacaaaacataagataaaaacccacatacaaaaagagctaatggcatatcattttgtgttttcagcgcacttagagatgtgaagatcccaccaggaccacgactactcattctcgatcacattcaaaggtagtagaaaacagaacatgtctaaatacatacatacatacatgattttttctttatcttatgaagttaatcaaaaatggtttcagggacccggaattcaagggaaaacgtggaaaatagactgtggcgatagccttgtcgggagctgtagttttagctgccattgaagtcaatttgttttcaccagttttaatagcagaagcagatagtgaggtgaggatgagtaattaggaggtgatatgtttttgaaatgaaaagagataatgtgggattgattgttttgttttgtgctgaaaaaattgattcactaaatttgttgggagtaaaatttgattagcaataattcttatgtgtttctctccctcttatgaaaaagtccacttcaaacactacactacacattagagatcatagattgagaagaaaaaaatatatttcatagaaacagggaataaaaatttaagagtatacttactaggcactagggactttgcaatacatataatagttattaaattaaattatatataacctactatttatcaaaattaaagtctaaggattatgtaaaataatattaaaaaattattagtaaattgtaaaataatttatattttgaatgtaagtttgtgctacattagaatttcaagaaatgtaaagatttaacctaactagtaatatatttgaatacttcttgaatttttaatgttaaatttttttcttcaattattgaaattgttagatttaaggactt

SEQ ID NO: 381796 - DNA, 1033 bp, Cannabis indica
taacccttgctataaggtggtttctctagatttctcttggagaagaagaaagttaatttagaataaaaccaacagagcttctactaaaattatgtcccccttgcatgaaggggtagtagggtttatataggctagaattcaagtttaggtatactcgtgatccattcaggttttattgtaaaagcgagcccactaatcgaataaaatatacaaatacatgcctatgagacccactaagaatatctagctcgtgggacaatggttccgcactgaggaggggaccatttggtgcaggacacatgctgcatagggatcatgcctacccgacaaagatgtcagggaagtcttcggacaaaaggagtgtatggtggtgcgtgcactaccgtgatttgacataggggacagtatctgatcttgtgtcagagagatggacatgtcattttagaggatacattcgcttcttgtctcgcggtagaattctgttactccccctatgttagacatccggctcctagtctgtggtaggcttccgagagtcatcttgtggtaggcgtccaggagcatcccgtttggtctgcctcctatggagccctttttttcattcaaaggtcttcattccttctgtgtctcgaaagactaggcgggcttttaggtcttggaagaacgctatgtctcgaaggtgaagctcttagtctttattgggcttgggcccactccaagtttggtttggccttctgtaagtgggaaggcttcagcccagttttagatggtgattaccttcccattatgccacgtgtctatcttccaaaaacacggataacaatcccccatagaactcttacaaggtaacactgatctagctaatctaattttaccatcattttggatcacttggactgtgtgtttaacttgccacaatttttgttcccataaagcatcattctgaacacgccagagatgatagaaaactgctgctagagtagacaacaacatactcgtgcaagcaggggcggaactgttggaaattatttta

SEQ ID NO: 381797 - DNA, 2148 bp, Cannabis indica
gtacacatgcttcaccttcttcaccaagacattagagacaatttacatggccactcaagctgctatcccattcaagaagcctcttccaattaagaaggacatcaacaagagcgacatgtccaagttttgaaatttcacaatgtcttcggccatgatacaaatgagtgtctacatttgaaaagggatattgaattcctaataagaaaaaataatccccagttgcattgttatgtgaaaatgaccaagctcgggcatatgatgtgagtgcagttctaattacagaagaagatggtatccaaaaactattgtattacatcagtaaaaggattattgatgttgaaagttgatacccactcaaggagaagtggacatacatcttgctcttagcatcaagaaagctatggtcatacttccaagctcacctaataaggatgtacactgaccaacccttgcaacaagtgttatagaaacctgaagcatccgtccgattactcaagtgggccattgagcttggccaatttgaggtcacataccaacaaagaatggacataaaaggctaagctctcgatgagttcatggctgaatgtacaagcatatctcctgacatctctcaagatttgggacgaaaggaagagtaaaaccaaaagcaagagcacaaagattcagcctggaagttacatgttgacgaaagttgtactgaccacttttccagtgcaagcattgccctcattacacttggggacaatagctgcacagggaaatccagttcggtttcaaggcctccaacaatgaggttgaatatgaagctttgattgctagcctcaggttagcacacaaagtacgagtcgaccacctagacatataaaatcactcaaaactagtcgtaaataaagtcctaggttagtatacagcctaaggtgaatgaatgatagcctattagagaataatccaagacttattaatttggcttaagggctatactctaacgcaagtccctagagaagagaatgcaacagtcgatcacttgcccgtctagaaagcagcaccttgactaacaaggaaaatttgtttcccatacagttcttaaaagaagcattaccattctaaaagaggttgacatgttggacgatactctaacctggatgatgcccatagcagcatacctccagactaaagtcttgcccaaaacgaggtaagaaaaatgaggaggaaagctgctcggtatagattagacaaagtactgtataaacgaggtttctcaatgccgctcctaaggtgtgttagtaagagaaaattctagcagttattgatagaagagcatgaaggcttttgcgataatcatgcctgggaaaaagcctatcaaaaaggatacttagacaagggtattttttcctaccatgatcgaggattcaattgactatgtcaaaatctgtgacaaatgccaaagattctcaatgatcctaagagctccaccaaataagctcacactgatgcagttttcttggtccttttttgtgtgggcgatagacgtcattagttaactatctaagagagaaggaggtgtacaatgtgtcgtagtcatgatcgactacttcactaagtggacagaagttgaaccactagtgataataacttccaagaaagtgttcgactttgtaatcaagaacatcatatgtcggtttggactgccatagaagatcgtgttagatgataggaaatagtttgacagtgacatgttcactgacttcaacaacagacacgacatcattaaaactatctctattgttgctcatcctcagatgaatgggcaggtagaggttgtgaacaagaccctcagggacactgtgaaaaaagactctagaagaggcaaaaggcaattaacccgaattactcatagaggtactctagtaacagaggaccaccgagaagactaccacaatgcaaaaaccacttgcattagcctatggctatgaagcaatgttgcccatggtactagaaccaccgtcctataagaggataacctacgaccaagacgtaaacaacaccctattggcagagtcgttggcaaaatagaagaatggagagatcaagccaagctgaagctatatgcctacgagcagaaagttgccaggtacttcaacaaacaag

SEQ ID NO: 381798 - DNA, 3667 bp, Cannabis indica
aaaaataataataaataaatatagatcagggtgatcatctttcgaaagtagtaagtaagtacgaatatataggagtcaatgcgcataatgattatgacttggtcaaaaatattaataagtggggtaaataaacaaatatattgtattaatttgtttttttaggtgttgtaaacttaaaataaaataacaaatctacgtcactcaattaattactcgccaaaaaaaagtcctacatttcagtctttgaatcaaaatgtttaccagtcccgaaaaaataaaaccaatgtaatgtaactactctcattcttaattataaggtcaacatatataattacttcattaagatactaatcaatcgtacctaattcctattttttggattatgtactctaagagattacttaaaatggtagctagaaggcttttatccgtggattatgcagactttttattttatattaaattaaacttactttaacaataatacataatttataaatttaatatactcataaaggtgaagaatttttaattttttatttaaaaagcaatagggaaagagatttcgactttgtcatcaacatatagttttatatataatcaattgatttatggacccttcattgattttaaatttggaaaagtcactcttatgatcttatcttattctcgaaatatatatatttatatatgtgtacacacacgagcacacatacaattaagtagaataacttaagcattaattggattattaacgtaatcacaattcatatagcctttaaaaaaaaacatttcaagttaattaaacttcccaacagtttgggtatttgcaagttgcaaggtctgtaatatgtccctgatcttagtttttaatactcaagtggatgaaaaatattcgaccaaatcttgatctgccgccaaatggatcatagtaataatactacttaattatcacatgtataaacaatatatatccatagtccatgcacaaaggaattgtatataaatatagatatatatctccctttttgattcctttttccttcttatgtgattaaaatattaccaattagttttgcttgcattacatatttctaaatctcaaagtcaagagaaccactcaaaactatgacaaattttattattaaaacgttttattaatttattatttcttaactctaaaataaaattaaaaagaatacgtaagcggtgacatttagttaatctacagttcacttttaatcctttcaactttgttggagttaaaccaatttacattttttttatataaataaaataattaaaagcaatattttcttcgaaacgtaaggtgaaattgaaagtgagttaaaaaaaatgatgattgggaataatagagatgggcctatgatcaaacgacagagtttgacatcataaacttttgagaaggaaaatgacagggagagatttttcattcttcaaatcaaatcccccaactcaaaccaaacgacctaaaactgccgccacacctttcggccgttggtgttttgacacgtcgtcgttaatcaacagctttttataggatgaagaaagaaccatttattattattattattataaacgacatattcccaaacgtgttaaaactttcggcatgcaccatccatttcatgccgcgtggacaacgacgccgcgttttgacccaccttaaaacttaaaagacgtgcctaaccgacacttggactaacggtcaaaagctgaaaccaaccgcaccatcactcattgtcacacacacacacaccttctttctttcttagtttcttcaatttttattttattttttaaaaatatggttatttgattgatacacaaacatatttgtgagagcgtataaatataaatatatgtttataaaagaatagtcattgaccttattttggaagatttaatagtatttttaattaatattattgttattgccctttacctacctaccttgacaaggtctagaagatatttttgttaggggtgattattagataattctattacaaggacctttctttcttggtaacattctaaggtagaaaatgataattgttgggtgggggcgacctactttatatatgcttggtgggaaagacatatgaactcgtgtttcttggatcctcatctactttattattattattattattattattattattattattattattattattatactttttttaaataaatttattatttttctactttaagaaagaaaaggtctcatttcaaacatatatgtatatcatttcttaaaacatatattaatataagcatttctatactgcttaattcgattttcttactaaaattcttaattctaaattttaaatgtcaatatcatcactatatagatgttttatgagatcaaggattcctagatagatatatatttggctttctttacatttctattattatcaaatgaagaagatacatgaaagggtataatcttactctgtacatattggtttcttacgaaactcatgatgggtagaactgtctccttcctcatatcaatatttttattttctttcaaaaaatatattatttttgaaatttactgtggaaaggagaaaaataataaatatattttatttctgtgttgtggaaaaatagaatatttttaacagtgctagtaggttttgtggtggaaattttactatttatcagtggtttttggcatattttctttgtcaaagcttctggtctaattcgtttccttcactgactaaagcacttcggatatggtgtgtgtttttcaaaacaatacattagagcttgtaagaaccacatctcaaaactcaattatgactatgtaaaatcactgatcatataatactcctatatatttcaatttctcatatattgatgtaagttttattccaatattttgaaatttgaatatgataggataggagcatgattgtaagtaaaagtattggattctttgaacactagattgtgtagtacaggtccatatctcttaatggacttggattgattgatacttaagcccaacccacctcagattattggaccaaatttgtacgacatgttagtcctcatctgggcctttctagatggtaatgaattgttcggacttttggaactacatgctttttttgtcacaacttatttatatatattattattgacatttgttacaaaaaatgtgacttttgaaaattaagtttataaaagttattagaaatatgattaagccatagttttttatgttaattattaaatgattatatttttaaagagtccctttataataaggacatttttaattgtactattgttttatcttaatgcaattaactcaatacttttaaggttttcaaataataataagcctcttctttgtaagaggatggggtattctcatatttgtgtgttctctgattgtttgttgcctggggtattctcgtatttttaataagtatggtattgttatttgttatcaataatatttttcatgtttgaaagtcatcattttttttatatttttatctcttattgtgagcgagctaataatgctcttgtgcccaacttattttaatgggttatttacaaaaatatgggaaaataaagataagttttgatatatatggcataaaaactt

SEQ ID NO: 381799 - DNA, 771 bp, Cannabis indica
aaaaaaattgaacaaaacattgtggaaggaagattgaataacaataatcttcaatacaatcaacagatttactcaaaataccgttatttcttctcttgaaattgaaattatgtggtgttattgatgcatggttcttatggtttcatagattctaatccaaatatagtttctttttatttttcattcagaggaaacccacaaaggatagacaatgtatcatccaacaaaagaattactttcacatatgaacaggtatgatgatattgtaacgcacgtgcttcttgttctttcttcaaagtttcacagatttctcattttcgtattgttggtatccagtgcctcatgtatctatatcactgtcctgatatatggtatgagtatgctacctggcatgcaaaatgtggtgcgcttgattccgctgtaaagtttttcagagagctttgaaggctcttccgggtaatatgatatttctcatctcatcttcagcttagtatgattctataataaaagtaaatcaattcccacttcactactcccatagatgttgaaaaagacactcacttcatttctctctctctacaatcagattcggaaatgctaaggtatgcgtatgcagaactggaggaatcccgtggagcaattccggtaatgaaactttggtgatcttatttataagtatcattagtctgtgttttgttctttctgagggttctttttcttgcagtcggcaaaaaaaatatacgagatctttctgggggatgaggctaatgc

SEQ ID NO: 381800 - DNA, 750 bp, Cannabis indica
agggaatgtgggtcccctaaccgttgagaaaaggccccctccggatgctagcatgatcataaattataaatttcctaagctaaacatcaggtgctaattgcaccatgcccaagaacaatggtataagggacgagaaagaaaatggcaagttctataaaccctagacatggaagccccgacctaagaaaaaactagagacgactggggaaaatacccaaattacaatcacagtataaataccatattcatgcaagcaaattgccaaaataaagcaacaataatgaaaagaagtgcattcttacaaatagaagtttgggcgattgcagggtttggcacacgacgtcgataaaactaggcttgacaacatcgaagaaagagatgtaaaaaatttggggtgtttagaattttggctagcttgaggttctgagaaatatgagaacggaaatttaaaaaagagaaatgtaggacttttagagacctcatgaggtgactcggattgtcaattattcgttgtttccaattcaaattatgaaaaatccctatgatccaacgattaggacacatctatcagaagaacaaacataaataggcaaatacactactcaagcaccaatctgacaccctgcaattaatgaggacatctaaattaagtaaaaggaaaattgaatcgccttcaccaaaattgaaaaaacaataaattgttataaatattaataattatgtggatgtccaaatcttttatttattacc

SEQ ID NO: 381801 - DNA, 1778 bp, Cannabis indica
gaaaaaaataaaaaaaaacaattggaaattaaaacattgcatcggaagaaaatttagtctactacatgcagaaattccattaagatgcttaccaaaatgcgttcttccaaacatattcttccagggcctggaagcatgaaatatagcttgttagctaaatatataaaagtaaatttaactcaatacatacatcaacatacaaaataagaaaaaaaaacccacctgagtagatttttcagttgagtcacttggttccactacatcagaagaagggacattccaaagcctgacactaaatacaagacccaaaagaattattattccaagaatgaaaaatcacgatatgataagagtatggggggcatatggttcttttaatttttaaagtatcagacaatatagatagacacattcaagattttgtccttacgtgcaatcagtgccacaagaaacaaggaggcgtccatctgtagatgcagcaacaccttttacagctccttggtggccaggaaatttgcaaactgttcgcctttttaatccaacaaagcatttgcacgtaaattacatcaaattatgcccaaagtagcaataaaagaacaattagaagaagaataaacaaaaccaagtccatagtgccagtgtcataccttgtagctaaatcccaaagacgaatttctgcaaagatgagaaaacacatattactttagtcaaggatctcaagttactcaacgctaagatgtttaaacattattcaaaattctctgcacaccgataaaggacgcagtatctaatttctaatgattctatcttttttatcaacttaaataaataactaataaataaaattgttcactacacatcaaaattatattgttaatgccagaaatcaccaacttctgtcctggcaaggagctagcacaatcacatattcacttttcaaatatcatcttaccccagctagataaagtgtatgagaaacaatgtgatatcacaatcaaagttaatcatcttcggtaaccaagacaatgttagtcctattgttcaaccatctttaacttgttcttaatttaacaaagctttctcagctgccaatcagagactaaaagcaataacattgtcattaaatgatcaacatacctccatccattgagcccgaaaaaattcctttcaagtggttaggattcttggtcatgcacgaaacagcatccatgtgcccatccattgctccaataaacggcctcgcaaatatctttaggaaaaggaaaaagagtaaaaaccccccacatgcccaagtaaatataaaaaaaataataatacataaaatcgctggtacaaattaccttctccaatttggcggcgttgagagcccgaacatactcgacagctttctcttggcttcgaatgttggggtcgaaattacggaataccctctaatcataatagcaaaaagttagaaaattttcagaaaagtagactaaatatatcgagtggataacaagacctcacctgaagatcttggcttcgttctcgagtgaattcgtctgtggaacgagagattactttgaccttcatagttggtgtagttgcgaacaatggtgaagcaagggatggtataaaccctactaagtatacagtttctgaagaagaaaataaggttgttgaacgagcgatggctgtgctagagttaagaggcgttcctccttttgctaaaaaccctgcctaaggcttaagccctttcttcttcttaatattattattttattttgggtaaataccat

SEQ ID NO: 381802 - DNA, 3165 bp, Cannabis indica
ttaccaaattctaaagaaatggagaataatttgcgaaaaaataggggagcaaattgttgagttacctctaactcgagatatagatgaagaaaaaaacaccgaggatgaggcaccttagaatccatggcaaacaagtgtgcatcaaagagtagaagacagtcaaccagatgcagtaagtccacaacttcagagatcaacaagaatgcgaaagctgaatcccaaatatgctaatgttgttgtaactgaagaagaaaagttcagagcgccagagtcatatgaagaggcatactagaactccaagtgtctagaaactatgaaagaagaaataagcgtgctagcaaagaatcagacttgggagttagtgccaaagccgaaggaagtgaaactcatttgatgcaaatgggtatacagggtcaaaatcgtccgatggaaaaatacaaagatcggtcagtagcgcgacgattctctcaatagtatgggctagattatgaggagacatttagcccagtcgctaagattacaacagtgcgagttctgttagcacttgtagccagtaaagattggaggctatgacaaatagatgtgaagaacacctttctacataaagaactggatcgagagatacacatagtgcaaccaagaggatttgaagatagaacacatcccgactatgtttccaaactgaaaaagaaactctatggactaaagcacaacaatttcctaacatccataaagcacaacagacttccaagtgctttcacagccaatggcaagcctttgcatttcctaacaatttctttgccaatttttttttgagtttgactccatagtaaatcctttattgcgagctataatctttacaaacaacttcaagcaagcttcttcctttaactcattaagatggtgaaatctagttgttcccatgatagatgcaacttaatgacgtcttgttgtaacgattatcttactacttatcccaaaaatcatattgttcgcaccaaacatcatccaaaattaccaagaacttcttttccttcaacctttcttgtatcttctcttgcatcacattcaagttctccacactacaagcatctctagttattgcttcaaggacattttttgttactttaacaatatcaaactcatctgacacacaaacccatgtcttgtgttcaaaatacttgttaacttcatcatcattataaacagcttgagccaaagtagttttaccaattccacccaagcccactgtgtaccatccatctcatctgacaacaccattcctttcaaacatttcttttcatcatctcttctctaccaaaaaattcagaatcatctatggttgacattgaaggtggtctctgtgtcaacatgttctcaacaccctcttgtagatcaagaatgtccctctgtttttcaaaagtttcaaacctctcaagaagcttctccatttctgtcttcctatcaagatcagttgagtcaaatttagagaagaatttacttactttggctttggactttggacttcgcttctagcttgaatttgagagcatcatattcaatttcgtcaaaaagatcctctgcatcttcaacaacatcttgaagcttatcaagccacttctcaatgatggggtccctcatctgcttctgatctgcatcactaagcaccttagcaagagaaaggaatgtagtctccagtttatcgagaaagcctatcgaaaccagagtctttctttccccttaagaagctggctacatcagaataagcaatcttcttcatcagaaactcaaaggaaaaagagacaagaagtcctaccaccaactcagccatggctctcctcctcactagttcaatagctagtacagtaaaagattctgggaatgtcaatcagcaatggcaatactgaaagaaacaaccagagtatgaaaacaaaatcacagtttcttaagatgaaacaaaaacataggtttgaacaataatatatgaaaacatgtgcacccacgtacatgtgcctgttaagctgcgagattaacatgtgtctttagatgcttttcccacacacaaacactaatgaaaatctattcgtaaatatgaattatgtaatggcaaaaatttattagtctaactcttaaacagaactaattttattagtatataaatatatatttatatatataaatatatatatatatatattaaatctgatgagaacccaccttagagaatacaaaccagtagcaaataacaaaacacagcagcaaaacaaaatagcagaacaaatagaataataacatatgaattaagggaaaacttgagacaaaagtctcttacaatggcagagagcaaaagctctccatgatgcagagatttcactccatagccggatcccaacactcacacacactcactacaaaaggcagcacacccttataattacaaatacaccaccacaaagccaccaaacagaatatttatccaatgaccaagctcaatcatgaggataaacagaactaattcagactttttaggacggaacataaaaaaactttatagcactcatttgtagcaatagttttttttttttttttttttgtaaattgagaaaacctcttactgccattacaaaattgtttgtaattattttccaccctctgcatgaatcaaaaaaaaaaacaggtcctcaaaatgtttggctctaaagacccaagcagctgtccataacttaactctctcccacacatctgcttctgaattagcaacctcttcaaaaattctgacatttctttctaaccacacagcccaaattgttgctaagatcgtcgttggccataactttgttctacgtttactgccaattagtttagaaactattatttgtgatacggaatttggcattacccaagacagctcgaacttcactaacacattgatcctcactaacacattgatccataaacgtcgaatgaatttgcactccaaaaaaaaatgtccaacatcttcgtcgccgctgcctttgctgtggatcatccaaggcacattagcatggcgtacttctcctgttcgaaccggggtttgaaacaaaacttctcctcaggaggatagatggggcgattcaggtgagatccaatgtagatccaactttctattcactagtgggatccggg

SEQ ID NO: 381803 - DNA, 5109 bp, Cannabis indica
aaaaaatcaaatttaattattaactttctataaaagtaaaaatatgactaaaaaatttaaaataatttaatttaattaaaccataaatttgtctatcaataatattattcgtatttctataattgaaaacaattaaagaaaacataaaatatatatttatattaatgacttaaaattttagctttaaaacataataatatttttattcttaaatttatatttgagctttgagatagatttttttatatataaattttgattattataaggaacgagaacacagttattggaacgataaaaagctgagagcatgggaacctctagcacaaaaagcaacaaattcctgaaataagcaagaaagagataatcccttttcaatggtagaaacccacaaaaataccaaaataataattattcaatagccctgagatttcagctgagcaatgatatagaaattccatttgttcctttcaaaatttcaaccaggcaaccatagagaaattccatttgttcctttccaaatttcaaccaggcaaccatagagaataaattaagtttgatagtaagctagtgtttgggcatttagttggaaaaaaaagtgtttccttgatagatttcaatatttttctaatctggaaatgtgaaatgcagttaaataggtcctttatttattttctcaacgataaaagagagattttaggttttcatctgtgtactttatttcactgaacagaacacttggtcataacttttttgtggttgatttatttctgaaatgaagaaccctttaactgttaattttggttttatacttatttcctttataataaaatctattcgttcaaatacataaatagacagtgtcacgtgccaacagttctctactatatacacattcaacaccgtgattcaaataaatgagagaaatatcagaaaaataataaagccaagtaccttctttatcgaaagagagagccctgagggaaaatgccagctgaaagcatctcaccagcaccgtatgactagaggactatcacaaaacattataaataatcatatatgttagaagaaatcgagtagatacaagataattggtcatgaaaggttattgataacatcataacacacttgcaaagtctcactttggatcgggtgaacattaaagcgatgttataagtgtgggccattgcttcaaaatttgcaggagtattttcagcagatgttgcctgaacccaaatcgaagaaagcaatagattcacttggtgactgcttaaccgtagtgaggttaactcctgtaaattcaaaaaccaaatcactgtgtgaataacatgcagacatgtctgttgaaaatttttggtcgctaagtcaaattttgttgtatgtagggaaaatgactttgcttccaatacatagataagttataatcccaattttttatatgacaatgtcttttataattataacaaacctcccaccaattttcgagaaattaaaaataatttactgtgccaaaaacaccagtcaaacaacaatttgtatgcatgtttttgaatgttgtctgaacccagattcgggataggaaatattaacaatttctcaaaaacaagtggaaattttgctataagtaaaatctatatcatcatataaaaacatttagattatatcttatccaaatgctagaaacacgagagtccacgacccccctacattttataagaaaaagactaatgacttaaactgtaattttttaagatataagttcaaattacgtacagtttttcctccaaacaaataacccttgtagctgtaggatggtgcatgttgcttcatatggacatctgatacctgacttgcctcttccatcagtccttcatcaatgttctctgcagcgtctttactttcatcctgagaggataatcttccattaccaaaattcttcaacttaccgtcagataatccagaaacagccccggaaaatttcactttctgatccacacaagatgaaaagacggatggcataagaaccatagagaaaatgctatgtgctccaactcgtgtttcatggtctgggtgggtcattgccagcagtagttgatgaaacagagcatcaggaaatggctgtaaaaagcttagaagttcaaaataagagcctattgcacatatttacatatagtaacatgtacaggaaagctcactaaccatcttgtgataataaacattagggacagatgacacaagcttcgttgtttggtaaattgcagatatggttgttctagcaacaatggtactagttggtatattctcaagcaccacagccatcatatcaagtatgggaccaacatctccaacctatcaatagaaaaatatttatcacatcctgctaaatgagtaaatgtgaggaaaataaataaagaaataagaaataaataatcacctatctctaggtgcactttgctaaacaaaggaaaagtttcatttttaagaaaatattacagtgacactcccatactaatctctaaattacaaggacagccctctaaacaaaagatattacactaaaactcctgaaagagagtgacactcccatactaatctctaaattacaaggacagccctctaaacaaaagatattacactaaaactcctgaaagagttacagacacgtccttcacaagttttttttttggaaaagagaaagagaccacgtccttcacgcattcattttgaccaaaatttggtcaatcaattttatttgaaacaaatgaatttttcttattttatttttttggaaaaagagaggtcatacgtcatgacctcctccccaatttattagggagcctcacttgtaacagtccattttattttcactttctataactccgcacaagagactccacgactcccctacattttgtaagaaaagactaatgacctaaattgtaattcttgaagatataataagttataaaaaggtaaaaattaaattccactgttactacaattatcttggttgagggggtgtcgatgtaattttgacaatcttcacattggtatccaccgagagagagagagagagatcctatgctttcaacaagcatataagggaattatgtcaacaagccaagagaagcattatctttttatttgaatctaagatgatctcaatatatcctatcatcttctagtgttgataatatcttatcatctcttgaaaatcttattgtaatccttcctttcctcgtttataaaaaatttagtttgctataaaactaaataataataaagttgaaggcatatgactccaagaaccccaaaacttaattggcgcatgtccacaccctttacatggaagataaacataaaacacaatcaaaaaagtcctatgtaatcatacttttgtctttttctccaccacagacaatcaagtttagcaataattctatgaaagcacacaccaaccttatcggagagttgtgagatgcatctttcaagggatatctgaacatcagaattacacttatctgaactctcgggttggatgcttcagcttgattttgcaaacatctacgcaaatgcttcaccagatcagttagtgcaccaatgagtgtcactgacggcctgctgctttgcatttttagcaagttttgttgtaacattaagaatatttatctgtaaaagaggttgtttgacgacattcttatgatccaagtgcttgaccaatatggataacaacagatgggagttctctcctggtattttgagactacatatgtcaatcaataattatatttacactaaggcatggttgaaaaaacattttaaagaaaaaaattattaaggatctaactcttacctgattcctctaaaagtgattgtaaatacatcaaaacaggatatgcaagtcctttctctggggaccagtggttttcagaatcaaaattttggaaaagaggttctagtacacgacgaacagttgtagcttcctttgccaatttggccatattactcaagcatatcctagaccagtaagagggtctcttgttgttatccctataaaacatgacaagtcagccagaggatatcagaaagctatttcgtaagtaatgcataagaaacaaagtaaactatttatttagcgtagattcaacgaataatcacattgttggatccaattcagattttgtcacaagtgttggcactgaaacaaccatctgattcatttctgacgaagttgaatcatgaacatcagcaattgtgagaactccctgaacctcttgatcatgtgattgaatttttcctatcttctccttggcattatcagggttgacttgaaaatccacaaagttttccaaagtcactgatataatctacacaacaggataattttcaaaatcaagaataaaaactgtaatacacttaacaatcaaagatcaaattcaaaactttatacaaaagataaaaaaaaatattatgattattttgagggccgtaagaaaaacagaagtggtaaggagttgaatcgctcacactatcaaagtccattgagatgtgagactgctcacccatgaacagaatctgcatacaagatcaagaaatataagcaaaatacatgaaacgtgcgcaaaagaaacataaataagttctctagaaaagggaactataatcatcaccctcccctaacatttttttttccaaatgggaagttaacactatgtttggtagggaggaaagaaaataggaaggagaggaaaagaagaggctcatctttggtaaagtgagaggaaagaaaatttcctctttggtatttaagttaaaattgcaagaggaaaaataataatttagacacttctaccctaaaattacttttgttatttatttttatacattaatattactcattatttaaaagttaaatttttattcttataaaataattattcacacccttctctattttttgtttctatctttcacattcttataaaaatacatttaaataatatacataaatatattatatatatttttaactagaataaaaaaagaaagaaaaaatgtaaaattaatgtatatactatctttgactaacatatatacatatatataaag

SEQ ID NO: 381804 - DNA, 1963 bp, Cannabis indica
catattcgttcatttcccttgtctcttgttatttctaagtatagaagccgcccctatacttttatgtcttcaagttgacatgtttcaacacaatcaattaaatctattgcagcattgtatttcactcttttttccaatccttttcctccttaaacaagatgtcattgaagtctcccataaccatccatgattcatgggaagaaaagctccttagatcagttcataatagtttcctaccctctaactcattgaaagcatacacaaatgtagcaaagaaactagacttaccatccatagtagttacttatagatggataagttggcttgtacactttattatgttcacagagtaacttgagggattccatgccacaattattcgacctccatcatgccaagctatgttagtcgtaaaacaccatcctttgaacatatttaagtataagacctcaagctttgaggccttaactctcatctcgaggagaccaacaagaccagccttttgagcatgaagcatgctcttgaatttattttgcttgtagtgatcgttaatccctcggacgttccaaaaaattattctatctatttccaagaggaggatctccccctcatcttatattactcattgtagcaattttgttggaccaaataatgatctcactagctgctatatcttctttaccagtcgtggtttctgtttcagtgttgacagcagtaaaaattctcagccacaacctgatatgagttggttgtatgtgtctttacaacctcctctgtacttttagccttgactcccttgccaacctgttaaaatccttcactatccactttctctttatttccaacctcagcaccagccatattgttgctggttttaacaacccactgtgtctgtttcccttctttcttttgtaatctatagtagagtgtcccaagcctttacaatggttgcattgtagagacttccactcataatttatggcagcatacacattaaatccatgcttatcctcaaaagaaactagttcaagaaattcttgctaaatcgaaacttctatgagcactctcggatatctcaattttatttctctctttggtcatagcatccacctgtagtggagtacccaattggcgtactattttgaatagagatttctctccccattacttgagctctaaatttggcatttgaatccaaaatggggactgatctaatgtcttcgttcttgaagttaacattagggtcccaagctttcatcaccactggcctattgttaaaaaacacatatcctccattcagaatctcaacattcctggtttcaacagagtcgagtctcaccaggaaaacaccataagtaaatgatcccactctatccaccttagtgttccaaattctcttgataaagccctcaatgacagttaatggagggttcgcccctaaaacatagcacacaatagaagagctccaaaaatgaatttcatcttcaatgtcttctaatgtgattttaaccttattaacagtctcataattcttaaaggatgtctctaaatttctcaccacagtaccagatcgtagaataggaggagttgcagagttaccttgttgaatgtgagatgaacactgtcggtttgcttgcaggaagaattcaaagtctttactcacttcatcttcctcttaatggcttgtaacgacgatctcagtgatataggagcttgaaataaatccacatcttgcgtgttctgctccatgttctgctccttatcaccatcattttctgcatttgagaactcaattggcttgacaccaatgattgagtccttagttcttgtcttgcatacatcagcagtggaggtaggacctcgtttacttggcttcttgagctccgattttagcttcccctgcctcgccctagtctttgccatagcaccagcccaagagctgcacgagagagagagagagaga

SEQ ID NO: 381805 - DNA, 2187 bp, Cannabis indica
cttttcgttttttttttttttactttaccgctgttctgagctttctttggaaatggacttgcaagccagagcgtccttcgtctctcggtcggtacagaggtacgtgataccaaactcccctcggccgagttcccgacccagtacgtacttatctccgatccgagtccggtgactcaaaggagccacgtccttcaagacccggatcggagccggtgacagaatcgagtcatctgaaaaagggtttggtctagtttcccgattcttattcttcttcttcttcctgttccggttcgagccgtggttgctcttctcttctactataatatcagctctcacacaagcgttacaattccccatactactcttaagtctaacctgaactcgatcacataaaacggtgcgtcttagtacggaaactacggccgttggtcagcgccgccggcgagttttcccggcgaggaagagagaaaacgcgggggaaatgaaacaagaagaagagcagttgagatagaaagaaaagaaaaaaaaatgtggctttttcaaaaacccaaataataataataattgttatttatttatttatccataatcaatattataacgttttgctttaaattatttaattaaattggctgtaacaaatcattaataattctaattcggcgacttattttttatcatatttactaaagtaacctggaaatgattaatgattattacatttatatgtacctgctggcctgcatggctggaagaatttgagcttgttgaaaagtaaaatgaaaaattatattgatcatctaggacgggagcatgggactatgatgcacctctattttggacatttgtgatgataaatttttatttacttttcaaggttttttaaaattttattgggttaataatcattgtttggattttccaaaggtcattcctcatttcttaagcaaattttttctaatctaccaaacaccaccatgcctccatgattgtatagaactaaaaatttatattttttaaaaaaggataatatttcatataaattcgcaaggaaagttatatagataggccaaaaccatgaaaccaaaccaaaaaaaaagtcttgtaattaataaatatcattgcttagatgtaacaaataattttaatattatgagttgagtgatgtggatgcctaggattaagatagtaggattcatggggacatttgttgttgaagttgttcaccaattgtagaaattttgctagtatattgactcaatcactagagttttaaaactagatatacaaatgtaattatgtaaattattaaggtttaatatttggtgggttacatttggtaatttattgtaaatttacaaacatttaaattgcaatttgcaaatcaatattgttaaaaatgaaatatgattaatgcaatttgtttatttgccaagctcttttttcttttccaaacacatcacaaaaataatcaaatttgactttataatatcaattaagactaatcatttgggtccctcctaaaattatagtttttacttcctctattggattgccatttcatggctcataacttcttatattgtgtattgtgtaatgggttagttggagaatatttttcaatcaactgaaacaatgaagtataatactgccaacttggttctctaaacttcatagtaattgactttttcaattctcattcttattatatttcatttttaattattttttgtgactctaatgttactcacccaaccaacaaacattaaccaccaatagattgctctaacatatgaactctaaaattgaaaacatattttttaaaatgactgtactttgttttatcctaaaaggaaaatgacacaattgggagaaattcatattgtacacattatatatttatttacatatacacgagatcagaatgaatgagtccatagtctacgtagtcctaaaatataatagaatagaatagttcatactttattggtgaattaactacttatttgtaaataatttatggattggatgaaatattcaaaataacaataagattccatctattattttgaaactaaaagagatgaggtgacactgtaagattattttcttttaatattattttttttatcattcttttcacttttttatttatttattattttttttttgtatatttttaaattt

SEQ ID NO: 381806 - DNA, 2618 bp, Cannabis indica
agcaatgattcatttcatttttgatattttaacttgtcttgaaatttatacttgactcaagactttatatgatggatggcctaatctcatatgccatacatcactttacgttggacttagacttagtagtaataccaaaaaatatttgactcttagaactattggactcgattaaacttgaagattgagaagccaaattttagtttggtgcttgaagctagtaaagaccatcattaaccatcctttgaaaaagaacattccttattagcttctccttcacaacacaacaatcacagtgaatctcaacaagcacatttaggtatgcagtacctttaattgtacttcaagtatgttacagactatccagaaaaactatgagtattctttatgtggcaataattagaaagctactccatttcgatattaatagtaataattcacatgatgtggtctcctctagatatgctggctgtgttggaataacagtgtccatagtttttacaatactatgttgtttttctgcctcacacgtggaaaagtgcaaatagatgtggttaaagacatgtatcatttacatggtactaattatcatggaaaaattccaatgaacatgttttggttggtgccacaattctttctccttgggagctttgatgggattttatgcaaaagcattcatctcttctttaacaatcaagctcaaactcctcaagatcatgtcatgggtcttttttctttatccaaaaaatgatttaggaaaaataagaactcttttattggttcttgtgtttcaaaaggcttctacatggagagataatactagttggtttgtagagaacctaaatggcagtcgtttggacaagtattactttgtattggctacctttagtatagtaaatcttgtttactataataacttctactattgtactagttttaaatctaaggtgagagagttcagattagatgacgtagttaatggagtgtttcaatcatagattgtaattacgctcatagaaattggatagagtatttattagttattaatagtatttttatgtaacattataaatttagtatgcatgttatttttgtgtactaggactatatatcatatgtacttttttttattttgttatattaatgttttgcattattctatttgattatgataatgccattattagatttggatgcaatatgggtacaagcaataaaaatgagaaggaaaatatttgtgaaccttaaagtgggttaagtaaaatttttaatcattgatttttttcccacataattgcacaattattaatattactcacaagtcacaattttctctcctttgggacaggattttttctggtggggacaacagattttttttggctcagattcataaagttcttatgtttggtatgagccaaagttgggtttatgatcactttgttggtgaggttgtagaagttgattgcaatgtctctgaagattgtcttcccactttgttatgagaggtcgtccgacatatgtttcttttgtggtattatttatcacctatttaaagagttgaagcctccaaatattccaaaacatgtcattttgaaatatggggagtggatacaggttcctgctccagcgaaagcttatgttgttggtactaaacatgttcagttttgtgagcaggaaaaagtcgtacacggtgatcctatagagggtcataacgctggacaatttgactatgttgaaaaaggaaaggcagaaaaggtggctaaagatgtgggtcatgattctaggaatatttttaattggcaccccaagtaagagacttttttattgaaaaagatttggaaactaatactataacaaaaccttgtaattgggttgacaatatgacatctccagattctctacttaaataatgttatcctaaattttgtccacttaaagtagcatattcacataagctaagattgaggacatgtggaataaacccttgtcaatagcaagacaaagtctacttacaaggcatggcaaaaccaacaagcaacaagcaagaggagttaagcaagttgtcaagaagctgcacaaccatgtctagctggccaaagggagtacataggttggctagaaggagcttgtatggctaaccagagtttgagcacaagctaggtagccaaaggtgactgctagaccaagaaggggctcgttcgaccaaggtagcctgacccttgcaaggaaagttgtacaaaggttagccaacacctattaaggttggccaacacttgccaaagttggtaggcacttaacctgccagattccgccaggaacatgacctggcaggaacatgacctgcgagaccataacaagaacatggtcggccagacctagcaagcaaatggatggccaaacctcagcctacaaacattgtgtggtcggtcagcctgcacttagcaagtgcatggctagctagcctttacctggaaagcctttggtgtgcagccttcatctgtggatagcatgctaagctacgagttgggccttcacaacccctaaaataggggaaaatatcaacaacttctttattctcaagggataattaactcatttaaagtttattatttaat

SEQ ID NO: 381807 - DNA, 2892 bp, Cannabis indica
agtaattggtatggaaatagggactgtttgggggttaatgtcaggtaaaggtgaggtattagttgtagtaatggtggctgctgtggtgatttcagtgggaagagggtctgaaacaaaaactggtgcatgtaattggttggttataactgtttcaggttgtgtaggggctacgggtagtggggattgcagctgttgtagtggctggtgaagtgtttgggtatacagcaggctcagtaggtggagaaaaaatagaaacacattgattagtatgagctataccagtaggaaaattagaataagcaaatggcatagtttgtggagaaggagaatgtacctgtgaaccagtagtggctgtgttgacagtaggaaaatgagtttcatcaaacataacattgcgtgctatatagattctgcctttggaattctcacacaagtatcctttgtgatgaggagagtatccaacaaaggtacataattcagatctgaaatccattttgtgagtgttatagggccgaagatgtggatagcatgcacaaccaaaggtctttaatatattgtaatttggtggtttatgaaatagacactcataaggtgtaagataatcaataacagcagtgggtaatcgatttatggtaaagacagcactttgaaaagctaaccaccaataggacaagtcaagaccagcttgagcaagcatggtaagaccagtttcagccacatgtctatgcttgcgttcagctcggccattttgagcatgatcatgagggcatggatgagagaaatgaatgccttgatcccttaaaaatctttcaaatggcctatattctcctccccaattagcatgtacacctttaatgggtaaattaaattgcttctcaaccattcctttaaacttgatgaacacatcaaacgcttgagactttaaatgtaatgggaaaatccaagtgtatcgactataatcatcaagaaaatgaacatagtacttataactttctttggacaacacatgagatggaccccagagatcggtatggatgagttctaaaggttgaaaggcacaagtttgagagagaggataagggagcccatgacttttgccttgctgacaagcactacaaaactttagatccttcatagatccagagtgaggtacatgattaaggagccctgacctaaaatagcaggagcaggatggccaaatttgttatgtagtgtattgatattgttctgagcagaggacacaaaagctaaaggagaagcatcaggaacataagaagaattgcaatctttattaatattgagtttggaagagttacaagaatccactacatcattattattgaaagtacagggagtattacaataagaatgagaggtggatttaggttctgtggcaagaaagcattgaagacttttagaggaagattcagcaagatcatcaccaagcttgtataatccatctttaagccgtcccttcagcaagactttcccagattgcttgtccttaacaaaacagcaattgcgatgaaactcaagaaacacatcattgtcagcagttagtttagagacactaaccaaattctttctaatggcaggaacttgataacagagttcaagtgtaatggacaagaagaggagggtaaagaggcagaacctatatgagtgataagtaaatgcttaccatccccaacagcaagagattcggttccagtgtaggcaacagttgtgtccaatttgtctgagctgttggcaacatgactattggcccccgtgtcagcgaaccacgcattatcatcagcatagtcaggcagtatggtgttggtgtaggcttcaggatcataagtaggctccattttagtaagatacgcacgaggattaggcttaggtataacccaattcttgtcgaatctgtagtgacagacagctgccatagtgcccaaatttcaaacagacttggcaaagaagtctttgagaggagtaagtgccacgaccacgacccatgaatcttgcaccagcgtcattgacatttcctcgagcaggtggtggctgtggtttgaaatgtccagttcttgaagatcccagggccatgttggcttgcatctttaaagacagatcagtcatcgcactatggtgttccaatcgagtttcatgagccatgagcagggtttgaacttcatcaatggtgagggaatcactttgagacgtgacgccagacaccacggcatcataatctagtccaagaccattgagaagttgcagaaccaaatcttgggaggagacatcagacccagcaacagcaagtgaatcggccaaggactggaccttgtcaatagtcagaaattgaaagattacccttttgaatgtgtgaaaactgacctttaagttgcagcaatcttgctcgagattgagattgaaacttttgctctaacgcacgccaaacagcaaacgatgtagtgtgatttgcaacagaagcaagaaccccctctgtcatagaagaacgaagccaaaaaagtagtaattgatccctctttttccattgcacaaaagccggattcggagcaccagtaacaagattcgatggagggaaaacattgctgaacaagatgtcatcaagttcatgaccaatcacagtaggaaccacctgtgatttccaagccaaaaagttttgacgatcgagcttgagggtgagggaagaggtaagagaactagaaaatggattccaacccgtaaggtaagaaccttgagacgcagcagaattttggtccacttagaccagcatgatcggaggtggaggtgtgtatagacgactccattgacataatctgataccatgtagaatggtaaaaaccaaggtaaaaaccgaacgaaaatggtaaaacaccaggaacgaga

SEQ ID NO: 381808 - DNA, 3704 bp, Cannabis indica
tctcatttgcacacaccttcctattattgatagccaacactagtgagagaaagtcagatttaaccgtttctagggaaatcccacacgaaagagcaaaacttagtccagtcataagaacaaaaatttcaacttgaaaagccgtaatactacctgaaaagatcaaaacatcatacgatagaacaacattaatacaagctcgagaaaatattattcactaaaactagataactaagaagagactatcaaccaaagcataactcaaccgacaccaaaactaaaactactttttacagcaaagaaatgaaacaaaataaacctaacaaccaatacaaaccaagggccacacctttggttagtaactatcaaaattattaaaattcgtgtacaaaactcgacaagcttccggggaaatgaagatcacaagacaaaattaaattcaagacaataacaaaccccttctatactgaaggagaaaatcaaggagactaaaataacccatactactttaaatagattcttttggttagtaatagccctgttaacattattttcttttcaaaaactattaagactcttagaaaatacaattgttggaaactataaaccttgaaaaaatttatctacacaatcgaacttgtagtgaccctagattccttaaagacagttgcatccacacacaaagtggatccaatatttgtggatcgatccactcgagaaggagaatagttagaaaccccctcctcactcataaccaaacttttcttcactagtcccttcgctaaatcaatagtcacagaaacttgagattcagccagttatttgttcagaatgttttttatgttctccataagtcattttatttctctctgtccatattgcccacggaataataatcagtctttcgaaagaatttttctccacaatttcagatgcatagagtattatctgcttataagataaatctttcttaaccacgtgaaggaaatagtaatctaataaaatctaaattttttgagcccaagaacactaaaaaattgcatgtgaatttgaattacccccataaacaacaaataggacaattattatgcggaacaaccttacgctgaaataagccattactcgagggaaaaatctcatgaaaacctcaccatgcaaaatgtaaaattttctacagaattttgaaaccccgaaatttcctccaccatattgagaacacctcactagaagaaggcaaccctttataattgatcattgccaaattataatcacttttgactgaatagttgccatgttccgtgtaatgcaaactagttatcctcatgctcaaagggacttaatgggatcgataagatgagttcaacattaggtgaattgaaatcactcttaattttgcaaatgtcccaacctcctagaggatcaatgagtattgaaattgtgatcacaataaaggagagtttggaactggaaagaaaagatgacgatcgtggtaaccaaggatcattaaatacccttgtagaaatactgttaccaatacatcgccttaatcctttcagtaacaaatctcttccccatacaatctctctccatgacatggatagataatcactctcacttgcctccaaaatagaagagtctctaacatataataaagaagacgatttaattacaatttttcatgcttgttttgctagaagggctgattatattgattgaaccttcgaaaaccaaatccaccatcactcttggatcgacacaatttatgtcaagctctccaatggatactcgctcctgtattcaatgaacccaccaatatcagtctatcaaactttcaatctcttcatttagcccttctagaattcagaaacatgacaccaaatatgttggcattgcttggaatactgctttttactaaaatctctttatccccttgcaagaacagctttatttgataatcatgtagtcgaagatattttcttgataatctctttaccgccttgcaacatattattatcattatcattagcggtggcaaagaattttcttatttttatttttttagcggagattcatttattattatttatttaaaaattacatttattattattattaattatggaggaaaaatcttaagctctaaagaaaggggttggggactgaaatttattcataaataaaatcagccaaaatcaagtttctaatagataaagggtaacaccacacaacactacgagacaccgaaatagcatatttaactaagatttgagctacctcgttgatagatttgaaacaatgaataaaatgagcatcctaaaaactagaaagactaataaaattatcttgcaaaaccaggcctaaagaatattattaatcttctgcaatatcgtgttcaaaagtatcatcaacaaaccatgttgcagtacagttcctaatataaagcatccctagccaccattccaaggccacatgaaccattatcagcattaagagcagtatccgtattaatcttaataacactaagtcaattgccctcgatcggaaggcactgccacccctccaaacacccaaggcggcattgaagactcttgctcgaaaggccctaagaaattgagagccacattatcatgcaccttttcttttcttcgatgccaaatacgctacatcactactaggataatctcaaattacacttattattattgaaaggaattatggattttttttatgttgctaatctatataatttttttaagaaaattttatgtttttcatattttgatatttaaatagatttaatcttatttttttatacgatggtgatggtgtacaatataattatttagaaagtcttacaaaaatttgatgtgccaaaaataaaattcaaataattagttgtaggtgtcaagaacaatattcaatattcatttaagaagcacaatattcttgcaaataattctcttttcttcatcagtttcagcttattctttataatgtcacattgtatgagttttgatgaaatgaaattagtggtatatgtagaaaaatctaaaaaaaaaaaaacaaaaggaaataataattgaaagtgaacaaaaattaattaattaaataattaaatacaataatatggatcccaaaaaaagaatacaaaatttagaaagaagattattatgagtatgaagatgaattaatggaaaggaaggaaggatcaatcccaaggactcaaagagcattcctcaggcaaagttgggaaacgttctttatctttgcaataatcataaataacaaggttcctctggacccaagcatagtcgagtttttgtgaatcggataagtgccaagctgggtattggtcccaccaattttttgttgtggtggacacacaagcagggaatgggtcctcccactggcatgcatctacgctgaattccttataagacgaaacgaatggggccttcttccagtccgttttctcaagcccacctcttgtggcccaatcatcagcattccatatgcttgagaacaagtacatgggctttgaatctgggaaaaaattgttctctttaccattgttcttgaaaactctcacagcaattttatccacaaagaacctgtagttttccataagtatatgtagactttcataaatactcaaaaataaaaaaattatttataaaaatactagttttctcttatatatttttttt

SEQ ID NO: 381809 - DNA, 3708 bp, Cannabis indica
cctactcctactaccatatcatcattttcatattttataataccaaattctatcatttctggaggaagaaatcgacgagaaagtagtgaggacaacttttagagagtgaaatcataatgttttgtactacaatacaatgagctcagtgtacatgtatgttaatcatcattttcatttgcattaatccattgccactcttccttcattttattatcaacaaatcaaaagtcaaactaccttagcttaaacaaaataataacaattaaacaaaaatagccgaaacccaagtaaagtcttttttttctttctcacttgttgtgcctgtttgtgtgttttactactacaagtacaaacaaacaactaccacaccaaacgtaggtaggtaagtaagtagtactactttcttctacttagtccactactacacagctatagcctataaagctagttagtgctcatttcaccagtccagtaagttttaacagcaacaagaattttctcaggattgaaaggaccactttcatggtccatgatttgagtcttccatctcatctcctttgcaatgctctgtatctttaccaggatctctactgtgtctctgaatatcactgtccttcaggcctcagaattctatccatctctagcagaacatatgtgatatcacaccttcacaacacaacacacaacactcaatatacatacgtgtatcattatgtgtataatcttactaaacataaagatgtcttcttttcgttacctgtcctggtatatgctgaaaacgccacctgcatgaataagatcataagttcttggataggttgagaaagcctcgcaccaatcttggtatgctccaatgaaaccacgctcataaatcacaccaagagtgtccaggtccgagttggcaggcaccacattcataacccacacaggatacttagccaaggcggctgcaaatccacccagatgagcgttcatgtccatgatgttcctgtaacgcccttgttgaagaggtaggattcgcttgtagtgagtcaaccgctctttccacacttgattgtcctctctgaatttctctgcagagatgcctggtatggaaccgctgctgattcttggaggcgtggcaaaggcacgctcaggccacttctccagcttcccaccagccacttctgctggactgctaacatcaggcattggggtgatgcaagtttccatgttcttataccaactcgcatcgggattctcagatttgcacatgtgtggtgttttgtataccttcctgttcttcacacactccacatgattgatgggcttttgccaaatcgaaagatcattcttttcagctactttcttccagcaaagcctctttgcaacatcctcaatggcgtcttgctctcctttcaagtcctcttggcttctttcccaacctctccagtactttttccagttaataggtggcccagaaagaacccagtaaccacctggcctcagaactctgtccacttcaattaggtacataccatctgcataacatgtaaggtactatgaagtaagtgcttctgctatgaccaaggacaggaatccttaagcttcaagaaagaaagaaaaagcttactatattgatgccaaggtattaaacaacgagaacagtgagccatatcgaaagccctggctggatagggaagcctttgggaagccataatgccaatcattgcaggaactcctcgctccaatgcaaactgaacttgtgcttcgtgagtgtcccttggcgcaaaggacatagtaactatgttcctcttcaacaaatatgctccccaacttgctaccttaaacacaaagagccaggagaatatgaagggggaagcattagcaattctatagtactatttgtagcaaaataaaataacaaacaaaggtatacttacaccacagcctgtgtcaatggctgttcttatagctccattagtaagaggtatgagttcattaatgtcatcaatataggcatcagctccacgagggaacatggtgccaccaccagggaatctgaacctatcaccctccacttgaatccaattctgcacagctttctctatgctgagctctctgtgaggaatgttatcataccaagcataatctctgctctgaggccacttgaaaggagtcttatacttaggaggagcaggaatgaggcaaaggaggagttcctccttggtggggcaatcgctctctatacttaagcatgtcacggtcgaatttccttcccctcggaggatgttggcatggagtgtactcactcagggacatgtcacatggcggcaacttgcgtgatgcatcattagttttgttaatgtccacagtgtgatggctttcgaagtcaaagcaggcgatgaagaggaagaggatgagggtgttaatgatgatttgatatccacttgggggggtccaacttcacaaccaatcttattggagacacccgcagatggagaggttgaaggattagagttttgccaggctcccaaaacataagataatatgcatagtccactaactccaaaaatccaagtaaggcgctttcttttggactcgagatgattatgatgatgctttggggatccattatagtcccgggccatttttaataacttgtttcaatactactatggagtttccagtttcagctcagaagaattcactccttaaacaccaaacataaaacagcttaggaaaagcatagaaaagagaaagaaaacatagactacattttacaacaagaaaagggaaaaagcaaaataaagatgggaagggaaagctaaaacgagtatacaataagagtagagtaaaaggattggtattttgaatttgaattgttgttcaaattagcaaaaagagtaatgagagtgaaaaatagggtaatagtaaatccaagatgggacttttttcattcaagaagggcaggggacagctatccattccatccctctctcccaatacttatagagatatcagatagtccaatccagtccacacccacaaacatggagtttttttaaattcaaataattccctaagtggccaaaactacttaatatatgtcagacccacaaatctttttgcccattcaagacacagacagagacacataataataaaaataataatgacagcagctgcaataacaccaagatttactcatttaaaaataaacaagaagaaaaaattacaacttttttctgcataacttgtaaattattgttctttgagtaattttttatttattgttttctggggtggtgaaagatgatatttttatagctaaaaaaagaaaacatataagaagacaatataatggcgaaaaaaaaagcatacctttaaatcgatactgggcaaagagtttgcaagggctgtaaaaagattaatagttatatgtaaaggaaaccatggttagaaaaaaaaaaagcaaaagaaaagaaaaaacaaaggaagaagaagggttagtaaaagaaaggaacaggaaaagaggaaaaagaggaggaggaggaggaaagggtgaggttgagattgagaggctccgccattagaggagggacttggtcatattcattcattcttatattatgttaatgttatgggaatgagtgactgactgactagtaagaagagaggagtggcacaatctcagcctccctcaatttactctctctctctctctct

SEQ ID NO: 381810 - DNA, 1761 bp, Cannabis indica
aaaaaaagacaaaaaagaaatggctgaatgagagagggagcgggttctccttggtgctgatggtgaattttgctttgtcttatccttataatacaaggccatagttctaccctctaaatcttatacagtgtattaatattattcttcactacatttgttgttttgtgtcttcttgatccctttttgcattgcaataatggttcatgaactgatttttttttttaaaaaaggtaaagaaggataatcatttatgcaaaattttatttagaccaagcctcattgctgtttgtattaaacaatgggatgaggctaaggttgcatgcacacattttcctgtgaaataagtcaggcttcctaatttatgttcatgtttcttatgttaggtccacgattttggtttctttcgttatgatccagctgcaatacaatttcatgtctatgaggagattcctcttgcgcctgaatctgcttgtgttggactggaaattagggttgttggtaatgatagtggtgagaaggtatatataacacatgcatttatggtttgtttccatatgtttcttattgttaattagtcgctgctttgcttcattatcacacacagttctaagtaacaaggcaataacgtgtcaacaataagccagtggtagcttaggcatacaaaataggctgctttaagataataacagatatatcctttcagtttgtaaaataagatagtaatagatatgtatccattggtccacacatatattatacatgtatctgaggttgaatatattagtggaaattcattagtggcatgttcaatagaaagctttgtctcagtcctgtcagtgtcacccttggaactttgccatgtttccaatttgtctagcaattattttattttgggactgtattctagctttcttatttatttatttatgtttgtttcattattggttcttactgactaatgtctggttgcaggtatctatattggctggtacccttgctcggttagatagggatgctcctcactacaaaaagtatgtagacatatacttgccaaaattatcttttgttctttgtactatgagtgtggctgccttgggataactgattaggtggaacttgttgttctcaaactttgaagccatagtgataatttaataaatatattttccatcatgctattttacaaatattgttatatgatgcagggatggttacaacgactttaatactttttatatgcaagtaagtgcctcttcatgttgatatcaacagtaagactaagttattattgtaatctgcctctttcatgtcgttatacggtttttcttttgatttagcctggtaattgcgtagctctgcattttttttttctgtagtatacttatagtttgggtatctcagatatatctttatatttcatttagttgtaatgaaagatttgttaggtgaagattgtaacatactatatagcaaaaaaagagagatttatttcaagaaatgattgataagaaaggaatgactaagataacacaaatttaaaaagcttggtaaataaaaataaatgaaattaacaacagaagaaaacaatttcttgagaatttagaatttttgatgcatagaagtgttgcacattgcatgcaataaatacaatttatgttcaaagaaaattatcattgttgattatgcttcaatatatctgttcatgcattgttatgtgatatttgccaatacagtagaacctctatttaagaatactctatt

SEQ ID NO: 381811 - DNA, 2257 bp, Cannabis indica
tatgtatatacatatattttagtactttattattaagtgtcatatttcccaaattccttactaaaaaatgaaaaaataaagaaaatattggtgtgggatgagagtagaccttaaattaatttaattaataatttagacaataaaatgacaaacactaaatattgtaaataaatagatttaaattaaccctaaggtgtatcataaacttttgaaatattgtagtagtatatatatgattgaacattatttggtattattcttaggaataattacacaatgtattatttttttgtaaaaattataatagtatattttataaataaaattataaaaatcataaaaatatttaaaatcgtatttttataattttattgttatttttgtgtacttgtaaaataatcactttttcttaagagtttttttttaattaaaaaaagagttcttttattagtaattaaaatgaaaactcataaagataattaggtataaactcagaacacatatatgtatattattattatatactgaaacaatttttttattttcttattatcttctcctacactatgatttggccttgagttatacaatcagaaatgtttaacttctatagtaagaatgtgtttgttttgttctaagttcccttttttttattttcataatattgagtattattgtactacttgtatttcataatatataactccatttacaaaaagcctaatagtacagttgttatacttgaaatgagagtaaaatctctactaaagtaataacaaaactcaccatgttctttgttttctgcaccaattataagtctctcagataccaaagacctgtaatttattaactttggggcagttgtgattgggctatagatgccagaactctcaatatgtgataatatattatgctttaaaagttgtttcttaatttaggttccatttggttaagagtaataaaacagaattaaatggaaaatattctattttcattcttctcatttgttttgtgcattttaaaatattagaataactttttccatcgatttagtgaaatggttaattattctaattaaaaatgaaatatgttaaatttcatttcgctctaattctatttctattcttattcctatttatcacgtatttttggagtaatatagtacattagtaccagttggtgtagcttaagatgtgtatagagaggaaatatttaataaatttagaagaaaataatttatgtagtttgtaaaagaagattataaatacaagagccatgctttgcaaataatgctacttgactaaaattaagttacaccactatatgctaaaccatagactaatccttatttgataaaacatagtgattagagaagatagtaatatatattaggaaactaattaagttagactagtatgttgaattggtttatgaactttggataagtaaagagaaccatccaatttttatagtcaaaagctatagaattagaccatttgtttgtaaatccacccctgtggctatagttgccactattttcggttacaaatgtattatatttggcttattagaaattaaatctatgattttgttttaccaaggttaattaatcttctgcaaaatctccaattcggatgaaatatttatatttttgttatgtttttcctctcgaatactgcataccaagtccaaacagtgcttaaattaattggttatgataagtttgtagaactattttttgtagaattgttatcttaaatggtttgttatattgtatgatattatatactattattaaatacacagcattagttaataccttttgctactatcttaagtacattatttttggttacatttgaatttttgttagttgtataataaatattttttggatatcactgtttgaagccaaatagcatttttagaacttctctctgtagctgttgtatatgcatattagcatgattgcatgacaatgttacatgataagattgcattgcatcattgctttagtaattttttattatatatatatatggtaaatcatcgccatcaaaacaagttgttaaagcaataatgtctgaaacacaattcaaaactaaaactaatcacaaaccaaaacttaaacttaattgaaaattagacaaggaaaacttaacttgataatgaatgaataatggatctttattgaataggaatagtcagtagtacacaatagaatgagcctaaaattacaactcaacacagtaaagta

SEQ ID NO: 381812 - DNA, 2364 bp, Cannabis indica
tttttttaatctgaatgttctggtggctgtggtagtagatttgatttttttcaatcttttctcttaatccttattaagggtaccaattcagttaattctgttatagatgttagttagtttatcaattagtttgatattgttttaactgattttcttcttcctctctttctgttttcagcttgtgtattggctgcctatataagcttgtatggtactctttgtttcattgaataacaattcactctttccgtatttttttcttcctatgttttctctttctttctcttcctttcgttttctcttctgctacaatgtctaggaaagttaacatggtatcaaagcttgaatttccgccattaatgggcaatgtcattactggcaatgggaaaagatttgctactggagataactcgcaacaagctcttcaagaatcctcgaaccagacacagagtcttcaacatcctcaaaggaaggatcctgaggactcgactccaatttacttcaatcacagcctttccatcaagttgaatgatcataatcttgttgtggaaacaacaagttttagctgcaatttgagggaattgactacatcacttcatcagatcatccattgaagtaccttactgatgaagatcgtgccaggataaactacaatattgcttatcttgattgggggctcaagatcatctgttggtgtcatggcttctgtcatcgatgactgcaagccttttaactcgcatggtaggatgtgaatctgctagtcaattttggtctaccttagaaaattacttcactctacaggtctctgccaagatccttgagtttcaaacgaagctccaaaaatctcaagaaaggttctttatcccttaatgaatatcttctcaaagttaagaaactttggatttgcttgcatcggttggtgatactctttctctaagggatcatgttcgtgcgatcttcaaaggattgctaagtgaatatgacacctttgtcatatccactaatacaaggcttgagcaatactctatagcagagattgaagcacttctgttggcatcagaatctagaattgagaagacagatcgtgaagttgatctgagtgctaatgttgctacagtggaacctgatcctgatcttaaagccaatctagccaactatggtagaggaggatacaaacaaccacaacatttcagtcgattccacaacaacacaggtcctggcaatccatcttttggcagaggtaactcacctaccaattttagcaatttcattgcttatggttattcctactttactcctgttttgacagaggagtttgattgcctgccaccaataataaactccagtgtcaactgtgtctcatacttggacacactgtccaaagttgtttctacaggttatgatatttgagtttattcaaattacagtcgttatgctctgattctattctgatgcctcaaatatgtttgtggtacgtctagttgatgtcccaatgctagttttgatccttttacactaagacggtcccagaaactaaaaccctaggtgagaatgttaacctgggcacctccaggttgcaggtttgagtaatttcatctcccggggcttggattatgttgctccatgtcttcatggtatagaatattgaaagatagtgaggttgattcaagttcttaagtccgaacttctatcccagagctcctgaagtcaacctgagtgcaggactagggtttcctctcagatcgactgctatgattcgggtctactcaacttcgtaacatcatccttcttgctacgtgtcaaatattgatgtccacgttatcaggaaaagttttcaggttaacaaggacaaaagtgtatagtctagtttaccaatgcccatactaaacttgtttataatctcttggaagtaatttttctaaaataaaaatatgcttttaggcttctgtttgatattatcaattctaataattcctaggcctaaatttttcattttaaactcaaactaaactttcttttaatgttgtctatttcttgtcttaactttcctattattaaaatgaaatctacataaaccaatagatagacttaattactgtaataataaatgagtatcataattactcttagctagtaaaaccaattataatcatgaatttatttatctaggtgcttgcttaagaccatcaatgacttttcaagtaagtatacattgttaggatcacatgtgtcataaccttctcgtaaactcatgtgaattattttttccagtaactcacactactacaaataatcctttttatgtccctttttctagtttaacaaaaatggtgttggacatgaaatatttttggagagtttttt

SEQ ID NO: 381813 - DNA, 1822 bp, Cannabis indica
aaaaagtcttttgatcgtattatccaacggatggcagtaaaggtcgggttcagttgatccctgtggaaaactttggggatcttgataataatgtgctcttgtggtggaaatacgagtagtgtgaagctttggaaagtcaagtatttatttgctaggggtggcattgaatttgacaatttttaacctaaccaattttctgcatcgagaagctgggtaacacaggtaggaattaacttttatgagatctgtgctctattcttatcttatccttcttcatttatttttcatctattgatccaacaattgggttggttgggtggtgtttggaagcccacttttttgttctcaatgcctttcagcaaccataaaaggaagctaatccagaaaggcgcaatgtttcatctctttgacttccgacgaaatcaagacgagttgtgaagatgtgagtttctctgtacttgctcgctagcttttcaactacactcctccgacccagggtggattctaggggaagggcagagcctcaccttgcagtaggatgaattcaatactcaagtgctcgtttcagtgaaaaagttgttccataatctcacgttaatggaactagtcgagcagatacaaaaagttcgacatagagcattttggtttttaagttatagcagcaaaattcttgtccatggaatccttgtcgattcttctcctcgttccttttatcttgggcatctcacactaagattcaaaatttacccaatcttgatattttcacttaacacaaaaaataattagaatttttgaagatttcgcacatcacaactgaagtgagacatggttaaggaaaagctaaccatgagatcgatgtgtcgtgtcatatggttctttacttttttttttttttttttttttttttttaatttattttttaatctatttatatggctatgtattttttttatctgtgtaatcatcttgttgctcccttccttttgaaactatttccctattctttctatcttttgttagtaggtaacaattccctttagatcactggtgcatttgttgagaaaaatcatttgaaccaagctcctcagaaattagaaatccattcatatttttattgaagaaaattttggaggctcctccatctggaaaagagaaaaaatgttttgtaggctcttgtaggtattcctttaagtttgtccaatattcttcaagcttgtatggtcaagtgttgtatgctcaacttgtgtgtgttagaaatttatataaatgatatgaagcatatatgatcatgtataaatacacgatataattaaaagattaaaaaaaaatttgattagtgtgggtaatcggacttcaaagctttctctactttctttacatagattgactgtattttatagaatgactagtgagcttggagaccgataccctatatttatataggtgagatctttcatcaaagtctctgctacaattaattgtcaatattttgacaattaattctggaaattaaatatagtaattgaaatatttggtattgaatctgactatgattaaattattttaattagttatattttataaatcaaattaaataaaatatttgatttgttaccatataaaaattattctaacattcttccacttggtcagcatttaaataaatttaccacttaatatccaacaattaaccttgttaaatatcaaaagtgataagtcctcataagcaagtattatcttacatgtattaccatacatttattacataacaatctacttaatgtacttcatgtggcaatgtacttaagtgaataaaccctaa

SEQ ID NO: 381814 - DNA, 1273 bp, Cannabis indica
tttcaccatagaataaaaaatttaccacatcgttcatctgtaagaatgtttccttgaatgtccaatattgaacagcttacccctacgaatcaactcagaattcggatcaataatttggtagtataattgagtgggactgattttatcatagttataaaaatctatagtttccataatagaaatgaaagggtgatttccttatatcttagttcaaggaatttaaatgaattagatctcacttcatttgcaatggtataaataaagtttcatttacaagtaactaagtattttaaggatcaaatactctgaggaatagaacagtaatattgtatcccacttatgtagatcacctatagaggtttgaatgactgttgatggttataacaatggataacatatcttaataggttacatagcgttctatgaatttaagagtgcaattttaaacctataatggaatcacaagtaattaatataacagtaaatttatgctaatgtttattagatctaaaattcatgtattcatggtcctaacattatctataaatgattcttctaaacaagctcaaactattgtctcaagtgaccaatagaacaaaagaaaatgacaaggctaattttagaattttatactaagaagaggaaaaacatgacatgtttaaagaggataaactaactttaattatgtgatcgatttaatttataattattgaaattttttaaattatgttcaacttgaaatagaaataaaataactaaattaattaactatgtaaaattaatgaaaatagtcaatttgacttaaattaaaataaaaaattaatcagacaaaactcaataagtttttagtcatgatagtattttctatttattttagctaattatttgtttataaaaatatttaattagttataataaaaaagaaagtattttaattaaaagataatggggcaatttaattaagatgaataaaaaactcaataagctcaattactatagtgatgtaatatcccaaaaattaaataagaaatataaaattgtaatatctcgataagcctaatggtaaataattaaggtttataattatattatgggttaattaggtaatatgtgggattatgatcctactaatctagttcaatataaattttaaattttgttataaatggataaataagcataatttataaattacagagatttatatggtatatgtgaatgttatatgagttattggtgtaataaaaatattttcaggtttggcgactttgga

SEQ ID NO: 381815 - DNA, 1005 bp, Cannabis indica
agggtcaaatctttgatgatttcatcgtacatgattgaaatgcgacaaattttggataggtattctacatctaaactgaattcttttaggttaaaaaatacatgtttagttgctcgagaatagttatgagattttctagaagaaataggggttctgcttctagtgacaacatgctatattggggggtgttatgtgggactgcaccccatatatgttatcaaatcactatgttctaagaagaaatatttgaatatcaatctcatcgatttcataagtatgatatcatcactattcttttaggaccataaataaatctaaggactagattcctataattctagagtattctttttttaagatagatagggtcaaatttctgttacgacatcaataaatggctttagcgttcaacgcgagtggaagcatatggttgcccgattggttaaatgctattaatgaaatagtaatttactattcttaacaataggtccgagagatttttttgttcatcatgctattgctctaagcttacgtacaattacattgatcttagtaaaaaaaagctttaggaccatatttactgggtttagttcaatcaaaaacaattgatccctctttcttgatggtcttcatcacattcttgagactacggattgctctagggagacatccccatgaagagtaacattctgcccacctagctaggatgtcatcattagaagtctcgaaatttacttgccattcccaaatttaccagccattgaatcccaagaatcacatctgaactcgccaagttcaatggtaaaaatatctccacgatggttaatccttgaaagcttgagtatttgtccattccatgtgcctttaatctcgtcttcaggaccatgaaatagatttctttattaggaaatcctaatgcttacttttactaatttcctattattaaaaagaaaaagtgaaaaaaataatgggaaggaccctagataaatgggtcttttctctttt

SEQ ID NO: 381816 - DNA, 1809 bp, Cannabis indica
tttttttaaaaaaaaaaagatatcaagatagtgcctacttggattcatttagatgatcttaagttgaaatactggggtgagaagtccttgcttaagatcacatatacgtaaattgggtactccattgatggtgggctcagtgacaagaggaaagggataagctaaattatcctagagttctagtagaggtttcactcaatcaagagtttccatacttcatttcatttaagaatgaactgaaccagaatgtaatagtggcagttacttatgaatgtaaacctttggtatgtggtcattgtaaagagatggtccatgccacaacaaaaattgggaagaaggaaggaaagaagcgagaatgggtgattaagaaagacaccaggaaaatagaatctgtggaagcagagaagaaggagattcttgatgcagagggatttcaacttgtttaaaaaagttagaaaactaaacgaaatgaggtacaggaacaaagtagtgttgagaattcattccatgctttaataggacaaatcaaagataataaagatgaacaggaagaattggggaaaacatgaaggagggtttcctcctcttcctaatggatagacttttatgctggaacgtccgagagatcaatagccaaactaaacaatcagaagttaagcaattaattgcaaatcaaagggttggtttggttggtctccttgagacaagagttaaggcccaaaaattggaagccttgtatgtgtatgtttacaagatggtgttttacatcaaatagtgcatgacacgatgaaggaagaataattgtaaattggaattccatgatgtttaatgttagtattttgaaatgctcgagcccattaatttatctttatgttaattctattgataaaaggaacaagttctttgtctcttttgtctaaggctttaatgatgaggatggaaggagaagtctttagaaggatcttcaaagtctagctatgagtgaacagtggatagttcttggggattttaatgatatcttggcccaagagaaggcgaacggagctagagttaaatacaagtcctctagagagtttattaactgtatctaaacttgccaactagaggatgtgaagtttagtagaaatttctttagttggagcaataagcaacaagaagatgaaagaatttactcaaaaatagacaggttttagctaatcagaggtgttgacgctaaaaagtggccaacatcagctcgctaaattggcaagaatgaataagttgtttaagtaattataataagagacacacacaaaatttataaaagttcaccccctattgtactaagcatacagtatggactacccactcaaaccttgtaatacgccaacgagtttcaaacattttgtcgcgcctctctacaattacacgtggtggttgtctttctagcatccatgaacttaattcaaagcgaccatcatcgtcccctctctagaatgtcccgtattcccacaaagaaaagtaacccagtcttaactccatctcggtctactaatccactttaggatactaacttgctcaacgacatcttgatctagcattcagaccatcttgatccttccgcacacctataacccttctaggataggccaactaggttcaccttccattgagatgaacttggctctgataccaattgtcacggctcaccttttcaagcaacagaacacctgtccagacccttgatttctctaagccaagatcagcctaccaatcatccgagtaacaatgggctcattttttgcataactgtgtgcctcatgcacactt

SEQ ID NO: 381817 - DNA, 1219 bp, Cannabis indica
tatatcaacacttggtagtaagacgatgatccatataatttggtcatggtattttgttacttttgtgctctgtgaagagttttgtggctggatttaggtgttttaccagatcaagttaatgtagatggagattattgaagttctatttgttgatttctttattttccatctggttggtgtaaacgttgaacaaatgaatgtgttaagctttaggaaggtaaatatagttcatgggatatacaaccaagtcattgttaatttttaattggaaacttttactcttaaactcaaaacccttttcgtgaaatgcaactctctaaactaaaacacaagtaaaggaacgcctctcttagcttagcgtgcaactgcactagtgacagcaagcccaaaaccttgattgttaagaacacaattgtaagctaagtaaaagaaaggggtgttaatattatacaacgtttttcggtcataatttatttcacagctttccagcagaagaaaaaaaaaaaatcaaagctaagaaaagaaaagagataatgcttgaatttgtgactgccaaaacttgatgttggcattcactatgttaggtagaaatctgttgaatccaattacgtttttattattatttaactttatacgaaaaagtgtatatatattgcaatcaattgttagaccaaatgatgattacaaacattgattaatgtatatatatatatttattattattttagttttagagaatgttttgtttatttttaaatttagtagaaacttgattaatgtttcatgtttacaaacacaattttatcaattgagttttttgagttctatttgcactatttctcgtaaagaatttcaattatgtgttgtttacatggaacaaagactttatgttttacgactagatatacaaattgcgcttaataacaaactttttaatattgctaaacctagaaactatagaagtaaagagattgataatagtgatgaaacatatctatgtcatttacgattaggtcatatagactatgacagaggttaaccaaagatagtccttttaaaaatgtcatcttgggtgaattactagtttgtgaatcttgcctagaaggaaaaatgattaagcgttctttctctgcaaagggagagcgcgctaaagaacctctagggttagtgcatttagatgtgtgtggacctctaaatgtaaaagccagaggaggttatg

SEQ ID NO: 381818 - DNA, 904 bp, Cannabis indica
aaaatatttagcagaaaacactaagaaacttgtttggacttagagaaaataagaaaggaaaaagatgggaaaacgcatcagaatatatagtcaaatacccttgttctctggttgaaaatgaccagaaaattgcatagctccatttgatgcttttcacagtcacagcaagctgtttactcagtggtacttcctcatgcttttgacaccaattagccatttttaatttccccttttttctcaaaagaaaaaaggaaaaaaggaaaataacctgaaaatgaaactgaggaacaaacaagtttagaagaaaagaaacccactaacagatcagtcagtctatcttttcaagctaaatggttgtgactgatatctttatgaccaccctcaaataagtgagaagcctagagtgaaaatggttgactaaaaaaagtctgactttatgaaaagaaaacagagagcatcgccaatggtatctataggtgcaaaaagtacagacatcatcaaacaatattaatattttttttcattatttggcaactttttttcctatggtaggcaacccttttacatacatttttttgttttctaattaggatatttgttcttgacggcctttaaaaattacctttaaattattgaaatgtttagatttaaagatttttatttaattttagtaaataaagtttaacatgcataaaagtttaagggatataatttagtacacgtgaaaatttgaaaattataatttagtactattaaagtctcgggagcataatttagtacataaacaattatcgaattagtaaaattaaataaaattagacaaaattcattaagtctaacaatctcaataatttatgaagaatttttaacggttaaaaaaatttataaaacatgatttgataca

SEQ ID NO: 381819 - DNA, 2573 bp, Cannabis indica
aattatgtataattttagtgtgtcataattattatatttactataatattattattattgtttaaatattgaatatggttgagtggttagaattaaaagatattgtgatgttattatttagggtatattatgtcctttaaatagagggaaaaaacaatttcatgaaaaaaaaataaaggaaaaaataataaaatatttaaattttaaataaaacattttatctccttaataaagttttactaatcttaagattactttttattaaaatatttgaatttaaaaaatttaaagcaataacataataaaattaatgtagactctaatatctaaatactaatcattgctttagaaacctacttattataaaattaaaatgtcatgacctttgtgtcttcatgttgttgggacttgcacattagttctatgtgttcaaattttttcataatttttgtatttcacattaggtctccacccatatatattttgtggataatttatttatttatttattttgcaatgtaggcatgtaagatattcatttgtattattgttgtttgagttataattatatataattatatatatatatttaatacatatgaaaatatatagatatattttagagggctaaaataacttatcattacttatagttgttttttactcgttaaggactcgtttggtatgccgtataagggtcgtattgtattaaataataaataacactatatttggattaagcaatgtattgtattaattattacgactaaattttttaatacaatgtatgttgtattatttaatacataatatttacaaaggatttggggtcaacaccaatcttcgacccggactcagactcggacctcagatcccgaatcccgacctcggacccgaactcggaccctgaaccccagacccggacctcgaaccccagacccggacctcggaccccggacccggaccccgaccctgaccccgaccccgactcgaaccccgactcgaaccccgacccagacctgaactcggactcggaccctggacccgaaaccagactcgggacccagacccgtacccgtacccggactcagacccggacccggacccaaacctctactcgaaccccgacctcgacccggacgccaaaaaataattatacaacaaaatagtaaaaagtccctacaaaataattatacaacaaaatagtaaaaaatccccacaaaataattataattttaatgtagagtaaataataaatatttttataataattaagctcccacacataaaaaatcttgggtcggtaacaaaatttccactttgggttaaatgattgaaatttatttaaaagccaatttttcttagaagtgttaaaataattttataacatattttaaaattacatgaaatatgttttttgtttcttctataagtttgataaacatggaattttctattttgtgcattctttttataaatttttttaacatgttttgggatctttttccatctattttttgaattaatggttactatcacatcgactttaagaataattgtttatcacatcaaacgattattgttaccaacttttattttattagtaatacaatagtaagtagtcatcaccatattaattaatttgcaaaataactaattccacattaatattatatgttgaaatttttttaggtgagagcaatattttatattatttttgctctcacatgtaaaaatattagtttagatgttttattggttgaattaagtggttgtacgtgaggtcggctttgagattggatgggcctttaaaaaaaataaaattattggatcttttatttcaaaaatattattcgtatattttaaaggaaaaatatttttttgggctctgaactaggccctaggcgcaggcctaccctaccttaacccaggtctgattttaattatatagtattaacatgtgttgttaagtaaagtagtatttggtatacatttttttaaagaagattatattttgatttcaaatatatatatatatttatattgtgattttacttttattatcctcaaactcttttcttttgtttctttattattttaaaaaatatgttgttttttctactcatgaaatatatgagtattttttttttatcttttgcttaactatgaagagtattagacttacttctcaatttttgaaatctctattattattattattgtttatcattcataaatatataatattaagcttaaatatttttaggctttgctaagcaactacatcttcttttatgggctagtttggcacagctgtattataggggaaaaaacaagttgtagttgtgctgtgagaaaaaaataattgcagcagaactgtaaaaaaaaactaagctaaaagtttggtaaattataaattttaaagaactgtgagttattaagaactattataatgatgatgataatgttagaatctaatttattataatcacgaatatgtaaaaatttattttatataatattttattttctatatattttttatttttttaaattataaatttatatgcatt

SEQ ID NO: 381820 - DNA, 1072 bp, Cannabis indica
gggagcaacttgtaagttatttttcttttgttttaattatataaggtattaaacaaatgttataattatccaataaacgctttatatatataatataaataaagcttgtggaatgagtggagctctgtacacgttgataatgtgcgtaagtggttgggcgtgcttgtactcttgcttctatcgctccaaattaagaggacagtatttcttagaggagagcccttgcactgactgctgtgtccattgttgctgcgaacaatgctctttgtgccaagagtatcgacaactcaaaagtcatggccttgacatgtctattggtatattatttatttattattatcatttattcatttttggttaattaaccaatttacatattggatcgaacagaacatacacactactgtttataattaattgtaggttggcatgggaacgtagcaaggcagaaacggctagcagcattgcccccacaaattcagaaaaacatgaagcggtaaatactatagtaaatatatagctcgactacactgcaccttatatatgtataaaaatattattaagagggaatagtatgaacttcaaaagctcttcctgtatttaatattacaataaagacctatatacgtatgtgtattagacatcagatagcattaataattgacattattaagacctataaagatatatagtttggctttatttactttttattctcaaattgttttatttattgatggagtatactagatgagctagtcgtaaaacatatgtatatatcaattaattttaaagaaaaaggttgagtaagaacaaatcgtacttcaaaaattactacttcggcccattgatcaaccctcaaaactgatcacgctattaagtggtgtagaatttttgcgtcaaattatgacattcgcttcatttgcattggtttgtttgcgttggttttgaaaagatgcaaatgacttgtttatttattttatttattaaaaaaaaagggcattttacaaaaatactgcatttggggtaattgttttcaattttactgccacacggcagaattaacatttat

SEQ ID NO: 381821 - DNA, 1283 bp, Cannabis indica
aattaaataataattatgttataaggacacaaaaaaaaaaagacttttatatcattgcattgggggattttggaagccatgcatgatgcatattaacatttctccatgaaaatacataaaagaaaaatgttatatatataagaggagagaatcgatctaataaatatgaattaggccacctaccaactaccaccctctgtcccaacctattaagtactatatatatgtatgttgtaatcggattcggtaggtggtgatatcatattgctgtgatatgattaatataacaattcctatatatatgtaaatgtagaaatttagaggaaaaagtaatagtcagatagtgttttcatagacgttattggataataatgcatatattttgcttttattttagttttgatatgaaccaaaagggggttagtgaaaaagaaaatagctaggtacgattatttatgtttgcacattattattacagtagttcagacaaatagagaatactgaatacctgtccagtgtactaaattttgttaagaaatagttatgagatgatgttttcacaatatacagaaagcaacaatacattatatgacttaataattatccttggaaacaatagtcatagttaaattcttaaatgttatttcacgtggcctcaaacgctactgatcagtacaaataataataataataataataataataataataataataataataataataataataataataataataataaaagattaggaattagtaggaaaaactttattctttctagattaccatagtagtttttcttttcaattatttgtaaaaaactaaattaatagaatattagtgcttcaaaaacgaaataaaacatagacctagtatataatagtgccatttattatatatgcatttcacaataggattataggtacgtaaccaatgggatttatttatcagtcaagcaccttttcctgtttataaaaatgtaaactatatatatctaagtgaaagatataaaaagattataaataggttgtattatttagaaagaaaaggagagacaatagaaaatttatttcatttaaattagaagtactcactatatgtaacatattaaatactaaaacaaatatcaaactttaaattactatgactattaaacctaaaaataataaacaacattacacaataggaagcaatgggtctgtagagtttactactttgagttttgatcaatagcgccttaaagttcaaggacgtgagtgttagactttttattt

SEQ ID NO: 381822 - DNA, 2527 bp, Cannabis indica
atcaagcagactacacaactttgtcgaatcaaagagacgcaggaacgtaaaaaatgggaaatctgatcagctcctccagtagtgatcatgactggtaaaagggtatatataccatatccatctcccttcattaattaagctgtgaaaatgagaatgttaatcaatatatatgattaaattgtgctaatttcacaaattattaattattgggtttttgttagatatcgcaatgaaagatggagaacgtggaagaaaaactcaaaggtactttcgaacaaggacaagcctaataacaaaagtagtagtagtagtagactacaaagccatggtggaattaagaccataaagcccagaaacttttgcaatgatgatgagttacgtaccactactgatgactcatcatcatccgatgatatatgcatttgcgtagtcacttggaacatgaatggcaaggtgagttaattacacacatattaatataattattatgttatggacaaaattttgttgtgttgttgttatatatataaaataatattaattatatatataggtatgtgaagaagatttggtagagatagtggggaacaggaacaggaggcaatttgatcttctagtcgtaggtctgcaagaagtgcctcgcctaaacgtttcccaacttttacaggcaactctacttcaatcttacatgtacgtacctcaaccacacaccacctactttttaaatattaattcttattattaactctcttaaatataataaactaattctatggattaaattaatgaaggttattaggagaagccatcatgcagtctttgcagttatacgtttttgggccaaagggatcagattcgttcaccaaaggtatagtgcagtactattgattatgatctatatagttttgatttttaattattaatattggataaataatatctatatgcatatacatatatatgtgtttcagaattgaaggtagataagtatgctgttaggggctgcggaggagtaattgggaggaagaaaggtgcagtggccatacgcctcaactacaaatctacacaaatgatgttcgtttcttgtcatctctccggtaattaatatatatatatatataacacaaaaatatatattacttttaatttttcataattattttaagtaaattaatttgattattaattcagctcatactaagaaagtggaagaaagaaactgggaatgcaggcacatatcacactcgctcttctcaaaaatatggaacccttatgagagacccacccagattactgtttggttgggagatctcaattacagacttcaaggcattcattcacattccgccaggaatctcattcatagagatctccacaaagtaataaataattaatactccttatatatataaaaagtattgctaataggtaccatcccacatcataagtttcttatattatttattatagattatatagaaaattcgatattaatttatataccaataacgacatgtcattttttatagtgtttgacaccattaaaatactcttaccatttctcatatagtcatatatattctagcctatatagagaaatgttaatatgtgcaccataaaaagttatcaaatgctaaacaacaacacccataatgcctaatatttttatgaagtgtagtattgtattattatatgtagtcccaattagtttactttaataataagagaaatggtaaggagcacggtgccaagcaccacataaattgagttaagtgatgtgatgcaatttaatgttgagttatacacattttgctttaataaattatataagaaattgctaactatttacaacacgtatatcgcgatatgatattgagcaccataaaatacctaataacaatattctaataataattataaaaaattgataagcatttatatagggcgtgactctaaaaacactacaaaaaattttatttttagtcataataaaatttgtaactaaaaataaaaaaaattgtgaccaaaagattcgtgactaaaagtattagtgacagaaattacaatttgttgtgactaaatgtatttttagtcataatacttgttgtgactaaagttaaattagtgacaatttatatttaaatactatgttttaattacaaataatttttttaatgtgactaaaaattacatttaattataaaaaatttacgtaattattttttataatacagtgctaagcgcatagtgcctaatatcattggaaaatattgttattacagtagaacctctatccaagaatacacttgggaccaaataaattatattctaattgagaggttataactcaatagagttacactagaaaaagaaaattaaaaaactaaaaaatatcaatataataacaataacaataaataatcattagtactatattatattaaaattgttttaaagtaaatataatgttcatacatgtattataatttgaaataaaattattaattttacataaataaatttacaa

SEQ ID NO: 381823 - DNA, 5373 bp, Cannabis indica
ttctattcttaacactacattattaggttattacttattactatgagacaactatatatatagacacacacactagtaaactagtcttaagatacctttagtttttctgtaataattaatgataatgtttttttaaaaatgataaactttcaggtgggtcgcataccctttaatcaacagataaggaatttcgagattacattagatcaaataacaaataatctaggggctgttgacgtggcacagtcccttgccagctgtatcttctttgttggaatgggcagcaacgactatcttaataattatctcatgcccaattacccgacccgaaatcagtacaacgcccaacaatttgctgatctcttagttcaacaatattctcaacaactcacagtaagtaacttctcttctctactaccctcttttatttttcatttaaattttgtagctacccactgaccagtcacagtaaaattaattaatgtaataatttttacaacagagactatataaccttggagctcgaaaagtagttatcgttgggctagggctaatgggctgcataccaagtatcttggcccaaagcccaagtggaagttgctcaactgaagtgaatcaacttgtgatgccttttaatgcaaatgtgaagattatgattaataatcttaataccaatttaccaggatctaaattcatatatgttgacactgcacatatgttccaagatctcctcgctaattccacatcttatggtaatatattaattaatttaataacatattttattatatagtactattaattaattaaactcttttgacttatataggttttagtgttataaatcgtggttgctgtgggattggaaggaacagaggccaaattacatgtctgccattacaaacaccatgtccaaacagacaagaatatattttctgggatgcatttcacccaacttcagcagtaaacatcatcatgggaaaaaaagctttcaatggagataaccgtaatatttatcctatcaacattcaacaacttgctaatcttaaaattccaactactactaattaattaaataattatgtattggaaaatttatctgttatgatgtatttcatttcaataatatataattgtatttgtactatatatgtacgtagaaacatttgcttgatcaatctcgatcaaagacaattaatattgttctgagattattattattattaatttatatcaatgtgcttttattacattaagaagaagaataaagagcttcttattcttatctctggaacattaggaaaagtaaaatgaaaattaattaattatattgtatgaatattaattatatattaatcaaagtgaaaccaactgttggatatttatgggatatgtatacgactgcgttttggaaccataagcagctttgcctaatataatgttgacagcttcagttggatgaaaagcatcccaaaacaaatacttgctacgatcttcacatggctgttgaagtggcaaacaagtaatttgcccattgtttcttccaactccacaacaacccttgtctaactcctcaaaacctgtgtataattatgtatattaattaaccagaatgaatgtgatttttttgtcttttcaattctcatgtatagagacagtgacacgatttagtagttagtgacaatataatatataccgtaggatcttgctttccggtatagatcaacggtgctctgataaaaatccatgtacacaaatttggctcctgggaattgactgttgaaacggttgaccagtcttataatctgtgtgttgaaaatttgtatagccttattgatatcttcattacatcggctgttgttaccatcgaatctagctaactcatatggtatgcaaccaatctggcccactgatgtaacaatcatctttcgagcccccaatcgatacaattgctatacataatcatataatgaaaagaaaatatggtgagttattaattaattaaaattaaaattaaaattaaaattaatactagtacttacagtgagttgacgtgtgtagtcttgaataagtgctgaagcataagctcttggtgtgtattgtgagctagttgagtagtaatcagtcatgaaataattgttaagataatcgttacttcccaacccagaataaaatatacatttgctgagataagtgtttagtgcattggtatctcctctgaaaaaccttctcatttgttctactgtttcaccaaaattggatacttggtcgttcatagacgagtgacctccctgtatatatacatacaataaatttttattaaattcataaataaataacatacacatttataattactatataatatatatgtgtgtaccagattatttccggtctcatctcgaattccagatgcaccagatgcataattcgctcctctaagtagtgcacggcctctggttctagcataaggtggtatataagttcgaaacccgaatagttgagctgaaaatttatcataaattaaaattattaatgtcacaatccaacttcaacaatatataatagatatttaacatccaataatattaagtagtgccctttaatcaataggctaattagagttgtttctcaaaattttgatatgtacaaaatattgactttgaactttttattctattaaaaattttctcttgagattgtttgatttttgtttaattctaattaattttaccaacacgcttcacttgatataaacggaagttcgtagaacacaatttagtccatatcaaagttcaggcagaaccaactttagattaagatgggctagacaaatcaagagcccaaataaagaaacagttcttctaaaaatacacatattttttttttagtaatttttaaaaatgccatttattttaataatttaatacaactcaggatcgaccctgagttcaggtgacacgatttagtacttatatcaaagtttagaaagcacgatttggtacatagacaatcactacattagatgtttggtctaattaaatatcgaattttatataatttaacataattttagagaatatcgttaaccaattgcaagaaaacatggctagagctactagacaacattgtgtccaataacaattaacaatgctatatatataaatagattaggattaatttattataggtacgtacctagaacatcgacaaatgtacggccgttggtgaaacgaccagttgagccttgtgggaagtcaataccatagggttggtaattggctctggcaagagaaataataccattgttatttccattgtctaccaaagagtcaccaaaaatgaaaaaacagggcacttgactctgctgttgctgtggctgtgaacaacccaaaccactgagccaaaaccaaatcatcaatactacaactgatgatgatggttttattattatagtttctttagtgaacctcatcttcatcatcctcatacctatagcttaattgtggtgattttgaaaaactatatcttaaggccaacatattttatagtcattttttgggaggctagttaatttaatgcattaggtggattcatgtgtgcatggtatggatatggaacttagtgagttgggaagcttttttacttttagttgtcttgcccttctcaccaagttagctttttaatcaccaccactagctagctttagtaatatctcgtgatgatcacctatatctatataaatatatgctacatgatattctagattaaagtgtcttttaatataataataggtgataatattttagtatagttgaagttgatgaggaagaaagttataaaattaagaacattgtcccacatcaattataaattgtcttttcaaacttcaattttctttaaaatgcatgtttaaaattagattggtaagattataaaatatgaagtaactaccttaatgagaattagattggtaacattataaaatatggagtaactatattaatagaaggcacaatataacagcaatatagtcttgttttgttcgtggattaggatgtacatcatgttaattggtaacggtactcaaaagatagattttgatgaatttttatcttaatttatctcatcaaccattgaataattagtaatacatccccaaactataaatgtaaacacttttgtagagcttatagtaatcattttaagtgaatgcaaagtagaccttttattgttgttgttggtcaacttttgaatagtatttctctaaacatagaccttagtggcattttttttatctttcttaaattgttctcaacagaatttatcttaatttgctcactttataattatgttatttccttaattttcttgagtgctatggttggactgtttttccttttccttttgaagatctattttcatctaatagatctgactaattcagatggatcttatagaagttcccaaaaagaatcagaatacgtacctatattccatttcatggttcattatatctagttagaatcattcatttgccttccgaaaagagtaaatgaattatcctcatttgtatctaacactaaaacttgtggctcatgtttatagtaatcaggttgtttaacatttttaaattgttttagaatataaaaaaaatgtgataatttgagagtagtcacaatagcttaacttatatataacatatatccacgtcttttatttttcttgagtccgataatttttacgtataattagagtatacaaatagcttaaaccctcataactaattccaaaagtattaatctagtaattacacttagcatgacttaatcaccctaagattttaacatgtaatgtatatagatacttgcatatgcatgtgtatgtggtggcgatttctattgaaattatagctgcgggaggcattgaaattttttcatgttattattatgttgtatgaatacgacaatgactataacattttacgttggaaaacattatagacatgtcatgtcgtcgtcgtaaaaacattgtatatatcgttctacgggacatatcatgaaagagtattgtcatcttctctatattttattgtaattcgactagttttttcttttcatttcattattattattattaggttaattaaaatttttgctctttaaattttgacatgtactaggggtgaaaatcgatcgattatggtcggtttttacaattttataaccgaccggtcggttatgatttttattttacgaaaaccgtaaccgaccgttaaagtaacttttaccactacaagaatgtcacttttaccagcacggttcgctactgttatggtaaaagtaacttttaccagcacatttcgcaaactgc

SEQ ID NO: 381824 - DNA, 7157 bp, Cannabis indica
tttatttcccatctgtcaacaaacgacaacatcagcactatggtggagaaccagaatcagtgctctaataccttttaataagtaccgaatctccaaactcaataaaaccaataaaacaatagagaattatagaatattgatattgaatgtataaaaaaatccaattaaaaactataggattccttaggcccctttgatgcaaatagagttttacttaatacactacatatccactaactccttactcacccctatatatactttcccaaatctcactcatgactactctcaatacaatgagtcatacccctttatttcttaagctctagcacgtcctgctaatatggggtctaacaggttgaaataataagcaacatcagataaataaataaaacaaaaaatagaaaagaagcaataaagtgattttatgttaccttcaattatccaaaaaaagaaagagaacctaatgcgcttttccaagtgttaagcaaaaggagaaatgggctagatctaaagataaaagaactctttgaaaacatggcagccaagcagaaaaataagagacaatctctactatttaatatagcttcattgagagatagcgagagggtaaaaacaaccaatgtttaaattgcgtttctattgcacgcctcaaggagcacctcattttgaggcgggaaaaaaatgcactattgcgtgcacctcaatatttggaagagaggcgtacgcctcaaaagtctgaggcggtggaaaatggtctaaggcgttaatatgagtgaggcgcacgcctaaaaaaataagattttagggttttttcagcccattttcattcaacaacttgaaagaaagcctaataacatttaacttaagaaaagggcccaataaaacaataaaaactcaataaaactcaaacaaataactaaaaaaaaaagcccaactaaaaactaagcctacacaatttatattaacggaacaaaactatatttcttaggattagtagccatgagacaccccctacttcatcttctcaattgcacaatcaaagaagaaaagaaaaagaaaaaaagagaaaatgctgctcctgctttcctccttatttttagttactctaaaaacatatttttaattcaataattgagacttacgcctcaattaacacctcaatgtgccttgaggcttacgcctcgcctcagaaaaaaaaaaacgccatgaggcttaaattcgcaattttaaacattgaaaactacttcgtgggtgagtatatgtgagtggtctatgtttaagtacacatttaatgcaaatagaaataaagatatagaaatggacacagacctaaagttgcatccaaaacaagatggggactcgttgcttgggcagcttttgcagtgtaggccttgagagcatcctcccatcgctgcagcttctcatacctaaacaagtgcacctcattaagatttttatgttcttataaacattccaaaaatcactatttttggcatgcactccaatcaaagcaaaggaattatactcgagattaccatgattctttcagttgcacatccagctcttgctgtgcataggtcaatataccaacagcagcctgataaaagagactgtcatcaatacagttcaaccaggagaattcaagaaacatggatcccaacatgaaattgaaaataagtcatcaaagaaaaacaggcatatttcttcttgaaaaagacctcatgctggtgtaactgattgtttatatgaataagtgcttcaactacagccacagggtttgcatccatcttcttggagcgagctccttcaaattccatttctttgtaatgcagggcttttgcaaaagcacggcactgaaatacacaatcaataaccaatggcacataaacttagtaatgcccattttcttttttataagaaacgattactatttcaataataatatatcttacaatttaagacaaacacatcttacaaactgagtcattatcagaaacagaagcacattaaaccaaaattacaaaacaaaaacaaacttaaactacataaaacattcgttattaaaaaaaaaaatcataaaacattcttattccctgaacaactctgggaaagagaaaaaaaaaaacagtaaagaacacgtgaattttgtaaaacattccaactccattaacaaactgaatcactaaccaatacaaaattattaatttgttttttcattattcgaaacaaactttctaatgtttaccaaaaataaaaggaaaacattgtttaattacaatttcaaagaaaaatgaaaaagaaacataccttttatgcaagaacaccgaaaataaaaggaaaacatagtttaattaaaatttcaaagaaaagggaaaaagaaacatacctgcaagagcactgaaaataaaaggaaaacatagtttaattacaatttcaaagaaaaaagaaaaagaaacataccttttctgcaagagcaccaaggagtcggatatctatagggagcgctttctcatcatgttccataaattctgcctgaaaagtcagcttgctaaattaagaaataatgataacaacaacaataacactattattcttatgactggaaaaaaatccaggaaaaataaaaagaaccagaaaacaacctcctggacgagtacaataaaaggttgaacctaatcgctacaaaatttcatttaaaattcctacatatcatagtaccactacataacacatatccaaattggtatcacataggaagtatatctgccatgtgaccatgtgccaagtaacactgagaagaagtaaaaggtttatacaatacaagatacaatttcctccaccttccttggctttaacaacactgtgaattccgcaatcacactatcttattgatactatgatttatggaaatcaaaaaaagaaaaagaaaaatcatggatatcaaatttattagtccaaaagtataaattatccaataatcacatgaatatatacagctttagagcattgctgtagggcacccttggtgccaaactaccgaaatgtcatactaaattgcaccaatgacagcatgccacgtaagatgatggtggtccccttagcaatattcataactttataataatcaaacgtagagagcaatgtaaatcacatagaacttttttttttttgattaaaatcacatagaacttgaaactctgaagttccatatagatacacaaagttttaaatttcacacacagacaaaggacaagagatatgatatgatttaatttttttttttgtaaaaagagaaagaggcccttgtctaagactctagcgttctctgcttcaacatctctaccttcttgacattactaccaatggtgaacaaaacacttcatcttttttataaactaaagtgttaattggttgggattaatgaaaaaatgaatgcaaatggaatgagaataggaataatatatatatatatatatattgacaaaaaaagaaggtattgtgcattaaaaagtcttttattccatttctcctggaataataaaagccaatcttaaaatgtcattcaaatatcttaaattgtaatcaatcaatataaaggaatgaaaataaattcctttccctcagccaaacatagcctaaattctctactaaagtgtcaagttttactactatccctcatctaaaaactaatctcatagtaaaattctagagagaaaacaatcagtatctaactatagcttgataatcatcttatattttttatactttgcatatatagaaacaataatatacatcctaaaacagcataccaggttaagaagggtagccaaaatctctggaggaatattaggagatgaaaatgccatctccatgctccgaattaactgtttctgactatgctcctgtagttgtgcccaacaactgacaaaaccagctgcaaacaactcccgcccaacaaatggctgcaaaactgaaaaattaaggtctacactttaaattaataaaggtacgaaaggatattagagaaatacctgcaattgtgcaagccttgcacaggttcgcaaggcaggagaaggggattccttgagaagttgaatactaaagtgtctcatccattctgcccaatcttctttagtactgcgttgagaagcctccccagcagagcgtaatcggccatcattaacctgtaaagtttaaagtcactaagataaaaatgcagatcgtgaaatagtaaaacattcaaatacctatcaggaggaaagaagatccaataacaaaaaaggaaatgacattttatactatgaatgtgggaagaaaaaaaaagttttcttacacctaaaggagacatctcaacctttaataggtacctctgtcttccaacagaatatttgattatataaaaaacaaaaagttgtagaaagcaaaactagaatatcaaagtgggtcaaagatgatagaagagtttaaggtttcttgggttggaagttgcatgaattcataaaatgtgtagatataagttaaacataataagatgaagttactcttgtagaaattatgatatacataaaagaagttctgcacgaaaaaaaaaatagaaagaaactacgtataagaaatacagtctaacaagatcagcaaataaaaacaataggccttcgtatatgaggtatggataaatgaaaagggatgatagaaaggatgcctacttaaaagttgtttggtaaattgaaaggaaggacaagaggaatccttattaaaaaaatgtattaaaagtagaaagggaaaatcttacaaagaaaaaaaaagtagaaagggaaaaatgaatattcgttagcatatttaccacactatcaatatttacaatacttctcatgctattctcattttgacttataaactgcactctccaattagtgactaggcttggctattcgctatgcatttcacaaaatcctttggaaaatgaaatgaattactagcccttcatcccatggaaacacaccgcacaactgaacagcataataataattttttttaagaaaaaaaagaaaagtacctgatgtgctcgaagttgtctctgcaaatcagacccatcatcatggggatcattctccacatcatgcaaagggtcactaataacctcaactggaagcttgcgacttaatctttgggcagctgtgcttcccaagatcaacggttcgcgtcttttcagccgtccttcaatttcttcgaaatccttatgctgcaataaggccaacgcttacacttaataaaataatccaaatctatcaaacatatttgagaaccagaaaaatgtcaactgaagtatcaaaatgggcaggagtaagaataatacctgcaatcgatgcttcaacataagcttgtgtattgatgggataaaaatggtgaagtcctcgccaagagattgagctagacaacaaagtgcatcaacggcatctttccgaagctcatcattcttcctgttgataaaaaattgtcacagtgaaccagttcaagcaaaatgaaaagatagagatactgaaagaaccagtactgatagagtccaaatacaaaaagtcagacttcaacccactagcccttcagcctttttatttctatcaaagggatgaggagctaacgaaaccttaatttcagcccaataacaacacaaaattttccaaccaaaccacatagaatgaagcataagtaagagctaatgacacataatattgacccaatagcaaaactattcattttcataagaaaccgcatgtaacaagaagtaaaacagaagtaaagttcaaattaaagtaaggagagacatacccatccaagactagcttcagatgatgcacaagtgaagatatatgaccagtaacctagtgaaagggggagagaaataacaaacaaacattaccactgacacatccaaaggacaggaattcaaagtaataaagctataaagctattcaactcatcaaactatcaaatagtaattaattagctgctagcctgctgacctgcacgcggggaatcaatcttgtcaaagtgtttatagcagctcgtcttatttttactgaagcctccattttaaataatcgaataagtgcagggagaagtaaatgcatatgttcatccagtgttcctgcacaattaagaggttttttcagtaactaacaaagaaaacttccagaaaatattgtatatactaccagaaaaaaggcaccctttgtttggtaggaaatcctcaaactcatcctaccaaacaaatggtcagttttcataagagatgcccattgccaattttcttcaaatcaaattgcagatttcaaacaaataaacatattacgtagtcatgaccaaggaaaaaaatattatgtgcactgacactgtaattttatggaaatattggagatattttcgatatcgatggaaattcaaaaacatttatggatgttacatatatttgtctagaaatatgaaaatgaattataaaactattagaaaaccaatgaatttgaatgattacaatgatacatacaatgtaaaaacaaataaaactcttatttatacattataatatcattttgattacattatcatataaatatttattctctttcttttagagaaaataataagtgaattcttagccatcattacttttataatttataatactttaatataattaattcaataaagttaagttttattaattactcataacaaataaaaattaaatacattaatattctagatgtgatgagggatcaagcaaatgtgtgaaatattttgctgttagaaaatatttctatatgaagaaatatgtgaagagagactgaaacagaatagaagaagaaaaggatgttacatatttcacacatttgtttgattcctcatcaaacatcaagaatattaagatatttatttaatttttatttgttatgaacaaattactaacacttgaaactttattgaaataattatattaaagagtaattattataaaagtaataatgactaaaaattcattttttatttcctttcgaagaaattgaataaatatttaaattataatgtaatcaagaatatattataataaacaactaagattattacttattattatattgggtgactactcaatgatt

SEQ ID NO: 381825 - DNA, 2096 bp, Cannabis indica
gtggtggtggatgccattaaccaaggtaaagacctgttgggtccgatgggggttttgcttcatcaaattcgaactcactgttgagtctaatttttgtacaaaattcttacatgtaaataaagcctctaatgaggttgctcatgctttggctagaaagtgtctagctcacaaagcttccagtcatttttttgattctttcccttgctggttggctgatgtttgtaaggttgatctgcttcattctttgtagttgggttttgtgttaataaaactcttctctttaaaaaaatagtatttttaaaattaaatagaatagaaacatattaaagtgttcataaatgtatcatatagatcatgtcaagtcaatttacttataaacgagtcgagtttcagttttaagtttcgatacaattaataaataagtcatatttagatttaacatttgattataatacctaaatcttaaaataatatgaacaaggccacaaagaaaaattggtgatgcctagataatatgatgtagtagtattaaacacgcccataacaaatacattaataataatggaagtggtgtttggtcaaatagattgggcacatgggaagaaataacggtatatatatgtaaatatagctagacataacattaacatgatgatatgattgggcacaagtaatggtagcacctagatgtattgccttatgatttgttagcgatactctataaaaattattatattaaattatatggaacccgatatttaattgcacaaataacgatattaaaacgtaagaggatgctaggcactaatagtgccctttagcatttctcattatcttcctatattaatattattattgaaaataagctaattaagatttttacctccaaactttaacatgtactaaattatgctccttaaacttttatggctattaaaaatttcccctgagttattgagattgttaaatttaatgacttttgtttaattttattcaattttactatttcaatgattctttatgtactaaatcatgctccccagccagactttgatacctaccaaatcatgctcctcgaactttgacatatactaaatcatgcctcctgaacttttatttgtgttagactttttttttattaaaattagataaaagtccttaaattcaaccatctcaatagttcaaggggtatttttaacgatcttgggcataatttagtacatgtcaaagtttaacggataaaaatcctaattaaccttgaaaataaattaaaagagtttgttttcttagttctgacgtagaagtggtacaaccacttgaggctagctcaagtggccataagagggtgcgtgtgtgttgaaggtcatggattcgagtccaagttatgcatgtttgtaatatataaacgcttaaaaaaaaaaaaaataaaaaaaaagaggtagaagtggtacgtagtagtagtacaacgtaaacaaaacgaaagagtgacatcaaatcaataataaaatgaatttgaatatttgaagttatagaaagaagatatcaatgccagctcctttccttatggacaaaggtaaagtgatcacttcagtcagtacttgagacccttttcctcaaatgttttttcttcttttcttttcacaccacccaacaacctaaccccaaaaacacgtattaattaattagtaggaagtatgttatgaatgatcttaaattgacaccgtcattaaaaaaaaagtactgatttgagattataattaagttacgtaccaagactaaaatcatatacacataaaaatatagctacttattaatgattagttacatacccttttattttttgtttgggtaatttatttgtgcatgtaattaaaattattagcacattttgatcatgcatgataaattaagaatttgacacaaatatatatatatatatggaagaggtttcaatggttacatttttattgtaaccatcatggttacatttttttaagtcattggattactattaaatggttgtgattaatttgaaaattaaataaaaataaataataaataacttgtaacctaaaagtgacctaattatttatttc

SEQ ID NO: 381826 - DNA, 3710 bp, Cannabis indica
tttttttttttttggtaagtaaagggatgaagcagtgtgtgattcaacaaaaggggttttcaatttgtgaagagatgagaggctcttctatggattctgttgtttgccctaaacctcgtcgtcctaccctcctaaactcaccgacgccggtcagatctttccgatggcatctcaagtaagttgatttttagcagaatttaattttttgttggagaaaaaaaatggaataatattaatgatttgaattaatttttaatttcagttaccaatcagagctttgtgattctaaagctgggactgatctctttgatgccatcctcacaaaggttagttctttgatctgcctgaatttttttaagaattattatagctaaaaatcttgtttttagggttagggttagggtttggttgttgattgtttgtgtttgtttatttgcagggtggttatggtgttgaaccatctagttatacggcccaagtagcctcgtcgcccccatttttcagcgggtcgccgccgagcagagtagctaacccattaattcaggatgctcgattcggagatgagaagttatccccattggctgcgtcgcagccaattcagccaccgtctggcctttcttccccgaggaaaggaggctgcgttcggggcaattttgggaacaaaccaactgtgagaattgagggtttcgattgtttggatagggatagacgcaattgcagcatccctgcccttgcatagagcttgatccatctccaaatcgagtaccaaaaggtgtataggaaacaaaactaaacaaaacaaaacaaaaaacgatttaaagttcggttatagaaaagcgagagagggaggaattttgaaactaccacgcggagggaagaagaagaagaagaaggaaaacagaagagtttgggagatccttttgccttgtgtaaatatgttttaaagggttctctttagagaggtaaaatttgtgtcaagaaaaattgtctttgtatgtaagtaaatgagtttcttcttttattaactaaataatgagagaaaaaagaaagagtctttttagggtttgtaaggtgtgggtttgggattgaaagagaaaaaaaaaggggtcttgtattgaccacacccatctctatatattgtaaagtatttagtagtctttgatgggaatttttcattgtatctctttgtttttgtttacatggggtgctttaaaagtgttccaatgagcaacttgtgaaaggaatctgtataaattaaagttgctattgagtcaaatttaagcagtcatttatgaaaacttttgtatatattacatttctatttctcatcttcatcatcatcatctcctttactttagtttaaatctcctgaatctgaattattataacaactacaagcaagtttgtttactttgtcatcaagtaaaaattgccatctttcatctttttttgccttttactttgaatttgatcttgtgggaatcttaagttatgatcttattgtgttttccacaagctttttttttaaagcaatgacaccaaaagtttcatttgatcagcttttttaaaatttgcacctttattcgtttaggtgggtaagagcatctatagctctttgtccagttgattgtgcatatctcattttgctcatctaagcctgcaaatttttatggccttggtttttcaggatgtccaatcagaatggaatataatatatttttttcctcctttgtgggaatggtaccattcttctttggttttgttttatttgtagtaagttaataataatttcccattattaatttgtcattagctcacaaaattcttgttgtataaaattagggaaatttatctagtattcttaaaaagatattttggtagtttgtttatctgtttcgatattcagacaagttttttaatttttttatataatcgtgtattttgtagctatttagaattattgtaaatttttaaaaaaatttgaatagtttacaaagataaaaataaagttcaaacagttacttactatgcgtataaaaagaactgtcgcgcgtacaataaaatttaagtcttatttttggcattgtaaactacttaaaattttctgaaaatttacaggtgatcctaaataattataacgtgcacgattataaaaagaatttgactaaactcttttttaaatgccgaaacagataaaaagaattgtttaggaggtgtagtatagacaaaccctaaaattagtatgaatcaattaaaaaggtaattttaatacaaattttgttttgtttaaaggaactggctttggaaacaagaagaaaataaattgtgaagactggttaccaatttcagtttgattatatatacttttactaatagttgtcaacattggaaagcaaggaacatttttctcttatagatcgattacaactatttttcttgagatgaaagcatatttgtcatgttcttggaacaagttctacactttcttaccaattccttttctactctaaagtctaaaattagcttggcaagaaagtaaatttgactctttggtactgttttttctattaaggtcttattagtttatagatccataaatcttgcattttaaagaaacttcttgtaattttgtcttgttaaatgaaaattgtttactttaaaaaaagggattagtttttaagaaattacaatattaatcattctcaatctctaaactatttcaagccacgtgacatatttaaaattttgaatgaatttgtaaaatctatatggttaccaagtagcaatctttgcaaatatattgattaatcctaatatgtcatgtacttaacttgaaatagctagatttaggttctcaatcccccaaatagagtcatccccttttaggttcttgataacagtctctgaatcactctccaccaaaataaaaggatgaacaatgagaccgccgtctccatggctaaaagacatgtcgcagtttctccaatgagtgggtcagagaagtgtagcctttttgtcgccacccacagaactgattcgttatggtctttcgcaatcgccacagcacacatagtttcacctccgactttgacatcgcagttgattttaactcaatcttccggcggcggagaccaaacctgagtcccaactgattgtggagaggaaagaaggcaggagccataatctctgtaacaagaagaaattgagtcaatatagtgtttaatgttacccattgatttattatgtaccttgttgttgcgggccctccaaattgtatctaccacaatcgaggcatagaggaacaactcatcagtatatatccttcctaatgtaattaaagcgtcttttcatttttacttttataattaacataaatttaaaatacaaacaacataacttcaaaatggaaacaatttttataaaatgaaaacatcataaactcataatagaaatgacttttataaaaataaaaaatctttaaaaaatgtaaaaataaaaaaaaatacaatatacatagcaattctccaataattatttctttaagaataaatataataaggtaaataccattttggaccctatgttttgctaaagttatcgattagactctctgttttgttaaatgagaaaatggaccttgtattttccaaaatagtaaaaataggaccctgaattgattttttgtgaaaaataatatttaataataatat

SEQ ID NO: 381827 - DNA, 3079 bp, Cannabis indica
tcttttgttataagtttataggagtaaccaaaaaataattaaaaatatcatcttctctgctttagatgtcttttgttcataaatgatattaatttgtacaattattttttgcctttaaagttaggttaatatattgtgcctctctcttttcaactaatcagtatattgaattgaatatataccaagaatgatcacattaaattcatttacgaatatgcagttaaaataagaggcgccgatggcaaagttaaattcaaccgaataatatatatggcaaccttttttcttcttcttctttttgtcatctaatacgtagcaatgactctctccaccggagatgccttgaattgtacgtaataacgacatttaccaatgccattaaaatcaaaacaagaactcatcataaatttactttactataaaaataataccaacaataatatatatatatatatcaatatattatttaccaaaatcaattgaaaactagcatatatataatttaatttgtatattattctagctaattaattaatatatcagcaattaatagctgtagcctgttttcagtttcattttaataaatcatgagaagtggaagaaaataaatgaagccatcaatgatggcgtggaatcataatcaagaccgttgaaaaagcatataaactcttatattcgtcgatatcatcaattcacctattcccagcaatttaatataaatcaatgtcattaattgttattccaaaaatttaagccaatattcaatgaaggaaagattagaccaagacaaataaaacggtgaccaaagaaattatattaaaatttaaaataataattcgtagtaggatttaataaacaaatatttccataatttcttgtacacaaaaacacgataaactagtcgcaccatggaatgacatatatatatatgggatatttagcataaatgcaccgtgaatttcatttcatttaataattcaagtcttaagatttttgttttgacattcaagcccttaagccgtacaaacaaaactcttaagttttgaaatagaataaaaaatataagaatatggtgatagattagatataatctaatggtttcacaattcttttcacaaaaagatgtccccagttcaaatctcctcctctaatgtcaaaaaagcaaaaacaaaatatacaagaatctaattataaaaaaaaaaaaaaaaaaagtagagatacaactgaaaaagaaaatgtatacttatttcaaaatctgaaaacttggttagcatattaatgaatatgaataaaaaaggttatattggaattgtacgtttaattttaaactcaggaacttaactttcttatccaagaaaaaaaaatagactctgtcttgtacttgattatagcaatataacacttatgttggacacaataacagagggagagattgtaaaatgaggaaatgaatttgaaaaaattaattttgagaacaaaatattaaaaactaaatgtaatttctttttagcatatataaagaccacaagttcaacccggccctatattatatcggtttctaaaactcatgatatatatagctaggaggatggtgactcgaagtattgaaagattggatttatattgtttcataaataaagctaaattttcttgagaaaacaccaaaaagtattattaatattaatatttataataacatataaaaataagatagaaaaaaagaaaaagtcattgtggtgagatgaagaggaagggcctaaaagtcattgactgttgtaggggaaaagaagacaaagagaacactcccaacgtgtgaaacataaagggtcttctatcttctttcttctatcttgttattattatcattattattttaattaattattattattattattattatatggacccacctttgagaaatttaaaccctctacctttgaaaacaacattaacgggaaacgctcgtcatcttcttgggaacaaccttttcattttatttctttcttcttcttattcttctttttctttcctttctatgaaacccagaaattttttctacttctagtactttctatctaatatttcctactatttataggtcgtattaattaaagcaaggaagaagatcatcagaagaagagttattatgaagaggaagaagaagaaacatgtattttcatggcaagtaattttgttctccaaaggctttacatagttttcctggcactcattttgggaggtactactcaagctgataaatatggtgatgaggaatattatatgttatatattactttgtcagatttcgtcgaccaagaatatatacatatataacagcggcgtacatgggaaagccaggcatttttcttctctcttaattattttttctttttttcctttttttttcttttcttttataatttgtatcttattaattataagtatttatgcattttcgttctgttttatatttatatatatatatatatatttatatatatgagcatgggaatagtgaggaaatagttacagaagaattatattatataaagatatgaaagttctactattcttgaatgttggaattatatatacaggtaatttattacttagttgaaatctatgcagtcattttttttctattggatggattctatatattttccccctaatttgtcagttgcacgcttcgcttcaaccctctgtgttttattattgttatttttttttttgtataaaaccagttttattattgtatgatatttgaacaacaatttttattttattttaaataatcagtttctaacacacatattattttattattttcataactggtttttttaagtaactagttttcataactggtttttttaattgttgttcataattaagttttaattttcaattttttatttgattatttcaagaaactggtttttattttagttgttttactaactagtttctcacattccactgttttttttgttaatcttttatggtttttattgcatttttgtctctttaattttctttgtttctttttttctctttaattttaatttctttttct

SEQ ID NO: 381828 - DNA, 985 bp, Cannabis indica
ttattattattgttattattagtgttcgtgcatgaggaatagtacatgtgggttaagtttgaagtttgatggtgtcttttgttgtagtattaagagtgagcaatatatggaataagttagagacttattcaaatagttagtttcatatgataagtacatttgaaattcaaattttaaaacatagtctggagagaatatttacatggaggccatggagagatcatctctttttttttttaaataactattgaagactagttcaaatggcaagttcgtcttttgtggggagttgttgaccaagtattcatataagatgattagactttaaatattttatttattatttaaaggtttgagacttataaataccactccacttcactcaaaaaggcttcactcaaataagctctctctctcatcatcacactcaatttacttgaaaccaaaattctcttgacactgttaccctctcttgctccttggcactccactacgaagccactaatccccttctcatgttctccttctagtctcttaaggccaaaactttagttatcctttccagctcagtatccccacatatcactacaccaacatatataccttctacaaattttataagttttgatatcatcacgattctattcacatcaccacaatccactcaaatatatacatgtcgtatatcatatcgatatcaccactgccaccaccatttacattcacattctagtactcaacaagatttcagttggaagctaaggtatatttttttgggtttctagattcaaagttaaggtttcatatatatatatatacatatatacccctataatgtgttctaattaataagtatgaaatttaggtttttcataaaacaattattggttctctgggatcactctcgcaatcaagctaggttctccacattcgaggtaaggaaattaagtagaaaaatataagttttctgtatgtaataacattc

SEQ ID NO: 381829 - DNA, 7781 bp, Cannabis indica
tcccaagtcaacaagcaaaacaatgctaaagactaatccaggattgaaagaacttcattcataccttctccaattcccttattccttctgcatgctctttcctctgcattaaagcaagtcccaacatataatgaccctgaacacaacaaatcaacattaataggaaaatgtataagtgtagtgaccgaaaaaagtaaagaaaaatggaatggcatacaaattagatgctacaaaggaaatgttgaaaaccagaagtagaaggaagtgaaataaacaaaagacatacatacaatatttactcccaaaaagtacatacatttcagttaacttatcccacacttatttccaaacatagtacgcagaacaacatgcatatgaaataaatataaatatataactcctagattgccttcttgcaaacttgcacaatcaaacttccaatcatcaacgagcaaatgaaaacttaaaacaccaaactttacaggtttcgtgatatgggaatttaagtaccaaaaaaaaaatgtatagaacaagtttaaaccagcttaattaagattctaaccttagctgaggttttgtcaagctgaatagcttttctacaatcatcttctactttagcccattcactgcataacaccataaccaattgaaaaacatatttacattagaagttgcaactatagataatcagttaaaaacaaaaactgatcaaattgaggaaatgtgtcatattataacgaacatacttcctcttgagatggcatagagcacgattcgtcaaatatacaggcacatttggacaaagggtaattgcctttaaagaagaagaacaaaaaaaaaaaaccattaatttgagtaaaacccagaaatcaacttaccccaaaattaagttctttactagaacaatcaccaaacccataaatgattcaaaaatcacagaaagaaaaaacaaagctcatgaatcaaaacaatctttttctttaatgaaaaagggaaagtaccgcagtataagcatctatggcggcaccaaatcgacctttcttgaagtaatgattcccatctttcctaagttgctccgcttgtttggccggcgacaagcccatacccggccccatttctttcggcaaaaatcccttgtttcgtcaaatgatcctctacgaaatcgaaaaggataatctttttcccaattgaaaaaaaaattagggcgataatctattgattcaagagattttttctagacgaaatgaaggagaaagaaactacccagacccagttgacgaattttgattttcatttgtttacgtttttatacaaaataaaaataaataaataaataataaataaatatttctttaattttcatttttcttttttcaaaattccaaacgaagcccaagcggcaaaccgatcacgtgccaatctatggtgaatgggatttaattggattgcttatggctcaaattgaaacctaattggtggtgagggtaagcgaggtcacgtgatcaattttaatttacagaaatgcccttgtttcattgcaatactaatatgtagattaaatcatttattccacctataataatggaaaattaagagaaagtgtagagttatccatttggaccaataacaatattcaatgtggttattgggtcaatcataaaatctttaaaatattattacaagtttggaaagactataaagggaacatcaagatcaatttcctaaaagattgtatttttggttctatcctttggatcattaaaataaggtttaaaaaagtaaagaggattatatatattggaaggagaaccattagcatatatggccaatctaaaaacagttttgttggcattagaattcaactcatcatatttaagtgcataattttctattactattgtgattaattaatgataataatatttgtttgagaaattaaaaatggaataattggagatgttctttaatttattttgagttgacctctacacttaaatcaggtatcaattcaaatcaacataccataaatcttctagggcttactttccaaggagtgttttggattctcaagtccaaactataagcaatggtcactgagaaattaattaggaacttgaaacacaagtattctgacaattgagtttcaactttttcatttttgaagggaagaaaatcaatcagtgtaaagatctagtcacctaataatatgaaaattataagattcgtctgtactttcagaaaagtaacttagtgcacaagtcacagtctcatagccaattagcaaagactacttctctcaaaagtttgactccttcccaaacaagtagttgacttgacattagaccccacaaacaaaaaaacagaaacagaaaagtaaataaactcataactcccaaagtatgtatataatacaaaacagtttttgtgcatgtgaaagaataagctaaatattgacatggtacaaaagttttacactaattaagattattgtaaattaaacattgggatgaaatacacactagcttctgctgagactagaaccttctccttcactaacttcagagttgccggacgatgacgacgatggtgacaccgatgagagttgttctcgaacaagatcagctagtctggaagcttcttggtctaatttcagggattgcctacgcaaactctgtacataaattgccacattagatatgtttctgtgaagattattgaagtttttaacaaaacaaagtagttcatacctctgaagcccataagcaatcctgctccttgcgaggaattatatgaatatgagtctgaaatttaagtgtaagaaaacaatattagctgaagaagctcactgattttcctcggtatatacagctaaaacactagacttgttttctaattcagagattataactgaataaaggaatgataaaaaaaatcattaacaataaaaactccttagctaattctaaatatatttataaaattgtttcagattgatttactttttaaaaaatttaaaactaattacaatttagacactattcttatttataacttaaattgggactaaaactttctatcattacaatagagattactcctataaagaggttttacgttcttgagataaacagattttgaaataataataataataaggagagcataaaattatcagtaactcacatgaaatataacttggcccgcagctgcaccgttattaactaacaagttgaatgaatctgcatgatttgtttcaaaaggcgaaagcatgatcaaaagagttgaattcaaatatgcaggatatatagcaatctacaaagctgtaaatattaaaggcaaactgaaatgctcaagtaaactatgttttaacaagtaaaaaatacccaagaatcctcagaagtcgcttagcaaggccaagttccgacattggctcctacaatatgtggggaccctcaaacctttggcatacccctcttcagtaaactaaaagtacttttatggctagtgtaattattcacaattgaaaacaaattacaacatgagctatagagatgcacatcaaaactaaaggtttttggctctatcgatagcgatctgtagtagagttcaaacgacggcatgccagctcttttcacactataaatcaaaccctacttaacccagttgtcagttgatagcctaaatttattaccataaaaggtctacagatgcaaaataactttaactagctaatgtagagtacttatgttcttaagctgcaaaacaaaccaaaaatagttacatggtaaaaggtctttcatgctctcactaaaatggtgtatatttcggaatgaatgaatagaacccagagcttggggaacaataccattttctattgattacctaagagtaatagatcatatactgaatcagaaaaatgaatgagaatggagtgttatgttatttccaacatttaccgcactgtctagatccataacctatgctttaacttattaaatacacgaattatggctataagtcaccagtcatctaagggtcgagtattactttccgtgaaataccatgtatttaattcttaatttttaaaccatgtgttgattcttggtacaatatagatagatttcctcaaacttacagtgcacgtaaatatgagaaaatattgagataataatttcattgagaagatccttgtacatttaattgagaatgtttattttcaatgaagtaagaatgaacaaaatggtgtttcattgctgcatacataaagtataaacttaacatttatatgcatagtaataaatgaaaggtaataatcgtctattagaggacttactactatttttttgatcactaacctcttgtgagtgatagaggacttactactatgatttatgtatttattacataatataaattttgatgagattaagttaagacataagttattcatacggaccaagttatctcgttcattatctattcattaggcatcatagccattatgaaagcttttcatataaattaaacataggcccaagctctaaactacctgaaaataaaccatctatttatgcagtaccaaattttgtgacaatgctatattttagcccctaaagcaatgctctttcttatattttcattataaatttatttaaaattaaattctaatcaaatttattgtgcatttattgaataatactgactactaaagagtttacttccaagtagcattcatgcattaaagcatctatatgcaataccaaattttttggcaaatgctatattttagccctatagcaatgctctttcttatatttgctttaggaatttatttaaaattcaataattatcaaatttactgtgcatttaatgaacactctgtcaaataaacatttagctttttcactcgcattgggatggtcttacaaaaaaagaaaacttgttaatgtaactaattataaagacataccagaaccagtagctttaactattgcagagcttattaaaggaactttggaacacattgcagcaatcacctgcaaaacaattttggtagtcacatgtaaatctcccccaatagagtggctatcagaagttcaaagcaacaaatgtaagtcacacgaaaacagctatagcattttttatagtaattagtatttacaatacagcacacacagactatgtttggagtataaaacctgcttgatctaaggaagaaaagagggagtctatgaacttgtggacagggatttaaaagtagctaaaactgatttgaaatctgtagttatcctttccccccaaaaaacttttacggctaaagaatctccaaacatactcttagtcattgtttgccactgttggtaggaaagtaaaaaattgtaaattacataggaaaagaagatagaaagtagcattcctcccttgtagtgttagatatgggagagtaaagggcaattcttctccccttgtttgatagcaaagcaaagtgaaagaagagtgttaataattaccaaatccactattgtttggacatgtctcctaaagtcaatctaatatatagagttaaaagattggataaacctaccatttctgcccatatcaaatacactcttaagaccctatttatggattcaaattgattgtgcacaaatttcagttacttactgatggaggagttgcatccaatgaagaaaaatgagactttgggatgataagagaatgcctgcaaagaccagaaacaacaacatagaaacttatatcagcaaactaaacaatcaaaaagacattatctacttttgacatgtatatgtatgctatgttagcatggaaaagtagcaaataaagaaaattgtaactgtcatgataccttacccacgactcagcggattcgaatccaatatacacaaacacgcatcatcttcataaagctgtaggtaccaaattcagcaaatataaaacattgaagatcaattacctaaaaagaaagattgttccatgtcatatcaattcaaaaaataaacacagcaaattctatataccaagtaccaaaattgaatctcagaacatttaatgttatactaaatatattaacagtaaccaaacaattatccaactttcaatttcaattaacgtaatcacaagtcttatttagatttcataaccccaaaaacaaaattaagcaaaatactttgcatttatatgaataagaaaaccttaaaagccggtgattcaccgcgtataatcctacaaaagacgcatgctccattgagagacttcccctgatcagcatcagaaccagaactggagcccgaaacagaaacgggttggagtcggggctgatgaaaacccgacccggttgaacaaatgtgcgctgagataacggcgagtctgcggcgtgcgtccatttttgtcaagacgaagctccggtgattggatcagtgggaggagaagaagccatgttgattggagttttgataactcaaactcagtggaatcgaagaagaaagccaatggaatggaacccaaactccaatggttctctgattttattttatttttatttatttttaaaaataataataataaaaataatgaaagtggggccaagtgaaatagagaagtgtgcggtggaggaaaatggttgccggtggttggctatgcttatccacatccacatagtaccggtgacacgtgtcaccctttcgtaaccattgcatgaaaagttttcattcacaaaatggacttcttcaaatattgataaatcataaaagacatcaatgctaagaaaattgctaaaaattattattggtgtttaagtattttttttttatcatactgttatttgtataattaagtataggatctcatataatttaaaaaaataattttttaaggaatatcgttaattaattatctggtatcacttatagaaagtgttagacattactgttacctaatatcaatagtctaatgctaactatcgctattagtatacttaaatatttgtctagtattttcttttgtgtcataatattatagggctacagctctcactaaataaaatattacacttaaaaaaaattacatatatataatttttttattttgataattataaactaaaatatagtaaatcgcctcacaaaataaaataagtaggagtgattataatataaaaaatggggttggtcattacttagttataaattcaataagttgatttctaattctttattatcaaacatcttcatagcacaattttttaaaagtagcttttaattttttcatatgagcatctggtatgtcaaaaaattatgtaaatttggcacatagtaaattttataaaatttagccaaaatttatatcacaataaattaataattttattatttattttatttatgtcacttttactattttattagtatatttagctataacattaattatgagctatttatatttatttattattattttacataataaaacaataataaaattattaatttttatactttgaataaaaatattaaattttgcactaagttttataattttgtattggaacacaattctaaagattgatgtaacaatatcacaaaattattgtttgtaacaaatataacacaatcttatgaactaggccaaatgggcctaaaatgtatagtggagatacataaattaaatgaaattttcatccacataaacaatcatgacttggtggatttagttatgggttaatttcacaaatgcacaaaaacaacaaaaatacggtttca

SEQ ID NO: 381830 - DNA, 4781 bp, Cannabis indica
ttttccattgcttctaaacgatgtcgtttttcaccggtttgatcattggcctagccatcggccttgtcttagtcatcgcctacgctcgagcccataatgctagatccatgcgtcgttctgatctggtactctaatttatttatatttttcctttgaatatttgaccaataaaaaaaaaaaaaaaaaaaaaaaaaaaagcaggcaaaaacggtggctgcttttgcaagaatgaccgtgaaagactcaaaggcaatccttggacctgagttttaccctccatgggtcgtttttacgcagcgtcaaaagttgagtttctatccttttttttacacacttatataaagtatttggcatattaatattgttcaattttttttttctttttttattacagttgaattggctgaatcaacaccttaaaaaactttggccgtacataaatgaggtgataataattaatattaattatgatcattgtaaatgtaattcaattcatttatttgttattaattggggtatataggctacatctgatctcataaggagcaatgtggaaccagtgcttgaacaatatagacctgttattttatcttcactcaagttctccaaattgacccttggtacagtggctccccagtttacaggtttgtgtttaattattaataatgacctgataataagattagagtaatatcttattgtaattggctatatgagattcattttatataattgaagcaaactttgaaactttttagttgatactcacaaaaggggtcaatattgtttaggagtttctatagttgaaggtgagagtgaatgtagaggagtgactctggaattggagattcagtgggatggtaatccaaatatagtactcgatgttaagaccagagttggtgttaaactacctatacaggtactaactaagttgtttggtactataattaaaagatgtatatattgacaacattttacttgggttattacttattttttttaatctcatttgtcttaggtgaaaaatattggattcactggtgttttcaggttaatcttcaaacctcttgttgatgatttcccttgttttggagctgtttctttttccttaagagaaaaggtgacattataattcatcttattgtccttttatggacatgtccataatgtggttggagtgaactttttaatgagacaagaaagaaatggagaatcaaatgtatgtacttaatgctcctattctacagaaaaatctggactttacacttaaagttattggtggtgatttatcaacacttccgggaatttctgatgctattgaggtttgatgaacataattgtttatgtttcaaaaagtcttaaaaaagaaatacataataaaataacttacttacgttcatggtttcgtttaggaaaccatacgagatgctattgaagattctgtagcatggccagtgcgtaaaattgtaccaattatacctggggattacaggtatgcaaaatttacatatttgtattcaagtcatattcagtcattttctttatggtatggttttgttgtgtgacagtgatctagagttgaaacctgttggaagattagaggtgaagcttgtacaagccaaggatctgtcaaataaagacatggttgggaagtctgatccttttgctgtgttattcatacgtccacttcgcgaaaaaacaaaaagaagcaaaacaattgtgagaaacatcttcaaggccttgttttgtttttgttttgaaagcaaattgggaactttgttaatttgctaattcagctattaaataagactataactcagtaggaacatctctaagactcgttctgaaaaagaacaagacgctataacaaagctatgagtaaccgtgttagcagatcgtttaattaagaataaggaaacaaaagaggacgccactactcctgaatctcaaccatcgtttagtcataataccaattgcttcagcaatcattaggccctttgtttctagtttttcccttgtactaaattgtgctcttcataattgtacatttgacagaataaccaactgaatccaatttggaatgagcatttcgagttcatagttgaggattcatctactcagcacttgacaataaggatattcgatgatgaaggtattcagacctctgaactcattgggtgttctcaaactcctttgaaggacctcgagccgggtaaagtgaagaatatttggttaaaattggtgaaggatttagaggtccagagagatacaaagtacaggggtgaggtaagattaagaatgttaatattatgagtaaaaattcattctttctttcaatgaaataacaatgttttcttcaggtgcaattggaactcttgtactgtccttttggcacagagagtaacattaaaaatcctttcaatcctgactatgcattgactagtctagagaaagcctttaagagtggaatagctactcagaatcagaagaaggatgtgattgtaagaggtgtactttctgtgactgtgatatcagctgaagatttacccataatggatttgttgggaaaagccgatccttatgttattctcacaatgaaaaagtccggtacaaaagtcaaaactagggtgagattttttcagtgttggtttgtatatacaaagctcatctgtaataaattgtatgtttttctcatttttcttttttctttctttcattaggttcttaatgaaaatttgaatccaatatggaatcaaacatttgactttgtggttgaggatgcattgcatgaaatgttgattttggaagtttgggaccatgacacttttgtaaaggtatcattattcttccctttgtgtttcatttattcatatcaacaaattacttctttatatattccaaaacttttaattggttttaaattaactttattttaaaatgatgccaaaaaatgacacttaatttcatttgtctccacctgaaaatattgtgctatcccactcgaaaatctaaggcagtcatcttggcctaaacataatggcaaaagtataatttgatttgcagatttgattatctaccaattaacctttatatttaataatgtttgtgagttcttatacaactttcgttcaagaaaaatatatttttcatcatatcttgtttatttcatattgtaagcatttaatgggttttttttttattattccaatccaagttactttccatcacatgtgttaacttttcagaataatttttgcaaaaaaaaaaacaggaaaaaaataggaagagtgatcatgacacttacgagggctctattggaaggagaatttcaggacagttttccgttagagaatgcgaaatctggaagactcaatttgcactttaagtggactcctcagccaatattccgagacaaataattgaggaaattaaaacaatgtgtatatatatgataatataaaacaatatcattaaaaataaattattagttttctgaaaaaatgtaaataaattattagttttaaatttaaaagaaaaaatgaaagaagagcatgtatcattactaagtgccaaccaatttggtacaaagagaatgcgcttttccttagaagttggaacccttttttctattcttcgtaccttctaaatggtaaaatgaacggatattaatttgtggtaaaattcttttaatatttacaactgtcacatataaaaactctctttcgttaccattttattgcactcaactcctattccgttgttaatgccacctaaatccgttaaatgcaactaagaaacaactagcaacattttattaagctacatgtaatcaaattactaaattaatcaaaaaaaaaaataaattgggaataatatagttacttttatatataaaaaaagtatgatttaacaaaataattaaacaaattacaaaattgaaaaaaaaaatactaaatcttaaaaattttccaactgattttcatcgattcaaatctctatcatattcttgtctcgtgttttcaagaacaggaaggtctttactcggatctgcaaccaagtttgattaatgctcgacgagtacttgtccacacaaagtcttgcaatcaccactataaaattgagctttagaggtagtttttaagagttttcagcatcaattttggtaaaattcgttgtcgacgttgttccaggcgaagatataagggtaaaaacaatcgacgacataggggtcttatggcgtcagttattatgaaataactgacgctacaaggctcctatgacgtccattattgtataataaccgacgccataaggcccaatggagtcagttattatgaaataaccgagccataagatctttctatgttttttttttcagctttacaattttgtgttttagtataatttttttatgtatattattttattattaatataattaaatcaagtataaagtatatataataagcataaataaaaattaaattaaaaagttaaataaatacacattaacgttgggtattgatttgagatggtgcaaattttacttcgagtatgtgatggagtgcagaaagtaaggtgagtgaagagcacttagtagtttttgaatggcataattttctcatttgttaactaatttagcaatgtaatcacttattttttatataatttttcaagatcaataaaatgaaacaataatttagggacccgaataaatggaaaaaatcagaggaagggctaaactttacatgattttttttgaaaacttttgaacattatta

SEQ ID NO: 381831 - DNA, 4052 bp, Cannabis indica
atttttattattttttttgactaaaggtgaatctttaatttcatcatatgcatatatatattgtgcaatttattctaaaaagtaatagaaaatttgtattttttttttaagattactaaatatagggggtgattttgcattggatagggaggctatgcatgatcttttcctaatgaagcaaaaaatattttattggaaaacatgaattttccatcaaaggataaagggcctacatattctatttaagatatggaaatgagataaaagtgaggtctaatgagatttctattctaaagaaaagtatatatttaggcttatattctaattaaagacaattgcagtagagtaggcttatattctcataaagtgataacgccatgaaaaatattatggccaacttttaatcaaatcaattgcctacattttatttccttaataaaattattatatccatctatataaatatataatatattcatgatagacatgaaatccaacaaatataagcgccaatgtactgatgtacatattataataactaaatcattttgcaggacaatttaatttaattgatatttgtaattgtttttaaaagaaaatatttttataagattttaataatgcatgaaagtgcaactttttcaataattataagattttatttcataccaacatataaatatatatatatatatgcgctgatatatacaaacgaactattttgtatacatgactattaatttatatatatatatatatatatatatatattatataagtggttttatcgatatatattgagaatttgacgtttacaattaggtgatctagagtctagagaatatcctagagctcttcatatacagtattttgtttatttatgtgctttcttggagaaaaaaaaaaagacaaataaagggaagtattgagtaataattattgtgagggggacaacttaattaattacttgacgttgtagtaatctcatcagagacgaatagagtgtttgttttggcatacatcaaaaaaatcgaaaccatgattatttattttggaccactttagtacgtaatcatttgatcatgatcagagttaaaaattaaaaaaaggttttcatgagccggaatcctgtcattcaaaggtcaaacgtttttcttttaatatacttagaaaaaaccaaaataaatttagttaccgaactaacaaataaacaaattaaataaaattattaaaattagtttggtgagcggtataaaaattgtattgtattaatcattgcatattgtttaaatgcaatgtgagttgtattatttaatgcataacaaatgatctgtattcacttgtattataatatttacaaaggatttagggtcgaccccgatcccgatcccaacccaagaccctggacccagaccccgaacccgaactcaaatcccaacccaaaccgggacctggaccccaaacccaaacccagactcggaccctaaacttagccctactaggactcaaacccaaacccgaaccctaacgcggagccggaccctaacctagacccgaacccctcagccggagccgagaccctggaccgagaccgggacctaaaccccggacccaaaccagaacctggccccgaaccctagacccaaacttgaatcatggtctcgaacctcatgttcggggtctaggtcccggcttgggtccgagttcagattcaagcctggtcctcgtttgggtccgaggtctaggtccaagattcggggtctatgtctaggtttgggtctggggtccaagtctcaattcaggtctaggtttcgagtctagggcaagttttgagtctggggtctaatttcgagtttgagtcggggtcaagttttatttgagaatgaaagatacaattggccctctcatctcatctttctaaagtgcatttattccaggatgtttgatacatgataacgttatggttagttttgaattaattcactctctgtttaaaagaaacaatggcagaagaggatttatggcacttaagcttgacatgagtaaagtatatgatcgggtggaatggagattcttagccagtacgatgcgataatttggttttgatgatgggtggattagagtgatcattgattgtgtgacgaccccagagtatacttttctactcaatggccttcctaaagggagagtggtattgacaagagagttacgacagggatgcctttgtctccttatttattcctattttgtgtagagtcattatcttcattgatttctcatgcagaatctaaatctgagctgatgaggtttaggtgttctagatttgggccacatgtcactcattttttttcaaataacagtcttgtgttctgtagggctaatataggtgatactgaagctattaagcgatattaactaatgaggctacctctagttagaagattaactttgagaagtctgctatcacttttagtctgaatgtgttacaagctgatcgagatggagttctacaagttttgggttcgagatctatagctactcatgataaatatttgggcttgcctacgctggttagtgaaacaaaaaagcgaacatttgaggggatctgtgagaaggttaggaagcatgttcaagggtggaaacagagtttcttttctgatggtgggagagaggtacttattaaatcgattcttcaagctattccatcttatatgatgagtgtcttatgtggaaagttgtcaaaaattgaagtctattgttagacagttttgctagggttcgaatggtgataaaaggaagattccttgggtaaaataagaaatggtgtgtcagcctaaggagatgggcagtcttaggttttgggattttcacctttttaataaagctcttttggctaaacaactatggtgattacttatatacgcagaatcgttgcctacccgaattctgaaatataaaaattttccaacttgttatatatcctagaagccactgaaaaggatggttcatcttatctttggtctagtctgatttggggattggatttgcataaatgtggtcttcagagttctattggagatggaatacaagtttgagaattcagagtcccacggctcccgcgtctgagatcttttcaaccaatcacgaggagagttaatgatgatcgtcgggtgagtgaatttatcctactatctggtatatgggatgtggggaagcttcgagaggtatttgtggccatggatgtggacattatttttcctattccattagcaaggcaagaggcacatgatggctggatgctggcactatgatcgggaattcgggatgggatttataatgttaaaagtagctatttgctggcgtggtcgcttcacgttaatgagggagtatcagactcatcccaactgctttattggtggaagtgtaatatccgctaacatagaaggtatttttgtaattttttttaccgctaagagtttttttattttacatatttatgggttgaaaaatgtatgagattttcgtgatgatataataatagttaattttcttggcatgtgcataatacctgataaatatatatatctggatattaaatgatagtgtgatttgttgattttggtacatattattattggtgtggaaataataataataatgatatgtgttaacttataatatagtaaaataatatttgtgatcattattggtaaatttatattattatagtggtaaatggtatatttaacacacttcttcttcttattattattattatttttattattattattctaattattattattcctattattattattcttattattataatactgttgaacgataatgtgtatatacgtacgatatgaaggaccgatttttgtggaatgagaatctttcactttcgatctttttgcttgggtttaaacaccatagaaattaagtttttgagtttagattttgtacgccaaaacagagagagagagagagagagagagagagagagagagagagagagagagagagagagagagagagagagagag

SEQ ID NO: 381832 - DNA, 2043 bp, Cannabis indica
atttattttttttattattaaatgtttagcaaaaatttgtgcagcagaagtaaatccatcagcaccacatcatgtcatgtgtagtagttcaaagatccctttacatggacagtggaaaacaataaaaaacaagccagtttcaactgtaacagcttctgcaagcgtggaatcaggtcacaatgaaaaattgttttgggatgtaactgttagtcctcttcgaaagttccagttaattgattctgattcagacgatacttccacaagtgaagaagttataatcagggaaaatcacaaacaaaacactagccatcctaccactacaggggaacaaataagaaaagcttcaggtttaatgccccagggactggacttatggaaagatttctgtccagttaagagtgtttgtacacctgttttagatgagttatgtgaagaatacttccgctctttgcatgataagaaatcatgtaaaaaaatgggaaagactgcaaatggacaaatcattgaacagtccttaaatgtggttaatccccttctgcctgcacatcgttattttctccatcatgatcctagggttcggaagttagttcgcaatcgcttatttaatttctccccattaggtattgatgaggacagtgaaaatcaacagagtcgatcgtcatttattgattacatgtaaatacttctacctgtgttgctgcttgtgttctcttaggaaatttatcatgtgaactatgttgttataacttgtgcttggttacctgttcaggggacaatttggtagcagacaagctcccgaacgacaagcaactcaacatgctaatcttgggagttcaaagagaggaagaaacaaagtgaatgaagtcttccttggctctcgaggctctattaacctacctaaaggaaacacaacacaaagtagtactgctaagaagggttcaaataagcaaaatgataagtctgtaaaacaaagtgctgggaaagtttttgatgcttctcaaaactgggtagatccaaatgaagggagcacatcacgaaaaactagtgttaagagaagctcaaagagaggacgaagtagagcacaatcatccaaccctggagaaggcctccataactgggtggatcctagaagcagtgctggcactagagaggattctggcaaaaggggtgttcaaccagttggtcaatctgttggtcattggtttacaggctcagatggacgaaaggtatgttaagctaagcatattgtttgcttgattttgttaggtggtgaattcattcttctgtctaataatttacacatcgttttacatgctgctatgtgattatgtacttggcctatattcgtctttgccttagtaaatttagtttgaatctaatgctggaatgtttatcatcaggtttatgtcaataaaaatgggcaagagctgacaggtcaaattgcttacaggcaatacaagaaggtagtttttcaaatgcactagtattattttggtgtttatctcattttagtcttctctttatatgtttctgcaggatagaggagcaggctcgaataaatccaaaaggaaaacaagttctagaaggaaaaaagcttgacagtgtattacattctttaagcattgcgtaccatttcttatagatttctaaatctgttgttcaatctcctataatcatcattctttctccccctagtttaaaaaaacctgttggtccctaatcatcaattgtcttttttgcctttcccttgtttgtggtgggtttttgtccaaaatttaaatacttgattctaacctttgataattgtagagagttgattaataaatcactattttgcctttttttgtgaagcatcggagaacctaacttgtatttttattatcggcactatttggttattattgttaagaatcatggggtttcatctcaatatccccctcaaaatggtggctatttttgctcaccaatcttgaatcaccttatcacaggccctgtcatttgctcgattaatcttaggtgttttttcaccatttggatctcgtg

SEQ ID NO: 381833 - DNA, 3335 bp, Cannabis indica
caaaaaaaaaaaaaaaaaaaaaaaagaaaaaaaaaaaagttacatatatacataagcaagaaaggagaggaaccctaaaactctgtaagttttgaccaagtttgtggcttttttgaaaagaaaagagagaaataaaatccctgaaaccaaaaacaatgtcgtcggccgagaaggagagagaaactcaggtgtacttggccaagctcgccgagcaggccgagcgttacgaaggtatctcgctttgcattcttgtcccttattttctcttaaaatttgcacctagtgtagtgtgttgggatcttgtgtttgtgaaaatgtgaaatttgggtgtatgtattttgactcgtctgggctgtattgctttggatcgatctctcgtcctagatatgttgatgcttggatcatctgtattgcgattcatctaatggaatatgatcttaatttcttcttatttatttatttttttttggagatttgggtcattaggaaattcacggattatgtaattttgtttgtgtaatataaatgaacaatagatttggaaaaatgctctttttttagagaggtggatcaagtggcttgctttctactttctagttggtgctttgattggcagcatgttattatgtttttgcattgggataataatccaggtttattgcagtagcaaatatttgggtaatgcaatttgagcaaacttattatttttttattaccttgtgtttaactagtatgcagcatttatcttctgatgaagttatgtgattcatatttttaatctggagaagagcaatgttatatgttttcacaatccattaatattataaagtgggcatcttttaaaattagtagttttgaaatggtgtctcagaaatggttgagtgtatgaagaaacttgcaaaacttgatgttgaattgactgtggaggagaggaaccttctctctgtgggatacaaaaatgtcataggcgctagacgggcgtcttggcgcattatgtcttcaattgaacaaaaggaagaatcgaaggggaatgagaacaatgtcaaactgattaaggaataccgccagaaggtagaggatgagctttctaagatttgcagtgacattctgactatcatagatgagcatctgatcccctcttctgcctctggagaagccactgttttctactacaagatgtgagtcatgttgccttgaaaccgcaattaccttttttttttaaaaaaaattacctttcctagagattattctccatctattatactttttttggtatgtatttagtattccaaaatatatgttactgtggaatagttgtctgtatatgagtttacctttttccttttaattggtgtccatgtgatgggtgaaattttctttttgttccttctgattaataattaatatcctctagagatttggataaaaacacatgtacttagatctgacgtgacaacttagctctctttttttcttttttagtggttataataaactattatgttttttggtttgcccaattcaggaaaggtgactattatcgttatcttgctgagttcaagactgaccaggaccggaaagaggcagctgagcaatcattgaagggatacgaggcatgttttaacagcccttctaagatttagagaattttttaatttaatggcaaatgagcttattcgttgttttgattcttcaatctctaacagtccttttcttgtcataacataattttgttaggctgcatcaaacactgcaaatacagatctcccatcaacccaccctatccgtcttggtctggctctcaatttctctgttttctactatgagattatgaattcacccgagaggtatagcttaatcctattcttatcttctcaagtcttgttagaccaatttcatgctagtacttgtagatctgatgttgattcttaaacttccagggcctgccatttggctaaacaagcatttgatgaggcaattgcagagttggatactttgagtgaagagtcatacaaagacagcactctcatcatgcagttgttgagagacaaccttactctttggacttctgatttacctgaagatggaggtatagtgtattttagaagttagaacagaattttgattgcaaagcttttgtttaaatatacactcatgcaggtgaagagaacttcaaaggtgaagaatccaaacccgctgatcccgaggtaagttctggcttctttattttaaaagttaaaatctttttgggttatttgactagttcatttatacctatcaacacttaaaaatctatgtacttttgtagcattgatgggattcctgaaacaaccctgcacatggcgagtggaaataaatctactctgcaagatgtgacctttttttgggttttcttgttcggatcaaagagagtggagggaagaaccgagaacgtagatattaatattttgttaaaactgtctctttaggggctcaaccaaagccagagtacaagagatatatcatatgtgcatttcttttttactatttcttatttatcagttttcttttgtatttgatcttttgcttggtgttctttttacatgttttcgtcttaagctgtggatacttttaaatcttttatattactatgtcggctcttatcaccatcacttgttggtgttgcaataattatagctaagtaaccataattattcgcttatatggtttattttggaaaagaccgattaccattctcaagtatcaatagtctattttatttttatttgataatcaaaattgaaattttaaaaaattaaaataacaaattgcaaaataaataaaaacaacaaatcaagcaatgaactcaatcttaaattacatatacaaatttgatacttttgtttaacatcaaaatcttatttttcagttcatattgcacagtaagaaatagaaaaagaaaagtataaattcataataaaatttaagattcagtcaaaaactctaaataaaatattgtttataatcaaaaaaatccataaacatgaaattaacataaagtaaaagtagaaagagaaagaaaagaatttaaatgatagatcaaattttcatccaaagcagtttaaagtttaaattagggctgaacatcaggcgggtttaccgggttttgagttcgcagatttcgggttcaaagaaatgaaacagaacctggacccaaatatggcatgggttggcgggttttggttggcggggttgactggtttagcgagttgacccagtcaactcgatcaactctttaaaaaacattaatttttcattcaaaactaataaaaataacaataaattaaaataaaatt

SEQ ID NO: 381834 - DNA, 5684 bp, Cannabis indica
tatagtaaacgacatgtttgatattggtccatgtcctatataatatctattatatatagcaccttcaccgaataacgatgtcatactacatcaataattcaaattaagattgcttgcaccgaataacgagcatcagtgaaccgtactaacaatcattgattaaggattctataatttctatatgttggtagctattttattcatgagtaagtgatcttaattctccatacaatacaagttacaatctcatatatgaataagaaattttcttatatttatatataaattattcaacttaaaatattaataacattcaagcatatatccaattgctcaactaatatttataattaataatgtttttacaatctttttaggacataaatcctaacaaccatttcttatgtaatgtacagtttatattgtattaaattcttatgaaaaatacaacaataaataaaaggaataaatatttattgatgatgtatctttattgtacaaaaataaaagccaggccaaccgatattcatttttaagcgataaaatggaaggagctaacaacacacaataaataattaaacacaatttaatatatatgcatttttttatatgactttaatatgcattaatctaatgtgattttaattttattaattagtgatgatgagcttaacattggcgtgataagcagccccagccttccaaagctttggtatagcattggtagaatgaatccaataagtatagcctaaattggttgtagcttgaaacctcaatgtaatgggcccacttggtggatttgccatatcccaaactgctccaaatgctctacgcatggccttccattttttggtgtccttatgccacaattcaactcttgcgatgtcgttttggccagtaacatataaaagagttaaagctaagtagtaaggataattgctgtgttcatttatcttgtaggttatgacactaatattattattaataatgcggccttggtacttgcaagagatcctcttgtattcaacttcaacaacaccatagctcgtcaacttcttctctgactttggaatagctaactttgaaaaagctcgtgggctcataatgaagtcagttctatctccttctccataatcactcactactatgttgaccccatcatagttgcaaagttgagggtttttgcacctaacctgaaatatacatttttgattaaattaattattaactaggtgatatgtaaaaaaatatatatacaatacttgaattcactataaaatacaagccacgtgttatattatacttgacagttcccctatattatgacaatgctaaaagattagcattacagatgatgtcatattactattggtgcatacattagatcccacatgaaatgccaccttgcagtagttttaagcaatgcttctatattatattatatgtagaaagaggtggtcatctactcatctaatccatgtattaatttgtatatgtgtgtttgaccttgtgtggtatctaaccatggtgaaagacaaagagaaagaaagaaaaagaggaagaaagagagagaaagatcaaaccagaaagaaaaacctcatgtttattatgagagaaagacaatgtatatatacaagttgttacaaagaatggatagctgtacaactcaactaacaactaaccaacagtaactaacattgtaacaaactctaactgtcttaacagactagtttcattctcacttcccccaaacttggagttaatgtatggaattggtgcatacatcaactccaagtttttgacaaaacacatcaaaaacgagaactagttatagtcttcgtcaagccatagacaacctggtcagaagcagggacatgatgaacaagaaccaacagttgagagatcttttctcaaacaaagtacatattcaactcgatatgctttgttctaacatgtagtactgggttagctgttaataaaatagtactaaggttgtcacaccatagaactagaggtctagccagtcaaatttgcaattctaaaagcagaggatggagccatgtaagttctgacactgcttgagcaacactgtgatatttagcttcaatactcgatcgtgagactttgtgttgtttcttacactgtcaggcaatcaaattggagccaaaaaataagaaaaagttagatgtagactgtttattatcagggtcactggcccaatgagcatcactaaaggtagtgactttgaattctaagagtggtttaaaaatccatgtgatactggcccaatgagcatcactaaagtttatgtagactgtttatcatcagggtcactggcacactttattcacgctgtaagaaatttcatggcgtgtaatattgagatattagtgtgttccaacaatagatcgatatagttattgattaggaacatgatctctctcataagcaaatataagatattagagtgcagtagtgttaaatggcagggatagaacaacagtctgagaatttgttgaattggacctaactggtttgcagaatatgtgggtggggatgacatgggaatgtgaagttgatcaagattatgaagattgacatgaatggattgatcaggttaaggcatatataccagtttgtgacagattgtcaaggggaatcataaaagacaatgacgggatgggagcatttttagtattagcggaacactcaccaataggcaaaccaggaacgctcatacaagaaacaacaagagcaggtagttcagttgggaataaaagatttaggaagagagagtgaacaagtctgttatgccacaattcaaagtctaaaataagagacttagaacagtgaggacatgaaattgagttggactttaaagcatctgaataattggtgacagtaaagacagactttaagcttgaggattgaacttcttttctgagagaagattgagaaaggggaaacatcttgaactgacctagatcaaaagtatacatgccattgtggagagtcccagtcagaagagtgtccctggtaacctagtccttgacataacaaatattagcatgaaattcaaagaagacattattgtcaagagcgaatttgaagacacttaatagattttttgtgatctagtcgctgaaggattgtgaattgtttgagctgcttgaggatcgaaggaggaagtgccagcaccattaacaactagattcgccactaatgaagggaaatgctctagtaccatgtttgatcttatgctgtatctagccatggtgaaagatagagagaaagaaagaagaagaagaagaaagagagagagaaagatcaagacagaaaaaaaaaaggccttgtgtttattatgagagagagacaatgtatatatacaagtcattacaaagaatggaaagctgttaaacccatgcaactaacaactaaccaacagtaactaacattgtaacaaactctaactgtcttaacagactagtctccttcacaatgtgaaataattgtggagctatgaagctccacatggggtgcaattggtgttggagtcaagtagtgtaggtaaagaatataagcatgagtaaaatagggctgcagaaatttcagaaaatacaattcagtattaaggcactatgttcaaagctttggacgagagatcaaactagaaagtagaattcaattatttggtccagaccgagcaatcctataaatacaaatttattaattggattatcatgtgagaaaaattacaaaatttaatatagatttataagtgataatagtgcccgttttgtaattggaattcaaaaactcatcaattttttgttgtttgttcaatcctaaataaaatcaactcagtttaatgacataacaacaagttggatcatgctatcatcaagaccttatccaagaataagttaagttagttatgttattagttcagtttttatgttattgtaaaggcttaaccagttgtggtttatcctataaatatatatatatatatatatatatatatatagatcttagttttcattatattttgtaacaaacagaaacatagatagatagagaagggaattcattgtatggtgaggtgagagcacttgtttgatgaggtgagagcacttgttgagagaaggaaaatctgagagctttgaagaacaaaatcgaaaagccaaggaaagaagtagatctatctcagggtgactccaagggtataatatcaaaattaattcttgctattttcataatgaaagaggaatatttaatggggattaggctcttcactattgtgaaggaagttcgaacctctataattttgtgtgcgttctttcatttctgttaattttggcttcaattcaattctatccattttgatttttggtctgttaattgtattttcatgctagctgagattgtttgttaatcccaatacatttgtttttaaacactggtacagtgaaaaaaactgtgcaaaagtgccttaggtgattgggtattggtactagtcattttgatttaattagttgcaactttgaattggatcaagagaagtaaacattctaaattcaaatgtatacttctgtggtgaatatatataattaatcttgtgatgtatgtttgaacactttttacacctaagactcttcaattgtatatatatattatttataccttataacatgcaccacagccagctccgtccttgtagagtgccctagaaactcctgagacatagccattattgatggcccttccataatcgccaaatccacaagctccacctaattaattttatatacatatatagtaaaaacttattaaataggtatatatgttttatgcaaattatatataggaatattaatgtatattacatacttcgactcccatagccatctggactgctaaaataggtggctcttgaagctgtaaacgtagcattattagaggcactactacaaaacgctggaaaaagcacaagaataatattaattagcatagcgcataattgtttctccatttttttgttcacgaattaaagaattaaattaagtagttagttttcaacatatatgatataatataaggaaagacagtataaagaaaaagattattgagctaatatatatatatatatatataaacagaagaatcagaaaaaagaagtttgtttggtagcaatgaaagaaggtatgtcatgtatttatagtgttacaatggtacgtaagggctagtagagatgatggtttggtttaggatgaaatccacgtatgccagatttgcttaggaaattttctagctcaccatctttctaattgaatgagatgtgtcatcttctaaataatgtttttacatcatattaattaattgttcgtagtttttagagaaatgcatgtcaaaaggcacattcaccttgtaattctctaacctttatggatgccacatgtgtgtttttttaaactcactacaagaaatatcacttttaccaccacagttcgctactgcgctgctaaaaataacttttaccagcacatttcgcaaactgcgctggcaaagaggttaaagttttaccagcgtactttgcagtggctaaaatctagctaacttttaccagtgcatttacgttttgggaaaaattatttttgccagcgcttttcattttatgttggcaa

SEQ ID NO: 381835 - DNA, 814 bp, Cannabis indica
cattttgtgtaccaattctttttcctgttttttttaatcactattttttaatactctccaaaacccaatgataatattggtttttctttagaggaaccgcatgtgcatatcaatggaactggttactgctgttctaggtgaccatggacagcgccctcgagaagactatggtactgtgattttctcatatgttgagttcgtaacatagtaatttttgctgaattgtgcatgaaacttattttaatgtgaaacattcttcagttctttagcttaatttgcactttttcctttcttttttcggagcagttgttgtgacagctgtgacagaactgggcaatgggaagccgaagttttactcaactcctgatataattgctttttgtagaaactggcgcctcccaacaaatcatatctggttgttctctacaaggtaattgccataatttatttagcaattataatataaaatatggttgaatagctgtaatgtacacagggtcatctatttttgcagaattaagtctgatactgatttgttagccgtttcaattaacaacttcagaaaggaaaaaataacagaaaaaatttgtccccacctcagtgctgctccgcattctatttaggcaaagccatgcatgctttaggctacaagcataatcggacacaaatatattaacagcattataccatgtcgaaaaaccaggtctcatttgactctccaatgctccatctctcgggcttaatcatctaaatggttctatctgaagtatttattgcagggatttgacatccccgctctctctctctctctctc

SEQ ID NO: 381836 - DNA, 2101 bp, Cannabis indica
aaaattaaaacataaaaaaaaaattgccgcaaatttctgttttattaataacaatcagagttatacgaccatgggtttagcttagcgtgctcatccactcaatctcattgtttgaggtggaattacccatagatcttattgaaccctcgattctacatcttatactctctaaactctcattatacttattaaactttcactcacctctcttctcttccatttaatctcaccattctattaagatttgctaaacgtgttcccggtaaaagtttcttctgtgtgtaaaagttcattcatctttctgttctttctgatcatcggagtaagcgaaaggaagcggcaacgatctgaaagcgcggtacttcccaacattgttcaggtgctcgttctccaatctgatcaccaatatccatttacattaatttataatatatatatatattttgttcaaaattttgaataatctaataaaatttaaatattttgttgggtacagtaaatcattcaaaataatgtctaagtataactataatatacaccacaataaattatgcatgcatgcatgtatagagatgaacctgaagaagttccaaatgccacgacgaataatttccaaggagaatacagtggttgtgattcccattctatgagttgagtgtagattaaaagctaacaccaattgcatccaagccactctcaataatatatccaacacctgttattatatatcaccataactatatataattaaattgtttgattatgtaatttaaatgataaaataataataattacgtacgtacgtaccatagcaagaacgtagacaattttgtgtgagactataagtttgtctcttaagtagatattcttagagtgccttctcaagaggccccaatcaaaaacgatgtcccaataaatattgaccaaagtggctacggctgagctaatcaaagcgaagaccatccaagtcattgactcctttctcagttcatagatagttctaaacaccaccgcaataattgttgagaggtacgtcaatgcattgtatccattcattttatctctaccctcaattaatcgacgaatgcacttcatttatgaggaaatataaaaataataggacatcagtattcagtacagtacccaaaaccacaatcaaaattaacgacatcataacccaaaaattgatcaaatcaatagccaaattgccacaacgcccctatttatagattacaaatgttaaaattaaaatgaaaatatatgctacctgaggtggttgcagtgtgtgaattttggggggagaatgggtttaattcaactttgtattaaagtgtgtgggattccagataaaatattttattggtttgagtgttttacccgaaaaataaaatatattaaaaacataattttgtttttaagttttccaaactcttattctcttatttattttagtttgggattaccaaccaatcacaaatttcattttcaaaattccaaaataatgaataacatttacaaccaattaatttctcatataaaattttaaatatttgtctcatattccaacacaatttcaattaatatttttcaaaaaaaaatttttttagcttttttaaagaaacccttattaaaaaattaataaatatatttatttagaaactatattttgatcataaagaaacaaaacaattagaaagctatgagaggggaaaaaaaaaagggagaaaatgatatgagaaaaaagaatgaatgagaaagtggccagcaaaaaagatgaaagagaataatttgggaggaaataattagagctaatattgagagaaaatgtgatgaaacatgacaaacactcttgtttcacaaaaaaaaaaaaaaaaaaaaaaaaagaaagaaagaaaaaaaaagaaaacaactaattctagaaacttagggtgcatgtttgactatcataactaaaaaaacttgttttttgttttaaaaataaaaaattattttttgaaaacaatttggcttgttaggccttgttttttgaaaatagttttagaaaactaaagttacaaaaaacaagaattttaaaaacaacaaaatgttgttttctgtttta

SEQ ID NO: 381837 - DNA, 1137 bp, Cannabis indica
gttatagtgtaaaaaaaaaatatttttttacataaatattaaataatttaatattaaaagtaaccaatccaaagtactgatctgcacttttgcggattgaattggattggatttgagctattgtgcggattggattggatccaaaaaatagaactccacacttagtgcagattgaatgttgtttgactaaaaaaatagcggcttagatcggataaagaagccctaaaattaacccatcatcattctattatagtcattattttattatatcttgtctctcacaaatctaattcgtcttcctaaaagtttatactggtcaaaattcggatcaagcatgtgtatagatatcggtattaattcaccctaaaagccaaactaacaaccaattcctatttaataaataaaatatgattcaggattattgatgaatgcatattattagcattaaatatatagaactgttttatgatccctgccccaattatattattaattaactaaccaagctttggatcatatggtagactggtagttaataactaactcaagtttggtctaactaaaatgactcaagtcatccattaattcctgattaaaaaataaaacacgtatataaaaatgaatattataactaataagaacaaatacatatatatatatataaccatgaattaaagacaaaagaattaattattttttccattgattcaagtgtatcatttgatttacaaaaggcgttataagatcatatatcagccatgcatataatattcatttaatttatttttggttaaaagttacagaattaagcagagtcgccatatcagccatgcatcatgcaatgcatatctgcaaatttccatgaccataggagttaggaccacgtgtaggactactattgatgagatttaattatatcgaagtaattatgatcattaaagaaataataataaatgttactgacttaactaaaaaattgttttaatttccagagaacctaaaacagaaatgtaaatatgggacaaaaatgaaaaaaatacgttatatatttatggtcaacagttgaactaggctaacttatgtagtttggaacttggaagatggaagtttgagttgtgtggaggtaaggtacgagtt

SEQ ID NO: 381838 - DNA, 2357 bp, Cannabis indica
tcatgtaaaaataatgatacacttattgtaattaaggatattttagttattaaatttaaaaaggacatttaccttaaaaaaatttaaaagggacatttactatcattagtattaaatttagggtcatttattgcaatttctctttctttaaattatcattttcaattacatgatcctccttttttataatctccggctttgttgcaaatgataagctaataggctccggttccgatccctctcattaacttggtagtaacacttttgataagctttttgatacataatcccttctccaatatattattacttagctttgtcctacccattacacaatgaggcacaatatgcatataaattaggtgattaagacttcactaacccccttggtgcaacgcttttggatcaccaactttatattctcaatatccttacttttatttttataaataataataatactaataattttaccttttatttgtttagaacacttattgaagaatggttggcccactatccaattagttatttcatgcaaatagtgttgaaatctatataaataggaaacctactactatcaactaggttccctcaatattggttttgaagtagtggtgatgttgttcatgctaataatatttaaaaagttggggatgtgggagtttgtatatcataaggctgaatgattgaacatacaattatatttaatattttattttattttatttaacttttcttttcttttgcttgtgttgtggctaaagtcaattggattaggtcttaaaataatattcctttgtaaggaaccatccactaagaataggacacaaggaatttaatatgtaaaatagataagattggtaacatggggtttgattgtaagggcagtttttggaaaatgaatcttaaagaataaggcttgttttggttgcattttaagagtagcctttgcaagtaagtaagatttgggtattttgcctgtttgggtgaattaaaaaggctaattttatttttatgaatttaatattattgggacatcacttgagactttaattttcacttcaatcaatgaaaaggaagtgtgaactatgaaatattcattctagtcctttctacatttgtattaatttatgtagaagtagaatattcccttgtttttttaaccaatggtaattttcttctcgtctcgaacatgaaagcactacctgacaaaattttatgttggttgacctgcatattcttttgtcaacaattttgccaactttattaataattgaaacatataattttgatccaaataagccattagctgcgtagctcaaagccgggatagccatattaatgaatactggcttaagtttacccattcaaaacctatatgatactcccctaaataaataaaatatatatttcttctctctctctctctcttcacaaaacattttaagagttgaaactgattaataaatgaagataaaagtcattccttttcataaaatttactccaaaatcaataagcaaaagagtccaaactcggaatgacttttgctgacacttcggtattagaatggctttagtgctattagaacaagatatggagttcaacatttgctgacacttcggtattgaaattgcttatcttccaaaatcaatacacccaatataagacagttaaaaaatgaataaataaaaaagtagaagaaattttatctccttattttgtcctcaagcctcaaatcccaaccaaggtctaaaatttccctacaaacaaaatagatctaaaatacctaaaaaaatctagacttgtcgaacacgaacgtcgcgccttctcggttgatttgtctcgccttctctatagaccttgtcatatcaaacgttcacctcatcaaatctgagattcaagtattcaatatatccacctcgtcggtgtcagatcaaggcctttaacagatttccctcgttactgctaggatgtaagtctaaaatggagcaggtcctatctatatcgaaggtctgtcatcgcctgttagatctaaggatgttgactgagaagaaaaggagaagaaagaggacgacagatgacgtcactactagaaaattggattttagtgacacacattgcgtaactctaaaagtgtatagtgacacttcaacgtgcgtcactaatgagggtgactcgaaaggcaatttttagtgacacttcacaagtgtcactaaaaccttttccattcattttctctgcgtcactataggcgtatagtgtcaggtgttgtcagactgcaaaggtaacagccacacacatgaagtgtcactatatcttatttttctttttttttttaatatttttagaatat

SEQ ID NO: 381839 - DNA, 3942 bp, Cannabis indica
cttttaaaaacatagtagtaatattgttaattaaaagaagtgtaattaaagtaacttattaatgctaaaatgaaatgttaaataaaccatactattaagaaagaaaaaaaaataatatacaaataacaaaaaattaataagagtattatataaaaatacagactatattttcataaataaaatcataaaaatatttaaaattttgtaaaattatacttttattatttttttgaaattatcccctttttttttacaaaatggcacacctattggagatgtgaatatattgggctggactttgttagagtaagagaaagtgggccttaagtggctcacggctaagactccccaatcagagaccaactgagctccacacttgagttttccttccgtcaacccaaaatcgtttctctagggttttagaggttagctctctctgtaatttgattgatttggggtttagagagagatagccaaacattttttttttctctctctccattttcatattcacagaaccactgtgtgttttataattttttctcctttttcaactcttattattgttgttattcaatagaagaagcaaccagtgagcaactaccaaaacaatggcggcccttgctcctccaaccaccgctactgcaattctacccgagcctgccattccagagaagaccaaagcagatgagaaggtcgattacttcaatcttccatgccccattccctatgaagagatccatcgtgaagctctcagtaagtgttttttgttttttgggtataaataaaacgatcgatttgagtgttttctactttgattctattttgtacttttttctgggtatctgttgtttttccgagtactgggtattttgagcgattgttaaacgtatgacaaaatatttactttacaagcattagaaatgtgtgatcttttttcttttccttctcccggagagcttgtattgtaggtggagttgggaggttagaaccaaagggaattactaattttctaatgttgtcagctgttattgtttttccctctggcggaattaggatagcatagaatcaaagggtataactactggttttcaaatgttattaattgttattgtttttgttagcgttttttcttttccatctgatagtggtagacaactgagagagtggtgagtatgttatactaattttgcgcgtttgggtgtcaatagtgtcgttaaagccagaactttttgaggggatgcgctttgattttaccaaagggctcaatcagaagttctcactcagtcacaggtcgtatcaggctctccactgcacctatacatgattttttagaatctatttagctagttaatgccattattaactgtattttgtcatcccaaaactagtgtgttcatgggtcccactgaggttccttcccagtcggcggaaactatcaaaatccctactgctcactacgagtttggagccaactttatagacccaaaggtgacttaccctttacttaaatgtctttttggattttgatattttcataaaagagttcatcctaaatttttattatggattggtgtaatgcagttgatgctttttggaagaatactaactgatgggaggctaaatgcaagagtgaaatgtgatttgactgacaatctcattttgaaggctaatgctcaggtactattataaataataatagtgcatttctgggagtaacaattttcatcttttagctaattggccagcttcctttttttctcagcttacgaatgaaccccatatgtcgcatggtatgctcaattttgattacaaggttagatgctggcattttggaacaatctttgtccttataatttttctcttatgagtgggtgtctttttctttgtgttcaatctcattgcaaaaaggttatagtctacatatgaaagaaattgtattgttgattgtgcaaatgcacatgctgtgcgtctttaaagtaagtaaatgcagttaaatcaagaacaagcaggctaagcattctgccattgtcatcatgacggtagtttaagaatatattctttcaaattgatggcgtcgttgattctatatatattatatatctatagttgatttttcatatatgcttgtgcagaacttcttaggtattactaatcaattgtttatttcatttattatggtatttggaattacaaagggaaaagcttagttcaagctttatttgattgtatcattttacttgtattattagcttcaaaattacataaataatgcttggaaccccaacattgcattaatctttaagacagactaatggagtaggtgatttgcaattttcctgcgggtaaatgtctatagaaaatatcatcataccaactgcgtcaataatagcatcagttgtattagcacatttgtataatggttggtatacctagcatcatccaaaattaggatagaaatagaagagtttgggttgctttactctctttcccatagactttgagagtggtcgggccatttaccttccccaaagttctatttatgctattatcaaccccctgagtataatttggtctcctagtgttctattatattagaatcatcatttgagggattcctttctagatctttgtagagattggggaagtattctgtattaatagttcttagatttgtgtttccctgtcttatttaaaatcggttgtagctttgttagttgctaaaattttgatcttctatctttgtattctgtattcacacagagaagtttttctttcttcattttttttaaataaaaaagtcatttgtgtaaaaggggagaagataaacttttttaggtgcgccttgtattctgcttctttagatttcaaaacattctcggctgaccacaagcacttttggttaagaaattgggaagatgaaacttgatgagtcaatccacttcatccaccttttgatagtgtctcctttttactaattggacaacagattgttttgtcatagacaccaacaattatttctccaccaaatgtttgtttcatgtgaatgtactgctatttcttttctttataaaaaaatcttaaggttgcttgttgcagttggaagttataggatatatcactacttagaacatatggaattaatgtctaacaaaatttgaaatcaaaaatctggagtgtcttagtgttatagtagtcattcttgaggtttttctttggttctttgagttcttaaaaaatgctagttaaaatttagtgttggatccatttcagcatatatctctcttgattcaagttctttttgtctattttgttgattggatatgaattatggttctctccctgattatgattccaacttcttgtgcagggtagtgacttcaggacacaatttcagttagggaatggagcattatttggggcaagttacattcaggtacataaattgtcttgttaaaactatctctaagttaacgttaaacctgtctgtttccaacaaccctctgaacttttctaaaatcaatttctgcctggagtgttatttcacaagattttgtgaaaccaacgcctgttttttcataagtcataatctgacatttccaatggtaattgggccgacaacacctgtacttaatctttcccagacctttaaaaccacaagttaggatttatgaacctatgcacacgccatggaagaatacacatgttgactattatgtatcctatttacggcagttatggaccaattttcagttgaacaactctagtttattgttagcatcaaatcattatttcaggtttcttggcactggtcttattacaggcctctctctcctcctttagccttccattttcttcctaacataaaattgttgttgttttacagagtgtgaccccacatttttctatgggtggtgaggtattttgggctggtcagcatcg

SEQ ID NO: 381840 - DNA, 5271 bp, Cannabis indica
ttttagaataaatacttgttatttataaattaaactggtgggtcatttacaattacagagtaaatagatggaggaacaaattccatccaatagcaagcttcatccaaccctaaagcatatctagccaaactatgtgcggtcatattagccgttcgtttggcatgcataattaatacacctgaaaaaaaagaaagaagacaaaaaaatatctataataagatcgttaaaagcagcaatacaattcgatcgaccatataatatttgtaaccatctgagcatccgtttctacatgaccaatttggagttccaactgtgaagcccataccaaactgtcgaaaagtgccttggcctccatttcatgtgaagaaaaattaccaattaaaggcttggagagggcagcaatgacatgaccttcactatttcggacaactacacctacccattatattgttatttgaatccacggttgcatccacattcattttaagtttcccatagtcatgtggcagccaaggtgtatggataacaggggttgttgtggaagtctgaggtgttgaattttgttgtggtcgattcttagcttgagcagatcggtaattggacaaatagtttttagcaaaagatgctaattgtgcagctgatttggctttttgtccatgtacaacacgattcctttcagtccatatacaccataatgtgcaaattataaactccattttgttgactgaatgtagtgtggtcaggtgaattaaataatcacctttgtgcatcattccagcagtgttccagtcaaaatgaaagttagtggcacgccatactgctcgagcgtatttgcaaccaaagagtgtgcgaccaattgactcccaagattgacaacaatttgaataagtcgagtctgtaataatgttccttcgcaccagcattgtcgcatctggaatagcatcgtgaaatactcactaagaaaaaatttaaatcttttggggtagctgtaacttctagaaatatttccaccaagccgttgatggagatgatgtcgaggagagccttgtttcttccagtgatgcatcataatggtaacctgaatggacattgtaaatacctaaagaatggtgatgccaaataagcttgtcattggttaagaagtagcttaggggtatcgtaagtaaatgatccacatcaaggctggaaaagtactcatgaagcagatggcagttccagtgtcgatcttctgtgatcaagttggcaacaacagcttgagcaggacctctataattagttagcacaaaatttgtgtggtcgggtatccatggttcacttgcacaatttatgtttctcccttcaccgattttccatcttagtccagcacttaaaagctctcgttcgaaaagaatgccttgccaagtaagtgaaggaaaatgaccatgaggtgcttcaaaaaatgagttgtttggtaagtaacgactttttagcaatccacttaaaagagatgtaggattatcaagaagtcgccatgattgcttagctagtagagcttgattgaaatgcacaaatgaccaaaaacccattcccccatcgaatttatttttgtataagagttactagttacaccaatagatttttgtaccattttcatttgatccccactaaaagttagacatcattgtttcaagctgattgcaaatcgtgatgggtaaccgaaaacaactcataagataagtagggatagattgcaccacatctttaaggaggatttctttgccgctaacagaaaaagtttgtcattccaggttctcataagtctccaaattttttctttgacctcattaaacagttgttgtttatcacgatctgtatatgctggtaagccaaggtatttttcatgggagtctcggatgggcatagacagcactctatgaaattgtatttgtgtagccaaggtcgaatttggtgagaaagaaaggaccgatttgtcaagattcaatacttggccaaaggctcggtggtaggtatctagagatctcttgatagcatggcaagcactttcagtagcattacaaaatagtaagctatcatctgcaaataaaagatgagaaatcggtggagcccttcttgtgagagaatagccatgaagatgtcctagttgtttttcattatgcagcaagtatgaaagaccttcagaacatattaaaaataaatagggtgacagagggcaaccttgccgaagtcctttggttggtgtgaccgaaccagtagtctctccatttaagagaaaggtgaaatgattcattgtcaagcaattcataatgagagatgtccaacaatctgcaaaccccattcgttccataacaaccttgataaaattctattcgacccggtcaaacgccttactcatgtctaatttcatagtagccaccccttttcgacctgacgttttgagtttaataccatgtattagcttgaaagctaccaagatattgtcagttataagtctattaggaaggaatgcactttgagttttcgagatcacatgtggtaggacattcttgaaataagaacctagaactttggtaataagtttggagatgacattggatagactgatcgacctgaaacccttcatgcattgtgccttcttgatcattggaattagggtaatgatagttcaattaagaggagtaggttctgcaccatcatttaggacacttaaaacaatagaagtgaccatgctcccgactacatcccaattgttttggtagaacattgcagacattccgtcaattcctgaacttttatcacgtcccatagtttgcagagccatttcaacatcagcttttgtgaatggtttgagaagagtctcattcatgtccatagtaactgaaactgggattgtggccaaagttgcagcaatagcactattatcaattgaagaagcctggaacaagttggagaagtaatcttggataaccttgctcatgtcttgtttggaggtaacttttaaaccatcttctgtcttgagggaagcgattttgttgtttgacattcttgtcgaggctttaaaatgaaagtattttgtattcctatcccctaattgcatctaatcaatttgagagagttgttgtcagtatatctcctcttattctatcaaatcatctagaattgatttgttatatttcagtatagcagttgtctcattgatgagagtatgagaattatttaatgtgtcaactttcgattgtccatttgctatattcttcttcatgcggccatattttttaatgtgccattgttgcaatgatttagcacatgaatccaacttattaagtacactcctaatagggtctaatgtgttgtctgccaaccaacaattagagatgatgttctttcttttagggtcagataaccacaatttctcaaatcgaaatctgttgtgtcgtttatgctgctgaggggccaaatcgttagagatatctgctgattgttctcggtgatcaaatttaaaatagtctaggtgtgaaactttgggttggttataagaagagctccacacatcattcacaaagcaccaatctagacgctcctttaatgtgtttgaagttgttcaatttttttcctaagtgtagctatttccttgaaaaggtggatcaaaaagatgacaatgatcaagagcacttcgaaaagcactcatatgtgtttcactacgcaaggatccccctgatttattctgatttgataatatctcattaaagtatccaattattaaccatggctgcaaaggagccacatccgcaagtctacatagcagtgtcgaagaaactgatgtattttgtgcagtaggagcaccatagaaggctgtaaaatggtattgttggccaccagtagcagtcataaaacaatcgaagaagtaggatccaaaggtattgaggtttacatcaatgtcatctttccacaacagcatacaacctccacttagtcctatccgaggcacttccagaccatgagtgaattttaaagattgttgaatgcggtttaaagaattgttattgagtctagtctccataagaaagagaacatggggagattgctgctgaataagcaatctgagatgtcttaacgctcttgagttccccaatccctgcgcgttccagcttaagattttcataatcccttgcaggattgtaaagtaatctccgcagagtcgtcagagtcaccatctgaatccttggaaattgagtaaacattttggtttaagcaatccccttttgacgaggaaggaaagacaacattgcaattttggttgcgacatctcttaagcgtttgtctcatagaaggagcatcagtttgcctcttaaaaattatgttgggttgaggttctctttattgatttctggtttgttgtaggttgtggaaatgagtggtggtgaaatggttatcagtgatggcatatgggggaagaaacatgcaacaggttgttgatggtagtgaaattaggcagggaatttggtggataggttgcaaattgaatttgtggattgctagtagagccaatgtcgggggtatcaatttggtttaggttagtgatgggtgaatggttgatgggaagtggattcatgccgcttgtagtggaaggtatggtaggagatgaagagtgtttagtgatcaacatatttgatgcaacagtggttatggaggacaaatggttatggggggatgttgtaattgatgaaagtggcaaggtctgaggttgatgtggattctgttgtaataagacagaggcattgctatcattcatagccatgttagaagcaggagtagacgattcaccatgaaagagaatctttggctgaggttgtgatctgacacccagagttgggattgtgattactagtgatttatgagccagacgtgtcaagagtggccaagcattactcttggagaaatcagtacggtacttgtcatagccattagttggtaacttggcatctttcatccaaggaccatacaagagatcatcatcattaccattgtccattctttccatgaaatccacacatttttcaaagggatatgatgtccaagtaccacattcaaagcaaaattctggcaaccgttcacatctgaaatcaatccaaaaatgatctttgatccttggcaaactgatcattcgacctctgagtagtggtttttctataggaagtctaacacgaatcctcaaaaaagtgttggaaattattttaccaggatcttagatccactcacaagtatgtttattaa

SEQ ID NO: 381841 - DNA, 1530 bp, Cannabis indica
gaaaagtattattatcttcacaacatacccgttttaggtttcacccatttaatcatcacaggacaagtttatattggcagacatgtaacttttgataaaaaagatattattcaacacatgaatcattctccatcttcaaatactttataatttttttcaacttatttaaattaataaagaggtatatttaaaaaaatccaaaggacgtatttagtaatgtttttttaattaattttttgttttcaaaattaaaaaaaatttcaaaattatattctataaatttactttttattttttaattttttaattaagaaacaatattctaaaatttaaaaaacaaaaaaaaaagtcacttttgtacaccgttttcttattaatattttggactctcactctaacttagaccttggaacccgtacaaggactccgactcagacagtaatctaaacccggactcgaacctggccctgaccctagagacccaacttaaataaaatcatgaaaataaaaataaaatttacaaagcacactttcattttttatttttaaaattgaaaaataaaagtggttatagaatacatttttaatttttaaataaaaattttacttttatttttgtgattaaaaaatttaaaaacaaaaaaattaccaaacgtcacacatatatatatatataacaatcttttgaatttccatgaagaagcaattgaacacgaaaaatgtatgagaaactaaatttaattaattttgtggtcattttgattttgtattttttcaaacattatatgatgattcaatatatagtaggagactatatgatagccatgaaaataaggtcaatttatgaaaactcacctcatcaccgcccatttcttatcaattccaatagtaattaataaaaagtttcatcattctttttattcgaatcatttttctttaacaagttttttttaaaagaccaaacttattagaaggtaggccaaatagatcactctattattattttcttggtattatatataatatatataacgtaccaatggatttaatgggcgtcaaaataaagctatttttctttaggctttagttacctaatatattatctttattgcaattcaagaaatatatatatatatatttatatatttatatatatacaagtgtctaacattggtgtaaggcttctaacattatattgcttttgagggctcatttgtagctggcaatggcatatcgttgaccacactattctaactcatcacctacaaaatccaaccaaaacattacaacaacaaacaatcatctataatctataaaaaaaaactatattttgttatgtttggaatccaagaaagtaaaaatataataaattaatatattttttaattatcaaattcgtgtgtatgttgatagggatctctggtttagtagatgtaagacacttttgtcgttatggttatatagtattttgcaaagagaatgatggctcatggcagcatagcaataatcatattaaaaagaaaaaaaata

SEQ ID NO: 381842 - DNA, 2204 bp, Cannabis indica
tcttaaatatttcagatcctaacgttatgttatcgattttttgctctctcactgtttttggttttggtttttagatataatttatttttttgatttgaatagaaaagagagagcaaaaaatggttaatatacaaagagccaagaggtgacgaaggtcgtgatggtggggtctctcttctcttcttcccgtgtttaaagagcggtccttacgaaagtttcgaccaatgatttgagggctctattgaaaatgtcgtatttacccttatttagaacaaatttttgtttcttttttgttcttgactgaatacttacccgtaaattagttccctctttttatcctctatttttgaaaaggcatttatttttattaattaccattaccaatgctatatttataccaattttaccaaaagttatgcagtttttatttgactaaaccaacgcctaatttaaccctaagttttttcaataaattataggactaagggtcaaaacacgttatacatttggattaggtaattggaggaagtgtgaaacagtgaaagtagtggtgttcttgacttaaattgcagtttaggccaataaaagaaataataaaacaaaatggtaatttgccttctttgataagggaaagaccgttatgttcgacttaatcaaagtacaaggtcgagccaatcataattgccagagtgtagagggtgggccccatgcctcattacgatttggggggtttcgcagaagttaccgttgtgaacacattgaagaaggttgtggtagtaaccgttggagttgaagaactcaaatatagggtctctatatctttgacacctaagcatcctcacgaccatgttttactataatattaaattaattaatagtgttcactttcgaactcgtttagccgacttaacagtcaagtgacacgctaataaaaataataatattttatgttctcattcatataactctcgtgccttaatacacaaaccaaatccactctttgtaagggtgtgcaaattcattcaattcaattctaattgatctaataaaattggatattcaatatgcaaattttaaaaatccattcgaatgttggatgattcaataaataattgaaccgatccaattcaatatcatccaatgtctacctaatcatatttaatatttataattttatatatttaattattttatttaatattttatatattattttattatttatgttggatcattaggttttaaattatgttttttcatatatattttttttttaaatgaaatcagcttaaaagtggttaaaatggattggattagatcggatagaaaaattcaatatccaataaataattaaattagatcggataagttcaaatctattcaatgtaatccaataaacacccctaattttttagaagaaaaaaataacaacaaccaaattagaaacgtgcgatcaatagctttattattattattatttttcttacatgtatatctaattgaaagagtgtttcggtaaactgtgaactagtgtgaaccagcacaccaaaagtcgaataataaacttaattggaaaaacataaagatgttaagcaacagtataacaaaaacatgattgaataaactaacaaaaattatatataacattatcccaataacatgtgtggacgatacagaataaaagtataaaacacttggaatacatggtgggcagaatgaaaagctatcatctcaattagtttggagtccggtacaaaagaaattacataaattgattttttttaagaaagaattaatatttttattttgaataaaagtgattttggaataatactacaaattagattttatagtcattacacaaaatgttatttggtatatagacaagattgatcatattagttacacttttggcgaacgcccacttagctacattatgaggcgtaaaattacacggtctaaaaattaaaaaaaaaaaaaacaacttaacaaaatattcgagagatgtttacaatgaattacatagctaccaatgatccaataggagcaattttctttcagcacattgataattgtctaaaagtcactctcaatcaacacaaaagtatgcttcttagagattgcttccaaggctaacagaaattaatatttttcttagtatatgattacaaaaattaatttattttttattttttcaaaatata

SEQ ID NO: 381843 - DNA, 1093 bp, Cannabis indica
aaaaaataaaaaaaaaacagaatccaatgcaattgaaatgtgatgttcattaaatatagagtcataacatttcaattttctttggtattttcttggcttccaaacaacattctacaacattcttgatcttgacatataaagttattttggcttcattgtcctatatggaaattgatagaatattcattttaattttgggaaagaggaaatattcatatattttcacttcaagcccatacacacactaatttttggtaacttttttgttactaaaaatgctaagcttggtaacttagctagaatcactaacttttggctgagaaataagcaagagcaccaacaaaaggtgcattaatgtaagtagcaggctcagattgttgataattattccgatcatccgagaagttatctcggctatcagggccaccgacgacagcaccaacaagtacattagggttcggggatccagaattcaagtattgaaagccgtcattgcaagaaatgcgagaggggtgtgaatgaattgacgggagagaagagcctctatggtgaacatgttgaggatatttttcaccaaatccaaccatataagacatttttgatggattatctcctaatatgtaatcaacttgtttctttgcatgtgaaacaaggttttcaactgtgattgttgagcctccacaagtggtaactccaccatttaaattaaggtactttgcatatgttaagagtaagaaagctgaggttgtaacatattgaagattactttcacttcctttatagaaaagtcctcctgtaaatttaacaaaaccaaataatattgttggttagaaatgacaaaagggaaatcgatgattttttagtgtaatttttttttttacctggtgtgtattgagcttgaaaacttgatgtgccaggaattagagaacatatgtagttatctgagtctgctttgaatggttggaattcgccaacttttttgtcaaagaaatcctattgaaaagagtaaaaacaagagtaagtttttacgtcgtattaggttgtattgtattgtattaaattagattatatatcatatttttatataatacta

SEQ ID NO: 381844 - DNA, 2450 bp, Cannabis indica
tgttttcgaacattcaacgaggttgtcattccagattttcttcgccacttatccaaagcagaacacaccatctctctccgaactataaaagaagaagacaccaaccaaaacggcgtcgtcccacacgtcgagaggaagactataaaccacgacgatcaaacttcaccatcatcttcttcttgtaatcatgaagaaaatgatctccttgcaatgtttgaagaaatcaaaaccgacgccgttcacatccaaaagatctgtgcaaggctggagcactgggagactgagctcaacggcgccatgaaagacctcattctccagagtttggacgacgcttttaaagaaaggacgggtgaagtaaagaccgattttctccaggataagcttagtaggactcgagaaacagtttccaagttaaaggatcagatctattcaactttgaaagacgatttgaaaaactccaacttgagtttccgaaagcccactcctacatccagtaaggttacacggccggttaatttaccgacggttgatatcagtaaagaaattgcggtgaggtcgacatttgaagaaatcaaagccgtcttcgaaagcttggatccgactaagaaagtttgcttgctctgtttctctgtatttccagaaaatgcggtgataaagaagaaggttctggttcattggtgggtcggagaagagttcatagactcgtcgcagtgcggagatgacaaatctgttgagaaaatcgcgagtggcttcttcaaagagttcattgccaaaggcctaatcgagcccgtttacaaaaaacgtaggcccagcgccgatagctgcaaaatggaaccgtccgtacgatttgccgtgattatgatcgcggaaagagctggattcatcaagttcgacgctgataaaaacccaatggcgaatttctccggctctcacagagcttgcttagtaaaatccgaagacggctcttgtgttcaggagctgacgtacggatttcgttctaagcaagagagcgtacggacagtgttcaatgtgagtgagcatcgtcttgagtttaaaccagcttggttttcgaagatgaagtacgttcgggttcttcagctggggaggtgggagagctcagccaagcatttgattgaggttgaggacagtgaattcttaaaagagttaaaaaagatgaaacatcttaggtacctttgtctcagaggagtctctaagattacagagcttcctaattcgatctccaaactcgagaatttgaggatattgaatcttaacggttgtcacgattttcagaaactccctgaaggaataggctcgcttaagaagctgactcacctagacatgtacgagtgttacttgattagccatatgccaaagggactagcttccctatccgaactcagagtcctgaaaggctttgttattggtatgcaaagatctggtgatcagtactgtaagctggaggatttgaccaagttggaacatttggagaagttgagtatccatgtggataaaaattcagacacggtcaagagagagctcaactctttgaaaaactttgaaaagctcaagtctttatcaatatcatggtcaagaatctacaatgcgccaatcccttcaacttcaaggggtttgcttagaaggcttagcactcacaagaatacgcaaggcagcttgagaaaatcatcccctgctgaagcttcgactatccccacaaaagtggggaagttggatctccattacttccccgattctaagatatccgagtggttttcacttggggaacagaaggacttgaggaaactttatatcaggggaggagaagtttctaatctgaatgacccaaaattttgctgcgacactgttagatatttgcgcctcaaatttttgtctaaactggagatggattggcgagaaatgaaacaagtgtttccgaatttgacttacgtggagaaaagcgagtgtcctcaactcagtttgttcccttgcgatgagaatggaatctggaaaaatgaatcagctcaagtacgtaattaatcattatcaattcattttttcaagttttggtctaagtctctgtttgtcgtaatgtattcgtgatttatgtgttcaaaattttcttttatggtgtaactttaattatccatgtaatgttttagaatcagctttgtaactttaatttatgcatctaatccgccctatactttttatagccataataccgttaaccaaatgcagtgttcaaatgatattattatataatgtaatatttaaattaaataattatgttacgaacaataattaattgtgacaaattattaattttgtcaaattataacatgtattgtggagttacaaatgtgttgataataattataaaaagaagagttgcaaattaagaatgatgatcataaattgtgtaactctcctcttaatattatcactcttaa

SEQ ID NO: 381845 - DNA, 6142 bp, Cannabis indica
gaaagcttagtgaagtgaaatgattatgagattgcatgataatcagcacatgtgatttctgcaaaataatggaaaatttgatgatgccaatcttacctgaccatggacaagtttggccatttccttcagtccagtgacaaaagtttggaggcttgtgacatcctcatctccattgcttataccctgtgcatccacagagacacttccaaatgatgattgagaatcatttcttgacaaccttgtatttttagaatcaaaacttaaatgtgaaatcttctgtccaaaattctctggtctgccaggaaagcctttttcaaatccactaggtggggttctattcgttttatcaggagaggataagccagtcatcagattagctctacaactccggcttttagttaaactaaagcttctatagtttggcacatcagatgtaaagccattctgcatcagatccagttctctatctctgttaattgaatttgacatcacttcttgaccatttacatcgatattcccagccgatcttccttcatttccatcacttgctgaggcaagggattcggaactcttgtgcctacttgattcttccatctcgatacactgaacttccttgcagtagtcatcttgactatgactagaattagattgaacaaacttctttctaattgaaagttgtgaagaggcatcatcagataggtaatgatcattagtgtcatcctcaggatcctcaagattgctctcgctgtctccatcatcataacgaggattgttgtacctcctaacacgatttgaactgggatcaaccacatttgacgattctgatagtgaaccttcatcttcccattcatttgctgcttgtagtttaggatgaacatctttcttctaaaaagaaaagaagaaaacaagaattagagatgaagagtatttacaatatgttagttaaaataagcaaaatggtaagaacttgttgtacttggttagaattccgttcatctccaaccatctgtagtaaatcctttacacgtgattgtgccaaatcacgttgcttcgttagctctctgatttccttatccatctgcatttacaaatgtatacacaaatctattttcagaaataagataatactagatacttccatcagcacgagaccagagacgaaatgatcaccttctcaatctgaagatccttctttctaagtaacgctacataatcacaagccgaagaaggaggaggtccaggagttcttaactcactctccaatctagctagctctttctgtaaatgcttaaccaaggccttgtcagcatgactacattgacttgtgcttttgtagtcacttcttttgcacaacaagcaaacaaaagagtatttctagtttgctcgacatggcttctggcaggactcaatgtacaaatgatggcagttctagcattgccacccaaagacggctgcaatatgcgagttagcttagaatctctgtaattgatatgtccttgtcttcccttactgcacaaattaacatcataacatttatgaggctagaaacttattatgttacttagtttgtaaaaggagaccacaatagtttatgggaaaaggtttcaaccttagtttgcgaataacagttgaaagagttagtaaactacgattgatatggcaaccctcttttaatcttgtccccgcagacaatgcctgagatgcacgttcacttcccgccaaatcaacaaaactctgaaaaaacaaaaaaccaatgtcaagaattcattctcactaacttaagtttttgtagaagcaatctaaattatcaaccgcgaaacaaaagatccagaaaaaaaaataataccacactagcagccagggtagttgacttgtctttgcctaagaattcacgagcagaactttcaattccctgaaagaacaatcgtcgaaacaagaaccataaataaactataaataaccacatttgtagatggatgattttacagaagagaagatagttgcaggtataccaatctaataatttggtgtgatctagagcttttctcattcaataaggtctctcctatctgcctttgagctgcaacaataaaataggttacttaaaatagctaaaggacaacataatataatgaaaggaagggatttgtgaaatctataccttcacaaatcgaaagaagctcctttaaatggctccaatccctcagaatctcctctgtgagtttttccacaatagtccccctctgatgacaagcaaaaaaattgttagagctatgtatatacagatatcaagtgaaactccaaatgagaatataatcatactcacttctggatcatcgagcagtctgagcggagtattatccatgcttagaagatctctaacagcttcattgtagatttcaattgctgagaacttcaccacaaaagctctttcttcatgctgtaataatatacataacaaaatcactcattagatattgacaccattagaaaaagaagtatgaacaaagagttatggaaatccattaattgagttcttaattcttattaccctatgtatgtagtcaaatatttctgctactgtatactcagtcacaccattcatagtatacgttttcccgctacttgtttgtccataagcaaaaatacttgctgaaaaaagaagtaaaataaatgcatcttcataagtcattgtacagttggattaaagaatcataaagaaccaatgcagataccaatattagtacttacaattgataccattgacaactgaaagagcaatttcttttgctccttcttcatacacctcccttgtagagcagtcacctcgaaatactctgtctataaacgaaaaaaaaaaagtaagcaatcttaatatcactcattattctgtccatatttaggtgcatttatcttgaatgaaatttggaaattaaaccaataaagaaactgtaaaaatgttttaattggatagttcttaattctacagaacagttacaaagtcccttttctcttcaatcagatttgtaaatgaggtgtatcagatttgaacaagatgaccctttgagacaaagaacatttacataccgaaggaatatgcatttggaaatgttgacccctctcgcagggtattccggtataggacagtggtgtcattgatgcattcccaatctgctacctcatttgatgcaatctccttctcattcaaaggcctcaacctcaccaaaacaagaatcttctcctcacgcccacttgctccttgcattttctcccacttcataagctcttctcccccaattgctcccattatcgctaattaacccttcactgtgtgttaacaaaaactctaattatcaatttaatcaaattaagaacttctcaaagatgaaaagatgaaaagacaagtactactcacagtcactcttgttttccaaaagtgcaagatggttgaaaccttaagaaaaggtagaaattctaatttccaaaaggaatcaagcacttcactaccagatcatctgcaacaacaagtcaatcattgtaattaggcaaccacaccagaaaaaaaaaaacataaaagaacactaaactaattaagggtcaaatcagcaacaacaagctaaccacgtctttaatccaacaacctaaagataataatgagcataattcaactaacattaaaaaaataaaataaatattaaacaaaaatcaatttaaacatggctatattacgattaaaaacacttgagcaccttgcttattctttgaatccaagctagaatagcatgtaattgaaaacaatttttctctttctttctttctttctttccttctttagttttttgcttcaactgttaccaaaatgcaaatgacaaaactgaaaactttccttagtgccaaccgactatgcttgaagacgaagtaacagagtgtcatattattttcagtggccaatgcaattttggagctttttacagaaaaaaatggtcccaactcaccagaccatcgctttcaacttgacacctttcttactttctcccatacacacacaaacccacataaattatctatctacattttactaaagctaagaaacaagatgtagaaacacatagaaacctcacaaaaataaaaatgttacctttaatttcttttgtcactttcacaaaaccgttaaacaaaacacataaatccttgagggaatgtagcttaattccctgaatctactgctgaagatggtgtggtttctgaaaccttttacagatttactaacaaaaacccttcttttgtcttcttaattcttcttcttcttcacctctattcctctgcaacatacccaaaatgaagaaaatccaaagctttatatagagattgatcccagtttctgtaattaatacaaacccgattctcaagcattttaacgttgatactgaaacgaaaatgaacaagaaaaaaaaaaaaacgattccccaacggctctaattacttaaaaaactcagattttgtattaaaatctctgtttgagtagcaaaatttcaccaatgcaccttccattactactcaattctacttaatctgaaatcaatgagtaacggttacttaatatccttgtaccaaacttccctagaaagccaaaaaaaaactgaatttcccagatgaggaaaatgcataatcggaaaaagggtattatttctctgattaacgaagcaaactagcttatacaagctggaagactcaccaaaaagaagaagaagaatcgtgaaaatgtcacttccctataaatagctataaagctccaaaatttccgaagccgaaattgtttaattagcaaaaagataatatttttttatcttaaaaaaaaataaaagaaaaaaacagttctttacgcgtccgaataaagtaagaaagacccaaacacagagaagaagaagaaaactgaggaagaagaaaaattgtatacaacagtgaaaaacggcgtcgtttcacctaccctacccacgatctccaaaaacacgtcaaccgttgcttctacctgaaaacctctctctctctctactttctctctctaaactatacgtgggattggaccaaaagggtcctgcaaatctggttggagcgtcaacgtcgttgaagtttctccagctccggtgctaagaagaacattacgaaattaccattttaccctttctttcggttcatgaaaccggggttattgtgtcacgtgcaaaagggcaaaagaggaaaagaataaaatataggcgaggaggttgagtttgagctttggattgggccacgtggcacgtgggagatactgatgcttatgtcgttacgttcgagaattttaaccgttggatcgggttggaccaccgttcgatcgagaagaaagaagatccgacggttgatattgcagaggctctcgggtcaactgtcggatttttaccatggactgcggtcgatttaataaattcatatgtgtgtttattttattttattttattttatttatttaatgttataataaatttcatgtgaaataacactaaataatcttactttggcagagaaaaaagaagcaacgaatctgtctttttcttcctttttcctaatatggattagaatataatacaacttaattaattaattattttgtaccttcaagattagagaacaaaatttattattaaacttggagattcatcatgtttaaaattggaaattaacacaaaattggtatcttttaattaacaatgtagaataaaatatagtttatcatgattttattttattttattttatttttaaatttctaatgcatatatatatatcatgattgtgtgataattatatgaataagatttgattcattgattgtacataaaatgttgaaattttagttttatttatttgaataaaaataacataaacttaggttttttaaaaataaataaataaataataataacctacaataacttagtattgagtattgatatgaatgaatgaaatcattgtactctaaaaaaaattaaaatttaatgcataatgacatacatttataggggtactattttttttttattatattagtgaatacttatctattttcactttaaaagcttttatatcatagtgtataatatataat

SEQ ID NO: 381846 - DNA, 6624 bp, Cannabis indica
tttttaaaaaaatttataaatttcttttaatattttcatgaattataatacataaaaatacagacggttattaaacgttgcaattactgttacattatattacgttgcttcaacatgaaaaacaatattattttatatcaagcttatcaaatcaactctctttaaatgccaaaataaataaaaagcctatcaaatcaatgggaaatgtagtatagactcaccttaaacaatttatgatttttttccctctcatattttggtattattaatagtaataaacatagttgatttgataagctttttatttatataataaacttttaaatcttatcatcttaatctattcataattttctaaaaatccattttttttaacatataatgtatatatatatgtatgttaaaattaggtacaaaatgccaacaaaaaatggttctcttctctcttttatacatgatataaatatagatagataaacagttcaactccatattatcataaaagaaaaggaaagaaggaaaaaacattaaccaactttcaagaaggcctcatcaaaatatatacatatacatatatatatatatatatatatgccaagatgatacctcttgagaataatactaacaaccccaaaaaacgaagaaagagaatccatggaattataagagcttcatcaaacaagttctttttcctttttgttccatctgatcttgtgaatgtcaatattccatttcaaaattctcaatctaagaaaagtgttccatctgcttagtaatataataaaaatcactctattattaaaatttacaaagaaacatatcaaataagataaagagaggttgaaatttgagtttcattttttaccttccaaagaccatcgttaagataatgcatgttgtccactccaatgcccttgttgattgcctttctgtaaatgaaaaaaataatatgcgacgaaatgaaactatagcatagcaacatttcacaaggttggtcagttaaaatgatttaacagcccatatatccggtcgagattaacttacatatcctttgcagacattttcgtaaaaccgattgcaagagcatgctgctttccttcagccattatggcctgagagtattaagatttaaggtaagaacctcagacttcaaaaatttatcagaacatggaaatattcgcaatgttaaaatagcgaataattatgtaaaattcataccacaggagtttctgaaccgacttcttcatccagaacacccccaggagatgtaagaccaggacacataatgtttgcaccagctagaacaaattttattgctcccctatcaacttgtaattttttcattatatttggatctgcagaataaataataggaaagcatagcatgaatcttctgataggcaccaacaaaaagaaatagatcttggagtgtcccttctgaaaaacatctatggattttgggggtatatctcttgtttttctcatttatctactggagtgggttgtttctgggtgttcgacaggggcaagacaaggcattttgggcaaaaatcagtggccctctttcaacttgttttgtacacccagagagcaaatattaatttgctcagctggttttttgatcgaggtagactcgcgagcagtggcgtctttctcatgactcgaacacctagcatttgttggcttggttctttgacaaggggtgagcacgggatgcacctactgctgttacaagttgatctccatcaccttgaggacaaggtgattttcgggcggccggtattgataagcattgggatattaaataaaaagggcataagtgtaattgtaataggggtattgttattatatataggactcaatagtgaaggaaaaagggtgtgaatgattttagttaaatgagccttttgctcttgggagagagctgggtctctcgaatacccagcaagcttgttatctttgtcactgtaacatcaatataatagctattataattctctttgctactgtttggctatcttgcctttgatttgccactgtttacacactaaatggtaggaaatccctatcatcttcttctggggttttgaaatcaagtggagaattccagtaataagaaataagaatgaaatatatagggaaagaaagaaaaaaaaaggctttattatcatatctagaggaatgggagtcatttgtatggtaatgattctcatacacttgttacctgattaagtttcctaattatgtaaaggagataaaataaaacgattctgatttactttttaacacagcttattgtctgcattgaaaatttccctctcaatagtaaagctaaactcaatcaataacaaagcataaactctttccatatttttgccaaactctcaaagatcccataattttttcaagtaaaggctttaattatgtgcaaaaagtaacaccccaatatgtatttaagctacaaacagaaaaacaggaatttcaggaacaccccactattaaatgaaaatcaaactgaaaaaagaccaagatccaatacagataaaactgactacacattaaatttaaattaaatgctctaacatttgtctctagcctcaggggctggtttgagaaaatctacacgaaagtccatttcaaattggggcaaagttagattctatctcttctgcctatttggttaatttcacactctgtaccaaagttgtcattggttcgtgaataagagtaaggactttaataacccccttcccgctggactcaaatgcgaaaaatctacagactagccaaagactggtacttataatagaatcatttgccaaactgacccgtggaagtttcgttaaaaaaaacagcacgagtttcacagtgtcaccaatttattaggaagtatttattgtgtcatcattattttaatttattgttctgcaagcaggaaattcttacattgatgaagaagtcttaaggtcggcatataagggccgtcacgaatgttgaaaaacagtggaacattgtttaccacaaccaaatttagatggttttgactgcaaagttaagagggatgttagatgcaaaagaaagttcagactacaaagttctcttctctttgaatgaaaacaagcaaggagcaaccgagtgagtgtgacgaaccatttggtaacaatcagaggagatttcttcggaagcaaatcatccaacacaggttcaagtccaggatactgaaattgaaatcaactaagtgttaaaaaatctatatttactggaggggcagcaatgaaagcgaaaataaatacagacacatgaatcaaaacttatgtaatagtaatacttgtttgaacttaaataaactgacacagaaagttacctcttctgcaatactttgccgaattctgcgctgtacagatgccttcacctggttttgtgcagagacatcttcagaggaaaatctacaaacatcaaatagtaaaactatattaagcctcgagtttccaataataataataacttacttatggactacaattgcagaactaaacacaatactgaaacttctaaccactcaagacataaccaagtctaaacccaacttatgtttcattgggccattgttcagtataccctcatttttccatacctactatcaatttgtggcaataacttgccaccccactcaaaaatttcagtccaaaggctgtgtccatcggactcatatatatatacgggaagcttcttaggtgtgggcatcacttttactctcccgtatgagtgttttctgtttttagtacctataaacactatatttcaagttttttgaaacgacagtctacactatagttatagtaggcagccaccccatagatgaaaaataaatttcagaatcgttagttgtacccatattgcatcactatgatgtatacagtcatatacaaaaaaaattagaatttctttatataaagaaaataagaaatgcaccataataaaaagcaaaatgatgcccttatctaacaattttcacacacacatatatatatatatctaaaattacttactcatttggctttggctcaactagagcataatttagtgatggaaatttgacttgcggtggaaatttgacttgcggggacgtatacccactctgaatggagtggggattacatgtattaatgaataatgagacgggggtagggtgcaattttatatacctgaagtgagttcgtggcggggtcggaagtgatactacccacctcatatttgatctagatatatagttttcaaactttctatatggttttcttattattatgtattaaagttattagctatacttacaaacttgactattaatctttcctaatttattgtgtaataaaagttgtttaatagatagaatgtatgtttattttaaagtcaatgttttgttttctattttcattttgaattacattacagtattttcttattgttttaatcttaacgggtacctatacccaatgaggaacggaattgggagatgcatacccgcttattactcatccgattttcatctctaagcataaacatgaaaaccccaaaaaaaaattgaactaagggaacatattaattctgaattgcttactttcaaagacattgaaaaaaaaaatgaaaatcatcacaatccaacaaagcaaataaatagattaaatagaaagtggaaggaaagaaagaaatgcttactttttgaacattatttgtagatgtgatgtgaagaagagactactggaagatctttaaacgaaaacaagccaatacctaattcatataccataaaactattacataccaaaatatttttagagtttcaaatgattagacctaaggggagtcaaaacgaaatgaaatccaatgcttttatcttgatcctgatactaatattagatatcatcaatggagtctattacctaacattgcaaaaaatcattcatactatagaagaattcaacaggagagctaattttctctcaagttactttttttccttttcattaaattaaaactttttcacaaaatttgtgagtaaagacactagaaaaagggaaacaatttacaaaagttcttgatgatataaaacaacattaaaattgaactcaaatgctgacaataatgctaaagagatgcaaatgaacaaatcataattgttattaattggtaacttcaaattatcatcatctcttctccaatgaagaagcattgcctattttgattctccaattaaaacagcagataaaatttgaaaccaaccacaaattatctctccaatcaacaacacaacattgttttttctattctatgtaacttttcatcaattacattttatttaaagacaaatttcacaatgtcaccaaacacttcttcatcatcatcaacaccaaacagcttaaacacagtaatgaaataataacatatacacataggaacaaataccaatctaaaaactgtactatttaacagtataaactaattacgacagaaataaaactattatcaaaaagagagagaataggatgaataataacaaattcccatatcaatgcaaatgcaaaacaactctacacagcaaaacagagagaatcaaaacttgagaaaactaactcaaacaaccagacaaagtttctctccgatctccgatctgtaatccaatccaatgctccatatccaatacccgattttcaaatccaatgcttcatagattttctcgcatattaagttatttgacacatgtaacaacaaagttgacacaaaacttgtaacaatctagtttccagaacaaacaaggtacgggttgagaagggagattaaagttagataagcattgaatggggaatatagtgaatataccattaataagtaataaaaaacccacatctctaatgcagcacatagattaaatcaaacttggtactatgaaactgcaatgtaaaattcaatttctgctatgtctttaaacaactaaactccaaaacatttgtctactacaactgatttattataaacagcactttgttcaataccttcaagaacaagccctgctgctttcaaatgataacccttaggcgactgaagttctggactgaagagatagactagtcggtggtcggtggtcggtggtcggtggaacggcgacagagattgacagtgatgaagagaagaaaattttggtttaggtttgagttgaacggctgtaggagaacagaaagtgtaaggaaggattatacatatttaggtttacaaattattattattatttttttaataatagagagtaatttgcggcataacttttttaagtggtcaggcttttacgactaacttccaattttaaaattttagcggtaaaaccccctaaactcgtgttctgttagcagtttaatatttctatccatttttagctgttaattgccatggtaaaatgtctacgttaggggtgttcattggatcacatctaatgtttttaggcctatccagatccgatccaatcatatattggatgttagattttaccatccgatccgatccaattaatttcgccatccaatcgatccaacatccattggatgttggattggatcggttctatccattgga

SEQ ID NO: 381847 - DNA, 2450 bp, Cannabis indica
tttttcaattttgcatagctaactttgactgttttggggtaaagtgaagccattataccgtcggttttcttatgcctgacttggaccgtgtacacattggatgctgtattttgcactgcattgggatgtatagtaggctggtcattcgaagtaggggcaacagtaggtggattaactgtggtagcaactggtatagtatccgttgtaggaacattgtgtggctgaggagggatgggtgatgcagctggcatgcctactgtagcagtagggagttggacaggtatgatgttgacagaagagggcacgggttgaggagcaggtacaacagtaggtggtctatgtatgttggttactgtttgattggttatagggggaactattggaccaaaggttgtgatatgtgtgggaaaagataaagtacctgatgacagaggagtggactgagaattctgagatgcaaaggcagctttttgataaggaaaaattgcttcatcaaacaatacatcacgtgagatatagaccctaccttctttggataaacatttgtatcctttgtgagacaaactatatccaaggaagacacatggtgtggacctatagttcaatttaactttgttatatggcctaagattggggtaacataagcaaccaaagactcttagcatatgataatcaggtttgacattgaagagaacctctaaaggggtgctaagatttaattttggtgtaggcattctatttattaaaaagactgcagtgcgatatgcctcatcccaaaattttaaaggtagtgaagaatgagctaaaagtgttaacccactttccactatgtgtctatgtttgcgttcagccacaccattttgttcatgtgtgtgaggacaagacaacttatgaataatcccatgctcatttaagaggtttgtgaaggcttgatattccccaccccaatcagattgaagctttttaatcttataaccaagttgtaactcaacttgggctttaaaagtgataaaggttggtaaggcctcacatttggttctcaacatataaatccaggtgtgcctagaataagcatcaataaaactaatgtaatatttgtatccactagaagacacaataggagcagggccccatagatctgagtgcagcagttgtaaaggttcagtatattcagtagtagaattaggaaaaggaaatttatgatgtttgcctaaacaacaagcagcacaaagatcagaaaaattgacatcagttttattgcttattttgatattacaagatgacaaagcactttgtacaatcttggcagtgtgatgccctagtctattgtgccaaagagagaattgagaattgattggtggtatagttgtactattacattgatctttgaaattgaaaacagaagaagactcggatggtgagagagtacatctattggtagcaagattttgaagctggatataatcgaatttgtagagaccttggtcaagcctcccaaccagcaaggtcctctgactgacctgatctttgacacaacagtaagagggatgaaattcaaaataaacagagttatcttgggcaaattgggacacactaagtaaattcttggttatattaggcacatgcaacaagttgtttaatacaagttgttgagaatgaaaaggagaaaggataaaggatttaccaatattttggatgttaagaccagatccatctcccatatgtatttgttgatctcctgcataatcagatgagtagatcaaattttgaggattgggggtgagatgatgagtggcccctgaatccggataccagctgctatcttgaacaacatcaggagaagcataaagatgagagcattcagcaaggtttgcactgcctgagaatccttgaaatgtttctggaccagtgaaggttttatcaaacctatagaagcacttttggaccgtatgacccatttttccacataattgacactgagtcttttgtccccaagcagagtattgtcctctggtagccacatttggtcctttgctctgtggaaattggccacgaccaggatggggtccacgagtttgagcatggttgtgattggatgtaaaaccaggtggagggtgggttgcagcaaatgtaccaggtggtccatgttgtggataataacccctgaacatggcattatattgagaaggactggaagatgagtaatgaggatttgagaacatacctcgaccacctgtgtaaggcttggtgtgagccaaattggcttctggtttggccatatccagctcagtagaatctttttcaagtctgacttcttgagccatgagcaaagcctctatttttgcaactgtgtaagtatcaagtctggtatttaccgaggtcacaaacacattgaattcacttgaaagtccattaaagattgcctcaatatgatcttgagctgacattgg

SEQ ID NO: 381848 - DNA, 4438 bp, Cannabis indica
aaaaaacaaaaactcatcaaccagaacaagtagtactctgaaggttcaaatctcattgaaaaaataaagaattcaaaaaatgattccgaaatagaaaaacaaaaatggtacagatttccgaaatttcggtgtaggatgagatttgtacctgataatttcctagagtgtgagtcttgaaacctgctgcacaataatcaaaatagtactcccatgtcctaataaacttttcatcgaatccaagtgccatgatttcactgtgaaaattcactcaaattaatgtcttaacaccaaagtcaaattagattgaacttaaaatacatactcattactcatttactaacctttgcttatccaagaaacttttcctccaatacctcagtgtttggtagtaatgaattccaatattttcaatgtgctccacactggtgttccatttacaataattagtgataagaattaacaaaataattgtgtcatgtaatctttaccagagtctagatgcagcagccatggcagttgttactctacttaatgaaggtaaacatccaccaggaaaaatatactccttgataaagtctgaacttcttctgtactcgtcgtatcgttcatccggtattgatataaactgaaaacaaaaattgagaagagagcagattacaacaatgcttataattacctcaaaccattagaactataagattcattacctgcagaacaaggagtccattctctgctaatacagactcacaacaaccaaaaaagtcttccataaactcatgaccaacactttctaacatctcactacaaaaatacaacatttcaactcattaaattaaatcaaattcagaaagttattgtctgatcaaatgttgtttgacatgttacaataactcaccaagatatgattctgtcacatttatagccagcaggtaattgtcgatagtcacatagcagaaatttgatgttttcctgttagaaagtcattgttatatttctccctaaaaaaaatatcacttggataaaagttatataccaccaaccaatcccatacttaatcgatgtgggatcctaacaaaacatgaagtattcagataacaagatcaaagatcaaggttctgcagtaccttagatatcttcaatatataatgtgtgctataatatggaaatttgtttgttatatttagtacctgaagaccagcatctttcactttcttttgtgctaatttcagttgctcttctgatagagtgatgccggtgtacttgcacccggttcttttaacaacttcgatcgccaagcttccccaaccacacccaatttcaagaacttcatgattcttaccaattttagcctggaggaggataaaagagaaaagaatttcttacagagacgaaaatcgaaatgtaggcaaaatttgtatagaaagacactaaccttttcaattagaagagagatttttctcagttgtgcaaccttcaaatcttcatctattgactaaaacaattcataatagcaattagtacaagtttaacttccagctttactatcaaatcattaaggaattgtagttcttaccttaaatacagcagaggagtatgtcattgtctcatccaagaacagtgcaaacagttcattactctaaaaatacaccaagagacaaaaatagttagcttcttctagaatttcacattaatcattgagtttgttatcttattgagaggatcataaactctatttcagaaacatggtaccagatcataatggcgagagatgtttcttcgagcctgtgtaagagtattttgcctcgaaacatgctgaaagaaatactttgctgaggctatactagctgtgaacaacaatggagtccaccatccccttaagctaacaacaagacaattctagatgagttttgggaggtaataaaatagtatcaaacttatgctaataaatatattcttataaaactatatttaccctttattgtttagtttggaggctgaagagtttgaatctctactagcaataagaatctacaaaaccaaaagttagacaagaagttattgaacctaaaaagaaccaagaacatgttttgttagttttgcttaaaactcccatacaattcttatttcttaccaagaagagatttagtaaaccttcatctttgtcaacaaaagtaaaatctccattaatataagcatcagcaaggcctaaatcagcttgcgtcataacctgacaaataaaaaatgtaggcattttatagaacaaaaaattgtagcataaatactcaaagttttgattttgtaaccggtataaacctaatgattttttttagcagcataagtactaaatgttagaaaactacagagtccgttagtgtgttaaacacaaattctaaatcatcaggtctaagttacttcaaaattttctttcaatgaactcaaaaactaaatctggttacaaatttaagacactaataaagttcgtactgataaaacttaaagaaaattacaattttactaatattgagtatttatactgttaaaaaaatcattgaatctataccgctatttaccaatttttatattctagtaccatattttatcagtgtggggaaaaaaaatacataccttccagtaaaattgtggactgtgaactctgatagttgttttctgagaacattttttagtgtttccttcaaaagtgaacattgtacccccttcctccaatatacttttacacaaccaaataaccatacataaattatctcacatgaaacaaaatgttcacatagtataacatcaaacacttttttctttagaaaaatttcaacttcagaattgcaattacttacattaaacatcctgcagaaatgtattgtccaagaaatcgagtaacaaaaaggcgtgcccctctttcggttatagatggcaccatatgatttggattagtatgaaggtcacaattttttccaagtaaactgtatgcagcagccattccagcctgcaaagaaaacataattattcacaatttttttcataataaacattcttctctgtatttagtaagtacctttaatccatcctcatgaaatccataacctgaaaaaaaaaaacatatagtaaaaatactcacatagccaaaacttataacacaagtggaaatcttacttaccctgatatgcaccacaaaaccaaattcctctttttccttgaattcgatgaagctcgagtgaagctttcgatgcagcaacagatgggactggatgtccagttgaaaacttaagcagggtatgtttaggttgttgatctggattgagagttacaagaaaagggagacttgtttcaccaagattctgcatattcaaagattcaaaactttagaactcaaatcctttttcattgactaagattttcaaatttgatatgtgtactcacctgaagaacattaagccagtatgtcaaacatactttcttgtctctacttcctaagaaattccatgcactccatgctgctgagtttcggggcattaaagttttgtcacgatgaaggtaaatatcactgccagtagagaacagagtttccattcatttcactaaatataaagccaaattcatagtgactgatcagattcatatttgggtgtttttgagatgagaaaatacctataaacatattgaaaagcgccaagtactctgcgttcatcaggagtagcttgatctccaagtaatctcatagcatcaggagcatgaacagccaatatgcacttattatacacttctttagaaccatcttcagagtgaactatgcaacctgtttataattaacacttttaagataattagaaagtgtttatgttaaatgtgattagtcataattagttatgagtttttatattagttttgagtactaaccctcatcagtggttgaaaccatttgtacctttgaacatgtttttatttgacatcctttactctctagcacctctcttacctgtttttcatttttattttcttcaaaattaatcataataaataaataaacaccattaattattttgtttaataaaaaagttagtagttacttactttcttcacataacaatgtgaacgtcctttgacagtaagccattgaggacgaccaaatagcttcatttgccaaaaacaacaacaaacataatgtcaaaacaaaaacaaatataatataggaaattcttgtagtggaccccctaaaagttccttttggtagacttactatctgttttgacatttaagagagttttttagtctaattttttttctatgattgcacacgttgtagctatttaagattatttgtaaatattcaaaaaatttcgaataatttacaataccgaatataaaatttaaattaaaccgttatttactacgcatataagaaaaatagtcgcgcgtgcaacaaaat

SEQ ID NO: 381849 - DNA, 3318 bp, Cannabis indica
tgagcaggaaaacgtgattccccagcacatttcttgtcttcccaagcagtaggatcaatgttactcccaccaaaactagcagcctgtgtatacaaaattcacagttcacagttattaaatggagtgttctgttagcaaaataaactagtatgatcgcagaaacgacaatgaattatactgcagccataaaccaccatagatttatactgtgaaagtgttatttgtgaggattatattacacttagctactatatataaaagaaaggcaattaaatacttggtcaaaatcatatgttcacagcaaaatctaagtcaatacaaacctcaaaaactccatggagttggtgtgttgagtaattgtagaggaaaagaggtaaccctggtgttatagcacgaactgagtccctataacgaggaggcaaacctgtgtgaaacaaaatcaaataattattattagacaacaaaaaccaataattgaaatcaagattgaaactttaaaactattaaaacataccaaaaagctgtcttttgagattttcctgcatagtatcattgttgcagacaaagatgtacccaccaacggtttcatttctaggcagagactcagatggtggaagtgtcttaaacctcttatcagtaccagtcttaccttctttattatcattattactatcaccaccaccaccaccaccaccattgttgttgttattcttcttgttactgttctttttcccacttttaacaccaacatgatgatcatcattttcttatgatgactcttcaaacccaaattcatattcatattcatattcatacccatgttcatattcataccaatatcattataaatgttgtgattcaaagactttgaataaatccctttattaaaagctccattaaccccaatattcttctgaggaagaccaaacccattgaagtgctctgaattagcttttggcttataattgatgttgttgttgttgttgttagtgaacccattaaactcagacccattttgcttaaaactgttccaaccatcgttgttgaaaccagttgaaccagcagaaaaagaagacccatttagggttgatggagaattgagatcgccgccaaccctaatatcaaaattccttctttctccagtccttttagtagttccataagaggtaccccagatcgaatcgttgattgaaaaattggctaggtttgaagtctggtgacgaagctgatcactgaattgaagaaaggactggttattgttgttgttttccatctttaacgatgaaaattgagaagacccaactcgaattcagcgtcaaaatcgaaaattcgaatctgggtattgttgaaaattggaaaagattagatctttagtgagtttttgtgtaaaaatgttttggggaagaagaaagaggaggaggagaagagagtgagttattttgaaaatgggaaagatgaatgggattagggagtgtgttaaataaagggtttttttgatactaattaagaaagaaaaaaaaatgaaaaaggggaagaaatttcgaggaaggagaatgagaattgcgtgtggatttgtcaaaggaggattatgaaagttgtgatatttagtccaaattgtccctaaagtattaggttattaatgtttggtccctttgattgtttttactttacacttactcactaccgaacattctttaatcacatttgattaattatatttttatcttttgaattttgacatgtactaattatgaattattaaaattgttagatttaaggattttatctaattttagtaaaaaaaatctactatgaatcaaagtttagaggacatgatttggtatatgtcaacatttgaacagcataatgaaagtataatttagtacatgcacaattattgtattagtaaaattgaataaatttaacaaaaatctttaaatctaaccgtctcaatagttcaaagaaatttattaaagtttataagagaatttaaaatataacaataatataaatttttatatatttcaacaattactatgattatagtccataaattagtagtattgacaaatcaacttataaagttcaattttttcaatttacatgacttttaagctttgcagttgaaagagctacaacttgctaatgagaacttgatatacattaaagttaaaccataaactaatataataaaatactcatgttgcatgaaccttgcatgacatgtaactaagccttcaagttcttagcgagaagttgttcaagagcttatgttaatatagtttagagcttatgttaatatagtttccaatcacaatgtctcgagataatatcacaaataatagaagtgggcacgcgtaactaaagtaaatgtacatctctcaagggtgacagatgtatatgtccgttactaaaactctaacctaactttcccgtattagctgaaaggttgaagacaagtgcacactactcgagtgcttaacaaggcctcgtgcaaaaggtgtccaaatgtctaattatggttttaacgcgtgttctttatacttaattatgtttcttttcttgtcacgcgataaatcaaataaaagatatgagtaaccgtttttttcttaaaaatccctcttttaattatagaatgagccatgagttattcaaatgaattaattaatttttattatttttcttaaagaaatataaataaaggaaatgacttggttataactcttacttatttgaggagttatattcaaaggcatttcccaagaatattataaattaattttgagtagcaagcaaagcatagagttggctaactgagtcaatgcacttgactcggtcaaataacttattatattaaaatgctcttcatgtttcttcgcttaacaaatttttacacttcaaggggcttaattgcaaaaaccaagaaaaattagggaccaatttgaaataaatgaaataattaaggaaccaatcgtggcagataagatactattaagggggtgtttggaatggattaatgctaacaagggaaaggtaatgtgaaatattaccttgtttgttttgagtctttagccttggaatgttattcccttaatattataactacccttgaggagggtaatgttgatactttaaaaaaggtaggattgaatcattaccttctattatattaatttgaatagaatttttgaattaattaataaattaaataccaataatattatcatttattataataaaatattacagtatatattaagtttgtgtagatcggttttttttaaacttgtagttatttttataattattagtcaataa

SEQ ID NO: 381850 - DNA, 1601 bp, Cannabis indica
aaaatcatgtatcacacaaattaatttgattgtgttttgcagtttgaagattacattctagtaacaaaaacaccattggacaaaaatcatgtatcacacaaattatacagaacaaaacaatcctttgaccatacacaacaagagaaacagtattcctaaatttgattaaatcaaatagcagatcatagcaaatcatgggaaactagtctacaagagtataaaatgttgaagatatcatgtttctgtaaaaattcatttgtagcacattatctagtgaattaatctccaaattatcattatgtttttaaacattttactccaaagaacagataaatcctgtaattaagtctacaacaaccaccccataataaataaataaatagtccataataaaaaaagacatggcatgtcccacaacaacatcatcattctcgacaacaaaccaatttgcacccagaaaactgagcctgacacaaattaattttacgattttattactattttcagagcagagaaaaacccactaactaaaaatgaataattacatgaaatcttactgttgaagagcagaaatagcgttgtgaacttcaaaatcggaaggaacaggaccgagaccaaaataatcatcaacaaacccatatgaagtgtcttcgtctggatacccctcatccactgatacccaatccaactcatcagaatgaggccaagaagacgaagtgggcaagccatgaacggaagatacaggaacatttaacgaagcaaatggtgaagaagaggaagaagaagaagaagctggtgaaggggaagacagagatagcttcttctgggcatgcttagggttggtggtagtactagtagtagcagtagtagtactagaagaagaagaagaagaaatgggttctgggattgggccaccagcgatattagacctggtcacagctctgccaaatgaccttaccaaccttcctccagtaccaccaccgcccatgtttctaccgccgaacatgataaggtctctttgtctagataacttttgttcctacaatggaataataatatggaggaccatagtatagcatagcattaatattagattttcttttgcttcaagctttgtcttttgtttgtgtatgtgtgtgtgagtgattttctcgaggagattaaaatatagataggaataggatccagagttaccattggcatcattttttgttttctttctccatttaaagaaactaaaaggaaaatattatctagtttcaaaagaaaatatatgtgaatgaatctctagttgtttaacgtcttcgcgacacgtgtccgacacagccaaatttagtagggtggcgagtgccacacgtggtccaattgtgactgctgcattatctaattgacattgaattgatttattttattttattattttccaaagttattcttttttttacttgaaattctttttcttattaattttgaaatgagaaagttcattgtgaagattttataaaagggttatttacaaaaatatgggaaaatgaatatatgttttgatatatatggcataaaaacttaattaccctaaatatgttattttttaaaaaaaa

SEQ ID NO: 381851 - DNA, 6895 bp, Cannabis indica
aggtcaatagatcttaattttgaaatggttaggttattgcttaaatgtgttatttgtgttctttgagtttttttgctaaagctaaccaattggatcagcacaatacttacatcttaagaacatggtagtacaattgaatgggagcgttaatcataaatatagaatctatagcttttataaattttagaagtgaaacgacgatttcctttgagcttggcttaacgcgataaatgattgagacctcatttcagtaaaatacatttacacttagttaagtattttaagaataaaatacattgaagggtagaacaataaatttgtccctactcgatgtagatcatctatagaggattattgtttatttagttataacaatggataattaataacatatctatatcttgaaacatatagagtattctatataattaagagtgcaattccgaatatatagtggagtcagaaagaattaataagttagagaatttacttggtaaattcttgatctacttattggaagcttgattatataagcccattgtccccacactagttgagataatactgcttctagactcagttgattggttttaattaatcaattataactttaaattagactatgtctaaattatgaatttttactaagcaatagctttattgtgaaaaaagaggttttaggatttatttgttaattaagagactttataaggtctaattaataaataagttaaatgacaattttatttgataattaattataattattaaataaatagttgacatttatatgattgaaattgaaaaatatggcattagtgaaagaaaagataaattgttgaataaaatagcaaaattgtaactagtgaggcccactatgtatggtcggccacttaagctattttaagccattattttatcttttttattccatataatttaaatcataaaccctagttgaaatactataaaaagaataagatgactctcattctcatttaactctaataacctaatttttattttttgtcaaacaactaaaaattgagagcctccttctatagcaattttgaattcccctcttcttcttcttcatcaatttcgagccattagtgatagagtacatgccaactcatattaagtcaagtactcaatcatagtgtgaaagattgtgaaggatccaacacctgaaggagagaaaatccaggttcagatcttgttattactctacgacagaaaggaataagggttaaagatctaaatgaaaggagccataacattccactgctatcaatgtaaggatttcttaatctcttatgtgtttatttcattgtattatgaaattcatatttagggtgttagattatagaattataatcaacatacatgttagtaaatctagatcctagtcaaataacttccaaaactgtacatatctcttcactcaaggccaagagagtagaatgtgtggcgaaacgaggtttgtactcccgcatgggcttgcccccaatttctgccttctttctgccatgggagttaccttgtgttccctccaatgtttggctcttttgcctctgtttgaacctccttttcccccattactctacgctcccgtgttaggggttggagagtctaacgacttattctttttgttttttgagcccttagcttgagtgatagcttcttctagcttgatagattcgtcttctctattaagaaaatcattcatagtgtatactgacttgagatgaaggttagaccatagaggactcatctccttgagtctggttgcaagtgtcattactcgtgcgtccatgctaagtatttttgtcttagcgactgtctataagaaccgttgaatatagtccttgagggattcatcttcttgttgtttcacatctaccaaataattgagttcgatttggcactatcgagaaggagcaaattgatttctaaaagcatctactagttccttccatgaatcgatagatccaggaggaagcttgagataccatcgccgagctaggcctgtcagtgtggtggggaaaattctgcattggacgtcgtctcttactccttgcagatcggtctgcacttcgaagtaatgaatgtgagacagcatgtcttctttctcggtgtactaatgccaggaaggattcttgaacttgggaggaattggcagagctttgatttggtccaagagcggtgagcgtcgctctctgttcagttcgaactttgacagctttgaggtcgtgattcctttcaccaaggccattaggtttttaaactctgtccttttgacaccatgggtggtggtctgcatcccagttgaaacttctattacccgattagggtcccctctagaagctcccgtttccaccaaccatcttctggttagagtatcacgctggtcttttggtcttccaagtcgatcatgaactcctctcaacttatatctagttgatgtctcctaatcacgaggttgtgaaggcaacattggtaattttttcagaatgaagtctagatcgtcttgggatgatgcgatgcgggagctgtcattcggaacattgtagtgactatttccctcgaaatagtcttcagtaggatcacaagtgcgaagagagttgaactggttgctcaagttcaacccttctccatgtactccagggaagtactcatattgctggtcatcggggcagtgggcaaagtaatgacacaactcacctctctcatctcgcaaatacttctgagtatgaagtaatttgttagtccttacttgtcggatctcataacctccggtttcaaagtagagtctatgactttccccttcaatgtgagtagtaggtccctttccttttgcaggatctcaaggcctggtgcaattagaacgacggaaaaaacctggtggaggagttttgttggttctctcagtagttcgtgattgttcacattaggtggagggcccattggttggcgcggtcgagtgtgagcccttctggacccttgctcaaagttcgcttccctctggggagtctcaatacctgttgtttgcttagtacttgcacggttaccagacatggcagtgcattaagggtttccccttgtgtacttgttcccacgtggccagttggccaatggggcatctcttcagcctaatgaaaaagaccccttcgaggggtagtcccgcgattggagtgataagtttctctgattcgttgagacaagttggcccttcgttgttcctgctcaactctttgattctcaatgttccgtcagttctccatgcaccgactttaaaactgttcgtgttgtttgtcgagagaatctcatagttgttgttgtaggtcagctacagtttggctaagatgttcaactcgaggattggcgttctcggggtcttctaattccacatgagcatttggtggccttatgagacaagctttgctagttctgaagcctccatctgacatttgagatgcaagtatagtcccatcaccagttccagtgaccggcgtacctttagtttgttggccaattgttgtgaatcttctcttgtaactaattctttgagttgtgattatcaataaaagcactaaaatataaacgcaaaaataacaacaatataaaatataaaggagaatatgagaatatcaacaaagaaatcacatgttatatatttattttgccaaaagaaaaaaattgagtgttgctaacctaacactattgtgggtaacgccttgcaatttgctaaacaccactaatgcttttaatgcctttgagcatattcctaaaaaaaaaaaaaaatacatcaaaacaccccaagttacttatgactacaacaataacaataggtgaaatgacaatataaacaacatacaacattataaacaaaatattaggataacttttgtcataagagagcacattatggatataaatactacagtctagaagtttacaaagcaaaatattttaaaatcccatttgccaaagcgaaaaatctaaatttacagtacacatggaaaatgatatttttgcattaaaactaaaacagaagtagagagagaaactactattcctatttaactccaattatggacataagaaactggagtttgctgtcaacttgagccatatcagtgttttcctcaaaggatgcagggggctctacgccggtgaagatgtagagagctctaacttcttctatacttgacttttggggtgtgcctttgtatccaactatacctcttacagcttcaatctgttcccacaccttctcctcatcaatattagaaacctgcatcaccaatcacaagaaccaaaatgataagtacaaccctgtaacttgtttggatgaccccatttgatgaaaaagacaaaaaaaagattttttcttagtgacatgtgataaaaataagattactggtttatgttttaggaaatttgtatgatcaccgactgatttagccgttttattgcttatggaccataagtttgtggtgtagtccagcatgatgatttgagttgacatctcaaaatcttcataattcaactcaccataatttggatagtaaaaggagttttttgctccataggagtagacaaagccacaagggcattggcattaacagtgtcatctccagtacttgaattataaggggagtctatccaagttgagatgctgagcataaaatgcagcatcattgttgggtttttgatatggataatatggaacagtccatgatggaattcatcttcatgttttgtgaacttaacattggtctatttttgtgtctattcgtattccacttttcttggaagagttatcttactctcaaacaagcatgttttcaacctcattattatttttaatcttttgtagatgaccgagctggctagctgaacttaatccataaatatcacacatatgaacatacttattaactatacatatagatgataaatgtgcatcaacaagattattaagacaaaagctagcatcatataaaagagctaggattataataataaaattataaaattttcagttaagtccgtctaggaggaaccttctgctgctgctgctcttgtggcttctttttcacattcttcttcttctttgcctaaacatattatgagatgaaagtagtaaagtaatggccattcaattaatgtaagtagattcatcttagaatcatagtaaccaaaaaaaaaaagatcaagtcctgacctcactcgaagggacacttttgactcctttttcagaagtgcttccagcatctttaacctcagccccacttgaaacaggaagctcaccagttttaacccccttggaagttgaagaatcttcatatttacataaaaggaaaaagaaaacaaaacaaaaattactaatcaaataaccaaaaagaaacaaattaagtgtcaaattcccatcatcaccattttatttatgaggctttaccttgagaagatttttggtcatcagcttttccttcatccctgatttgttccagcaaagtccttgtctcttttgtcaaatcctcttctctttcttcactctctttttcttcaatcacagcagtaaatacatcatcaacagttgaaattccactcccatcatcagcctcagtcaaattcaaaaccacaacttcctctactttgactggctcttccttcctctcatttttactttctaccatcaacttttcctctgctttttccttccccaaatctttctcatagccattttcttctataggaatctctactgcatttcctttaactccttccccataatcagccccttcaatttcatcattactactagccctctcatcttccaattcaattctcgatttaacccctctttgtatatcctttctttcctcatcttcctctttttgcatgtcactatagtaatcttcttctccatttctataaggcatagggagaagcttattcatgaacttttcagtacaagcatagctagccaagaaaatcccagatgggactgaaacaacaaacccaattgcagaaatcaccacaagtggtggaagaaccaaaggtgcagaagacattacaaacccagtgataagtattttcttcccaattcccaaacccttgctcaaaatccaactcattttccattcattactatcttcatcattggatggataatccacaatttcccactcctcattgtgattctccatcctataaatataatgaaaaaaaaatcaaattacttttttataactctttttttaaaaaaaaaatcaacaaaggtagaagcttgatcaaaatcaaaattaaaaacacttaccttgtatgtggtagtctaatctaatactagtattaatttattttggagtagatagagctagctagccaaagcaaacctcaagctgaagtaaaaaacccatgatgggttttgtttgagctcataaaaggatgaagacaattattaagaaggaatcttatttgacacgtgctgggacgagggcatgacagttgcagaacaagcagaatacaaagctataaattatcatttttaatgaaaaaaaatggcttttgctaagggaaaaaaaacaattgttgtgcatgcaaatggatacggttttggtttgatcagtcacgcatttcaacgtggctgcaacacataacaccacctcttgtgagcttctgctacggtgcattgtgaggatgacacccagatcttctttgtattgctacgaatgttagacttttatttgggcttacattaaattttattggttttattaaaacttgggttgattggatagttctttgctgtgttagcccatgttgttggtgatcaattgttaatgggcttagcatctgtgtgtaaagtctaggtgaagcagaagtgtgg

SEQ ID NO: 381852 - DNA, 1171 bp, Cannabis indica
gggactactgactgtcacattgccctactaatccatcactgaatcatgtggtcacactatctatatgcttcatggtaggttccttcaaaaaaagcttcattaattggacactatgaatatatcaagtccccaatttacttgtgtagtctcatgcctacatagtatacataagtatgccattttggcttgcacgctttttgaaagagaagttacctatcttaagattgctaaaggtcaagtacacttaaattttgagttcgtaagtgatgtgctatcaaaaaaatacatcttattagtataaatagtgcccattatatagtcttaaaatctcatacttaaccttctccgagtaatataaattcacaaagcttaataaaaatttgccttatgaaatattgccaactctgagtgtcagtataaaaaccataatagcttcccacttatattcccaagtcaatctaaaatagtaacatatattatatgaaaaaggattagttaattactaattataagcgcaaaattaggaaattataataataatatatctcatacatacttatatttaaaataatgttatgactttcctttatgtaataggcatgccaaagcttgtcaacactccttgtcccacaaagagactacactaacatttatttaattggtagattttatatatacataataatctctaagctaaagacaaataataatcactttaattactctttctttaatagttagtttatttttaatttcgggaatataataataataataataaaaaaaaaatcattggattgcatatataatacatgattatatcataaacttgtgtgtagaaaaatacaaaaaataaaaaagtaataagttcacatgaacttctttaataatttcttacatatcagaaattaaattaattacatataaaagtttcactaaattttgcatgcttttttgaaacactcaaaaacaacttttacttttgtaaaaaatcaaccttcttcagctttagacaataaaacagctgcaaaatttgaaagccttcattcatttttcctctagggtttaccaaagcttttcttggtacatttttaaattttaaaaagagtgtaacaacataataaaatatatatctttatatattaaaagtgcctatctaacggcatttctt

SEQ ID NO: 381853 - DNA, 3098 bp, Cannabis indica
tttttcttagcgtgatgccttcctggaactggagaggtctagattaggatgtaagcagcctgtattccagagggacttgaggcccatctcttcacgtggatccagtctgttactgttgtgaaaattaatatacgtaagtatacacagtcacacaagtaatagagtgataaataagatcgtctccacaggaattgcaaacaaacttgatgtaaaaccaactaattacaacttaaagtaaaaggaagaatatgagaatggttgagcaatgattcaaatttaaaaggactgtaattaaacttgcttaaaataaagctaatattactagaaaattgcctccaagaaatgtaatatattaaaaagtgacttgaataactaatccccctagtcaggattttttcaattgctacaggaatgctacagcataacttcagtattttcgcacaaagataacataattttcttatgtttatgagaatttttcagaattcacaaattaagttctaccacttagattgatatattcctatatcaaaccaaattgcagaacaacatttaaaaatcaattctcaagttatgcaaggtaaatgaaatattcctattccatttactaagaaaaacctaaatttaagaattcacttgcttcatccaagttataactacttgatctagtctttccaaactagatctagcttagtaaattgttactcatagccaatatataacaatcaataaacagcaagcttacttgaatgaacaaaggcaaagttgctaaaatatgcttaaatttaatcataccaaatataggggttcatagccattcaagcctcaaaaagtttagctcatgttcaaaccaaaaaatcaaatccaaaataaagtgtgttctttcatggctgctacttagtctttacaatttcaaaaaaaaaaaaaaacttcaagtatttaaaggaatgaggaaaatagaagaaagataatagaaattcaaacaaataaagtttgtttcctccttctttttcggataattttctctttcagtcacttcctttttggtatttttttcttctgcatttaattttctctaaaaatggtagctgatctcattgtgaagaaggtggctgtacttggttaaaaatggtaggtaattagggtacaatgtaataccctaaaatagaagctcattcctttccaatcttggcccactaggttttgtctcctccctccataacagccagttggcatgattttaagtggctgctacataagtgctgatgtggatggatgaaatttgttttgcaactttttccacgtcactgcccagactgtccataatgttgaacctgttttagcaatgctttagcaattcagtccagtttcagcttctattttcactttgtccttgcatcctttcgttttccctagcagttcagttcttcattctcagctgcaaacaagcaacatttaattaaataaacacaactaaaaataataatttttacaagacttaaaagctagcttactaaatagaaaatgaagataaaaactaattaaaattaagcaaacaaacacactttcattactcttttcatgataatttcagtttaaaggcattaaaaataactctatatggcctgtgtttgggtttcagttgactacctttgacttacgtgccctcattctagaaacatcgataatttatttgtgttcttaaattttatttgatatacgaatatatttaattagattgtaaagttatatttatgagctttagaaaaatctcatgaaaaaactgagaattctaattaacactgtgttagagagtcacgttttatatggtttagaatgttaatatcggtgcaacatagttagacattagcagtattgggaaattagcgggaattgttaatgaccaaattgcccttggtagccttttaacctttgaattaggtgtgagggcgaaatggtcattatgttagaagagtcttttgtcttttatgagcttaagaaatctaatttttcccttgagttagattttattaattaagaattgatatttatcttgaaaagttagaaaagagtaagttagaaggaagcacatctatcttctcttcttctctctctcaaattgtgtagaagcaagttagggtttgattatttctcagatcattttagagaattacttcaggattgtgtgtgttaattcaaggaatccctccttagccactccttctttgtttttcttagagttcaagttaggttttagtatgaaattttagaattgagttgctttttgttttaggactgtttaattatgtattttgaagttaggttgtgatcatttatgttattttaagctgaattaggggagtgttgtgttgtttgagccaatttagagtttgagaacttaacttgaagctctaatggtgtttttgaattctgagttattggtgagttatgttgcttgatttgagtttattggagtatataaaggtgttctggagatttttgtgaagtttggggttgaattgtgcagttggggacatttttggtggttcctgcactgaatcagtcaaccggttcaagggaacctgtagcaaccggtcgaccagttggtccccaagaaaaccccatcaaactggaattccggttggggaaccggtctaccggttgggacagttttagaaaccctagtttttcccgttattgtgatatttagggtattgccatattattcatcaatagggatatttctagttttgattttaagtccccgggaagtgttttagcgtgtctctcatcagatttatgaatgttgtattatagggccctgtcaaacgtgaagtttttgttccactcaggctgaccggtacacctgagcacggaaacgaggtaagatatcataaagtatatatatgtgaatgtatgcatgttattaattgtttacactactaatactaacgaaaatataattttaatgttggtacagtgtagggttttagggtagttacagtgttaccaacacgagtaccacgggatacgtcgtgcatgtggtacaacacttagtaactctcgaaagtacaataatggtgttggaaattatttta

SEQ ID NO: 381854 - DNA, 1915 bp, Cannabis indica
cccgaccatgcccaacccgacaatacccgacccgaaacccgacatacccatacacccgaaaatcaggttcggttatgcattttcaagacccgaaatccaaaaatccgaacccgaccccccgaaaacccgaaaacccgacccgtgtgcacccctaattttatctctcccccatgtttctccttagcatgaagaacctcgttaaagtcacccccaatcagccacggaccaccaacatcttcactcagtcgatgaagtaaagcctagaaactgtgccattggtttttcacagggtccccataaacccctgtaaaattccatatcctcgactccaaatcacaaaccgccatatgaatatggaatttagagtgagaaagaattttaacctttaatccttcctcccacatcagcattaaaccgccactaagccccaccctctccactatgaaaaatctatcaaatcccagtttataaactactccctccgcttggttattcattaatttagactccgaaatgaacaccaaactcggctttaactccaacactctcgcttggagtgaactgaatgtctcaaggttgccgagaccttggacattccaccacagaattaacattacgatcggcgaccttgtcttgcaaggtgcgctgctttctcatcattgcctaagactgttaaatcatcaaggttagaaattttagtcttaccttcaccattcttctcctgggccgaagtaacgtcctccccttttgtcgaattcgcccctgcttttgagctttgattctggccatctccttagccgaacaatgtttcctccctttgggctccttccttggcctttcctttcccccattccatcctctaacaaacccccttccattctcaatagttttcaagggttgctctgcactaattctctcatgttcaatttctcgattagctctcttgccctctggcaccacatcaatgtccatctcactaatctcatctctttattctgttgtcttttttggaactgtttgtctttcccccgttttaactccttcctaaccttccctggctctgacccccttgctgctcgtccctccactctctcactttttaaataaccactcccctttccttcttggctattaccaggcataacactttcagaaccacagttaagagaaaaacccccaaccatattcgtatccttatttgtatgtaaacgaggacacgtcattcccccaactttccttcctgaacgacctagtgtttatctattcccatattaccctggaaaaattgatttttatcaacttggctgacctggcaccccttttgatgactaggcaccacttcaacaacattcttttattcccttggtccactgaacttccccattggttaaggttgactccccacttttcttgtcttctcctagaattacctttccttcgtaacaacctcgaatctcaccaacttttcctacctcagccgactgcaatcctgtctactctttaggtgttttttcctttaccttttcttccaaaacacaatgggtaatagggcattatccattgttacctttggtttgggaccttctcatgttcctgttgccctcaacctcccatggtcaattcttggtactgggagacgttaaggttttgaagcaattcatgaccttgctatcctcttttaaccaatttccgtagtacgacaccataactcccgagctatgtttagtcttgacctcctcctcctcgaagtccacttgttcatggccaaagaaaccacatttaaaacagatcatgggtagtgtttcaaacttgaattagatccacaagttagtaccttcactaagtatgtatcttcccataaaggtgttgggttttatgccctaaataaaactctgtttcaatgtaatccagatta

SEQ ID NO: 381855 - DNA, 4186 bp, Cannabis indica
catattcaaagtatagcaatcaactctgcacccagagatttttataagccttgaaacaccaaataataaacaccacaatttctctaatattaattggcgaatttgatttttctatgtatttagtaaaacactgtccagcaggcagcaacaacaggatcataagccaaattattaagaccaaaaccatctttattgataataattagacactcactcagataaaccattactcaacaagcatgcagtcatgtgtattttctaaaatatgcaaacacccttagatgaaatcactagcaaaagaagagagatttgcaatacttacattgagcttgttttagtttcttgtcaaaatgatccccaacaactgatgtttgtctttttttacttgtatccaaagctgcagtaattgttgtatcatttgggtttacagctacaccttcaaaattatcccccatatcttcacaatggctatgcatattccaattttttcaatgagaaactccaaccttctacaataacaaaagcaaatcataaattagctctaaagagtaaaagtggtaatgtttgatgacaatctcagtggaaaactggaaagcgagaccaaaacaccagaaaatgaattgtctaataattattatacttggggaaaagttaccacaaaaagatttttaacaaacagtttgagcagactcactcactctctctcatttcatttttcatttttcttttcttcttccttttcagtttatttatgccctaaaacaaaagagcaccaaaatgaaaaataacattgcaaaattaaaaggcatataaaaatcttacgttgtagtagacttgagcgaaggccggagattctgtccgggaaagaattgaatgcaggcagaaattgattatacaaagaagactgcaaaagaatatgaaagaaaaggggagaatggaagaaggggaatgcgtagggaaatggatattttgggtattaatgggtcaggcccattatcggcccattttcttctaaagttctaaaagtagagaacattgtcggtattcttcactggtgagcaggagcacttaattttcttgttcattaaaatacattcttttaatttggtatttaatttcattatgatatttgaattgtttgatccttgaaattattaaagagatcattcagcatatttgataacaaactagaagtaacaagcttattttttgtttcaatatttgataaattttcttcaaatgagtcttcatttttcagtacgtctacctattagtatatattaagaaacacacaaaaatgtccttttggtttttctatttctatttttggtgggtgcacttttttttgtcagttttccaaaactctggtctcggggatatattctatattttcatgaacaaagggctcgaatggatatgtgaaaataggtgtatttttcaataattatctgtactggtgcttaagcaatcgataaaacttagccatatatccctccaaaaatggatatacattgaaaccgaaggttctgataaaggtctctctagctgttcaacttcaagctctttaagtcctcatcaggtcccaagtaaaatagtccaaacttacataatacacacattatatattacatatatatatataggactatatatataatcctcaatggtatccaactggagctggagattctttcaattcttttccctgaaaatgaatatcctgcataacaaaaaccccaacacccacaatcaattttccacacagaaaatttttaaaccagatagagattctcaatgaaagagaattttagtataaacttatcaatggttgcataatacttactgatgcaaaatggttgacatcacggtggtgagcttcatctgcacgaataacagtaatgacatctttaagggttgcatcctttggtaatctccagtagtcgattgcaatggcaggagccgaaacattttcgatcctaccttcattcagatcttttaagtattctgtataagaatgtatagcctcttcttccaagtaaccaacaactctatgagctagctttggtgatagtacataaagcacaaagtaagcattgaagaacactccctgaacggctagaaccagtagtctctcgtaccatttgggttgaactaattccaccattgtcattagatgcattctctcgttctctgcttcttcaagcaaggccttgatccaaccaccgctttgctcgaacttgcggagtgacctcaagtgaaggaggacgcctcctaccataccagggacggctgcaacagtttccaacatcattgctcgacatccatatcgtctctgcaagatatagtattcattatttcttttacttaacaatgaacaatcaagaacagagttaaactcggacatttactgaactagaggacacatacatctatattctatagtatgtaatcattcaaagtgaaaaacctcaccagagatcataaagaaaagatggcatttgataaaggtgttcttaaaacactatctattactgggctagcataatagcatgtcagtaacaaaacattgcaactctctttaactcagctcagataccaaaaaaaaaggcatttttatttgagaaaagctgaaagggtatccaacaccacaaagaggtctcatattcatattggtgtaactcaatatctggtgtaactcagttctatcttcacagaatcacattcgacacttatcaactaaacatactttaaaatcatattccataaattccctgacatgaattatttactctaaatatcaattcaaaaatcttcagcaaagtccctttcagtttgctatatagaaatgatttttattttcttttctaaattaagaattgagaatctaggttccaatttcaatcaatatatatatatattaaatatagagaacagaacaatttgactgagataagagatgaaaccttgaagaacaaatccgttggaatcctcaggagtttgactgtcctataagcgaccttatcggcaaacgtttttggcacatgatgtttgctcaaatcaatcgataaatctgcagcataagtctcccatggctaaaaaaaaaaaaatcaactcaaattccacacttcaatcgaacaaatcataaaagaaatacacaattgaaaacgatcgaattttaccataaagcaattccatggccactcggtcccatcttcccgagtaatcctctgtctcgggaccccccaataactcgaaaccatagcgttgctttgatccttcttcactttaagctcattcttctcctccgtcaacgacgtcgttttcgccggcgacgaagaagatgaaaccgtactcatcttcatcatcgtcatgattctcttcgccaagaaaaaatcatccaccggattaaaactacttccagtgaccagagaccttgctggaatgaccgacatggaaatatggcggttgaagttgcggatgctactactagtactactactaccgccattgatgagggacctagccactctcatcatcatgatcttcatagtgatttttcttcttcttctgtaaatggctcccagagttttgggattttctagattcggaagttgattgtaagagttgaaatcggtgacggttccactctccaaaggtgttgtctttgtttaatatttattttacaggtgaagagggttttggtagtgtacttcgcgggtgtagggttgagatcatgtgtgtggtttcgatcgtggaagaaggaatatttagacgatcaagattagaagataaatagggatgttgtttaaggaagtggaatgagaagcagaatacttaatgagtcaacggctgcgaatttcggtggagtgtgacagttattataatgaggcggaattgcatgcaacgtcttctatagtttgatttgtggtaccccggtccggtccagtcaattgtcattctgtttttttttgcttttactaaatagtcaaccttaggaaacccccaactttatgggctagtaccgaaaaacattaaaacccgtgtggtcaggtcaggttcaacccgaaattaccccacacgagtttcgggttcagatattaaaaagtggttagttttagtcgggttctaacccatgacccgaaaatacagcaaaaaaaactatttttttattatattaaaaagttaa

SEQ ID NO: 381856 - DNA, 1094 bp, Cannabis indica
aaaataaattccaacagtttcgtcctggcttctatgtggcaaaagccgtgcaataggattaagattctatgtgttcaaagaaacctgaacattgggaccaataaccatcagaccttgtggattagtggattcaactcttcttgtttgaaccattgtatgttgattcaccaatggattgagaatcaaaaattgaggagagcaagaaggtattttagactcctaatgaaagtaccaaaatgttgatctcgcttttacctaacgatactaagtcaattaaagtgataggaatgattgtaataatgataataatgatcatttgtaaagaaaatgacacactaaatttatagaggttcgacccctttcagcagtaataggctgcttcctttttgttgtattacttgtgagaaaagaagcaagtaaatttattgatctttctcgaaagcttacaaatatttctaagtatttctctctttattcttagtgcctgaggcagaagaagccttccctcttttagtgaatagggctcactatttatagggaagtggttctagcatttttttttatttaattacaaaatattaaatatatatttttttaaaaaaataaagggagaaaatctttggaaaaagaatttatacataaagtctcacgaatttctcagtttgataatcatatccacgaaaatagggattctaaataaactataatcgtggagatatttgaggaaagtatatctgaagatatttactcagtgtatgttaatatttaaaaagtgacacttgtccgacatgcctaatctacttggagtagtgcaaggctcgaggcctggtcagatggtaaatatgaaggtttaaacttaactactctgaagtgatctggacaaaactataagtgggtatcagtccaagtccgaaatgtacttctacaaagcatattattccatccatctagaagatccatacggggataccatttgtaacgtccccgcttcaagcctccattgggtccttacacccacggaatgaatggctcttatacacgagtacgccactctagctgcttcctggattgatgactggccctacagaccaaca

SEQ ID NO: 381857 - DNA, 7647 bp, Cannabis indica
tattattattaaccatggagctgcctcagaatggaagtgcaaggagcaatgaatcgttatgcactgtggcagaaatcgaagacattgatttctcaaaattcatggatagaccacctagacccttgaatatggataggaagagatcttttgatgaaaggtcgatgagtgaattatcaattgggttctctcctcggcactcctctagaaatgctgacttttcacgaaatatggaccatgctgattttgtttattcacctagtagaaggtcagggattaacactccaatgtcacagcatagttttgaaccacatcccatggtgggtgaagcttgggatgctttgaggcgttctttggttcattttcgaggccagcctgttgggacgattgctgctttggataactctgaggaagagcttaattatgatcaggttctttagaaaattaaagtgtggttttctttggagggtgttacttgattgtttattggtatgtattaaaactaacttggccttttgtttatgtcttaaaggtgtttgtgagagattttgttccgagtgcattggcttttctgatgaatggtgagcctgagattgttaagaattttatcttaaagacgcttcgccttcagtcatgggagaaaaagattgacaggtttcagcttggagaaggagttatgccagctagtttcaaagtactccatgatccagtaaggaataccgagactttgattgcagatttcggagagagtgcaataggaagagttgctcctgttgattctggattttggtggattatattgctccgggcatacacaaaatcaacaggagacacttccttggctgaactgcctgagtgtcagaagggtatgcgtcttattctaagtttatgtctttcagagggatttgatacatttccaactcttctctgcgccgatggatgctgcatgattgatcgtagaatggtatgttcttgcttttcccgtttcatgctttcattgtctaccaccttaaaaacatgctgctaactcacggattcattaatcttgtggtgaggggcatcaataatgtgtgttctgcaaaaagaaaagtgtggtttctagtgttggagccagaaatttttccagtggtggggacatggactaggaaatatcataacaaagtgttggcaaaatttttatatttcacacccagttgagacatatgcccccactgggcaccaatgggtccgacacgggtggtttcagagggaatcaaacatcttagacaagtactttaaaatttaaattaatttcttactgagaatgctgacctcgttctctgtaacctaaccactaagaagtagttggatgagttgtttagtgtgtgaggctcttgtggctctgtaaggccaagtagttgaaaagtattagttgatgaaaacaaaaagtggtcacggtttctaagtgtgagcttttttcactttcttacctaaaaaattgccagccatactctgattcacattccagaagatttatttgatgaatacaaaaatttactgattgaaaataaagattgttgatctcaaacccacttaggctgatcattagtaccggtagaatttgatttcccttaaaatttcttgtggtttcctgctaaatataattgtttcaatatctttactacaattttttattaattatctaagtacatgttttcagggcgtttatgggtatcccattgaaattcaagctctttttttcatggccttaaggtgtgctttagttttacttaaacaagacgaagaaggtaaggagtttgttgagcgaatagttaaacgtctccacgccttgagctttcacatgagaagttacttctggctggacttgaaacagcttaatgacatataccgatataaaacagaagagtactcacacacagctgtcaacaaattcaacgtcataccagattcacttccggaatggatttttgatttcatgccatcacgtggtggctacttcattgggaatgtcagtcctgcccgaatggattttcgctggttttgtttaggcaactgtattgctattctgtcgtctttggcaactcctgagcaatccactgcaattatggaccttatagaatcaagatgggaggagttggttggagaaatgcctttgaaggtctgttatccagccattgagagtcatgaatggcgaatcgtcaccgggtgtgatcctaaaaacacaagatggagttaccacaatggaggatcttggccaggtcagtttccttccaagtttcaaggaactatatacatgttgagggcgtttgacaaaatgacatttttaatcacataaaagggtctcttttcgataattcattccaaaatgagtttactgacaaactgtctaaccactcactttggcactttataagaccatctgacaaaatgacaatatgtatttttccacaggtttactctacatgtatgtaaatgcaactctcttcattcaaaagaaagtgtgtcataattttagcttccattataaccgaaactaatgaactttttacatacagtgctgttatggcttgttactgctgcttgcatcaaaactggacgaccgcagattgcaagacgggccatagagctagcagagacgagattgcttaaagatacttggccagaatactatgatggaaagctaggccggtacattgggaagcaggctcgtaaaaaccaaacgtggtccattgctggttacttggtggccaagatgttgcttgaagatccgtctcatttgggtatgatctccctcgaggaagacaaacaaatgaagccacttatgaggagatcaaattcgtggggttgttgatcaatttttcttagttttctttcccctttattaagaaagaaagaaaaaagaaattttagactgaatttcttgcctaacattacacaagtttttcaaaccaagctaaagtcaggcttagtaaaataaaggtatttgttattctgtgcttacaagtgcaaaactatccaactatttttattgttaatttctttatgaagttttgtcattttctaaattttttaatggttcttgcttcttcatccttatcgttgtttttttaaaatacaaatccgacacaccatcctcgtgattattagtttatttagtattttaaagtaaacgccgttactatctttgttctaacttctttctaataattcataattgaaataaaaagcttttttaaatatcattttaaatattgtattttataaaaaattacaaattgaactttttattttattaaataataaaataaattatgtattttttaaaatagtataaatagaattttaaactaatttttttgtcaaaataaaacttactaatatttcaatatagaagtgttatgataaaactgactacatttttttgtatctattcgtattaagaattgtttttaaattggttgtatttaaaaaaaatattaaaaaattgaggttaaggttctatttttatcattttgaaaaatataaggtttattttatcatttaacaaaatagaaggtccaatcgataaattttgtaaaacacaaggtctaaaatgatatttacccttctaataattctcataaacctaagaaaaaaaaaattaaaaggttttaatttttgttgttagttttcttatcgcattcttgatttgtgttagacctatccatcaaataataataataataataataataataataatgtgatttacaaaagttattgattggactctttatattgttaaatgataaattgaaccctaaattaatttttcatcaaaataaaaaataataatccgatctagatttgttatgagaaaacttggtacattttctgtatctgttcctgctagaaattgtcttaagttggttatattaaaaaaaaaccaaaaattgagaccatggtactattttgtaccattttggaaaatacagggtccaatttgtgattttataaaacaaagagttcaatcggtaacttttgcaaaatacatagtccaacttaatattaatcatgtttatcgagtttttcaaaaaccgatttaaaaataaaataaaagctaaagaaaataaaaaatatatatataagatcaagacgagagtactttttggtgggatatggttgttgtcgccaaagtcaagaatcttaggcgctagtgttcggaccattgcccgctattattgagtttcaatatcattcctccaaagtaagtggttaaggtacaatgggggcattgttttgattatgaataaacttggtctaaaaataaagatttccatcagttgaattctgttgttcggagtcaaggaaatcacatcagtacacccatggagctaggaaatcattttcagacttgtggtactcgtttggctcgctagaataacatccaaaagaaacaatatcatgcttaaacaaaggagcttaaagcacaaatggagtttcttttaggttgtaacttgatagaggctttgattaatcttcgtggggtgaaaaagtagcttaatctattgctcattaaggatgaaagtttttggacacagagaagctgagctatttggttgaatcatggggaccgtaacactagatgttttaaaaggcttcatctcgccaaaaaaagaatcatattaagggtctatttgattcaaatctggtgtggtagagttctaaactagcaatagaaagtatcatttgtggctattttcaagaccttttcacctcttgggagtctcatcgccaattgataactcacctctaacattttgtgccatatcatctcagtcgcactcaaaatgataggcttcttcaagaatttacagtagcagatatcaatatggctttgtctcagattagcacatttaaatccctagggattgatggtcttcctcgcctcctttatgatcaccgctcaaacatcattggtctagatgttagccaagtttatttaacgttctcaatcataatatggacttcatcgctctaaataaaactctaatttgtctcatccctaaaggcccaaaccccacaactatctcagtattttgacctattagcccttgcaatgtcagctaccaaatcatcgccaactacttggctaatcgaatgaaggataatcttcatgaggtaatttacgagaaccaaaacgccttcatcatgggatagattatccaagacgaggcgatttcaggttttgagagtctccactgtatgaaaaagggtcgctttgggaatggccaaaaaatggctctcacattggatatgttcaaagcatacgccagagttgaatgacactttatcgaagaatgattatctatgttgggtttgattcagattgggcagctaagatcatgaattgtgtctgaatggtctcttttttggtgctagtaaatggggacatttttggtaatattcttacagagtaggggtaactacgaagagactctttctcactttacctatccctcatatgttctaaaggtctttcttgcctccttcaagaggtagagtaggctgacctcctccatggaatacgttgtggctgaaatggcttaactttgtctcaccttttttatgtagatgatagccttgtgttcattaatgccaatgcaaaaaaaggtggctacctaaaacaaatcctagatgaatattctgctttgtcgagacaaagtatcaatcttcaaaagtcagacctttgtgtgggtcgttgaattcaataggccgagagataatttttggctaatcttatgggtgtcaagcaggttgaatgtcatctcgttcctttggtatgctagcctatgttagaaaatggaaaaaaggaagtattttattctctttgcactaaaatttgcaattttcttcaatgattgaaagaaagtctttttcccaagttgggcaggcaacacttcttaagacagtcatacatgtcattccttgctatattatgagttgctttaggctttcaaaagaactgattatgaatattcactcaatgatgacccgatttatgttgggatccttagaaaacaaacataaaatttattgggggcgatgggattaattgtgtaaagctaaaactaatggtgatttgggattctgagacttacagaaatttaatcaagctctctgttgaaataaatccccacatgccctgtacactgttcagatctacatatacagttaaaagactaggtggcctttggcctttaaattcctaggatagatcagcaagttagttacaaagtctgttaaactttgtaagtaactctttttctctgcattccactacaacatatataaagccaaaaatctcagaacaaaaatagagaccagatcagaacttagaaaatcagagcagtacacacaggaaaaataagaccagccttgagaattggaagagacttacattgggtaagttttggagccctagggttagggctcggaggtccaacatcatttccaggaagattgtacatgcagaaggaagaagaagagattaatgtaggcagagagaaaaagagagtgaaaaataaatattgtaaacaccaaaaacattaccaatcgtacatgtgatttagaatctaccattgtaactctttgatctttgaagatctatagtggaaacgagcaatctgaggcgagctcgaagaggatgtacccaacaacaatttttggggaacctctataaattcagtgcactctttcctttgtttttattttctgcatttctatattgtgtttgctgtgattgtattttcttggggggtttatttcaatctggtctggaaagggatttactctagtttttctgggtaatcgctgctgctctttagagaagaaccacgaagaagtagagttctttgctagggtttattttgtggttgtgccatatatgtgtatgaatggaaaaagggattatatattgtctgattggagtctagggtttcttgtgtgtataaaacaatttgtagttcaatgggttaaatgggctgtcgttttttgaagtttaactctagggagtcaacgttgggtttgattgggtaaaaggtctgttttgaccttggtctttgattatttcattgttgtgtgtaaggaaaaaatccctacagtagtatcagagccaaacaaggcatacatctgcagcaaagattaatcaagaaagcatcaagaaacacattcataacagcaagaattcaaatgcacataaacagttcacaaagatcaataacaagattactctaaactcattatctatataatttctttgaaataattttatacatatatgattatgagttcaatgaaggttgatattgataggtttgatggttcaagtgattattggatttggaggaagaagattagggctttattggctcaaaataaactattgagggttcttaatgatcctgtggaatggccagctgatacaaccaaggcccagcaagaagagttgctggaaacagcaaccggtttaatcatcttcaacctatctgattctataatcagattggttgacaatgaagacacacctgccaaaatttggaacaagttggaagagcaatttcaaaagaaatcattgatcaacaagatttacttgaaggagagaatctttgg

SEQ ID NO: 381858 - DNA, 1822 bp, Cannabis indica
tctcctccgggagtcaagacacaaataggcgtcttcgagctagaaaggctagagttgaacaatcactttgcatttaatgtagcatggagaaaatgtctaggaacgcccataagatgacgtgtcagacataataaacctgatttaaggcaattacacgataatcgaaggagctagtgacaaaaattgagaaggggatcagaaaaaaaaaccgcaaaaagcattctccgtaaggaatactctcattcataacagagactcatggactacaactcattaatccccaaaccacgtaaaactcacctgcattaattatccctaggctctaattattatcttatttaattagttgccgaaaatatcggtcaacaatatccaagacaaccaaatgtaatcaagaataacttagagtgatgctcagaaataacaaccttaaccagaccaccctaatgttcagccatttgacattataaagtggtaagccaaacttttctccgggacaaaatgcggacatccaaaataagatttaaggcttcaacaatagtaggagcaccatcatcagtaatggtaacgacagaacattcagtctcctttaaattaatagttgaattcatacgatcaagtaggcgatccataccgaaaccaataaaagcaaaaaaaaaacaaggaaactagtggataataaccaagaaacaatcaatgtaaggaactatgaattgaatgtagcagttattataatggaaatgcaaaaaaaaaacgtaaaacaaggaagaaaactagaaataactgaaaaactgaataaaaaaatcaaactgcaacagagcactcaaaacagacagacgttctatattatcagtttcttattcttatgtcaaaaataagttgattatatataaataatgtttgatgtagagtattaattaattaaattattaaactactaaatgttaaataagtcttagaatagtatcctatgatttagtctattttcaataatacctttataattgttgatctcgcttttagccaacgacaatgagtctaatttgtaagtgacaagtagtttaatacgagtctaatataatatagtcaataaagacacaagaattttatagaggttcaaccccgagcagttcggtaataccctaatcctcgttatttgtattgacttaagaacaaagagaatggttccttttcttagagctcttacaatagtatctctgaatatgaattcttagacaaatgtatcgaccctttgcccagtgaatatgaatcactatttatagggctataagcaggagtatttcccttcttgttacaattaatataagtagaataattgcatagtaaatacagaatatactaatcgtgggattcagacagcttgccatatctctatgatctgatcccaaagttatagggatttcattgatgactaacgatgcaaaagctgaatttgctaagtgtttggcgtgttgcacgggttgctcattgtccgacttagaggacttcgtctaaaaaaatgtaaatggtgctctgttcggcatatttcttgcgagcaggtacatagaatatattccatgtgtcaccatagcgtgatgcaacgtcagagtgcaaaaattgggataacatttgccccccaagtaagtacgggacttctaaagttgcgtgtagacttcatccgagctgtctttgcgtttggatgggtgacacaagtcaagtgcatctattcgagattcgatgtgaggttgactaggcgtctttttgtttttcggctaataaatgctctgacacaattaatgtttcgaaatctaattttctctca

SEQ ID NO: 381859 - DNA, 3554 bp, Cannabis indica
attattattattattattgacgtttatttctttcactagaactctaataaaaattcttgctaatttgagcatgacaagagttgattaagattgtatgcttgtgcactatgagtgtgccaattcttgccaagccgtgacacaatgtatctcctggaggtcctaggatgcttttacggtgtgggggggcatggggtgccatgagggtgtttcaactcaaatgttcctgttgttgttttgcttttgacaagtagtgtgactggaaagaaacattagaattatcaatgatgaagaagaggacgtggtgtttttttctttgatacaaaattaagcattgtatgactatgcggatcttcaacaaggattgtaacacatactcctcaacacttagttgtgattggcattaattgttgtaatgtgatagtttcatctcttatataattgctttgatattttattaatctcttattaataaaaaatttgtttcacacacacacatatatatttatataaagatttatacatacataataaagacacagctcttagtaagtacattgctacttgtaatcattgaaccattgtggatatttgcaattgaattttcatcattctttgaaagaatgtacttgatattttcttgaatggtttccttagtattggctctttctcagaatgtataatttattcacttttggaaattaaatatcatatcttatatttactgctagccataaaatatttgtccatcaatgaactttcaataactttatctctggataaatttgtctgacctttcttggagaatttttcattgatgcagaatatatttcctcggatatttggccatgaagcatcggggtaaccttttccccattttccaattacataatttgtggttccccttcatgttagctcatacgacgaaaatggattttggtcactgtcacaaattctcagcgtgttccctttttgagtgtcagtttaatcaatgtgcttttccatattatctttttctttgggtatggggtattactcaattttactctaaatctctaatctaattatgcatcttagaggtattctctattacgtctgagtcttaaccatcataaagagttaaggattattgtctcatgttttattgttaagtatgacatacaattattattttgtttttattctcttaggaatttcacttactggtatgaacaaataaacagaaaaatgacttcaaaacagcatattttatttttttaaatctgtaatcgtatcaacatttctattatatgtcgttcagttaatgttcttcattaaaatgttcaggattgtcgagagtgtggggcagggagtaactgaatttagtgagggggaccatgtgcttacagtattcacaggagaatgcttcacatgcagacagtgtgtatctggtaaaagcaacatatgccaagtattgggcttggagaggagaggtttaatgcatagtgatcaaaagacacgcttcttcataaaaggaaagcctgtttatcattattgtgcagtttctagttttagtgaatatatcgttgttcattctggatgtgctgtcaaagtcaactccgatgtccctctagacaaaatatgccttctaagctgtggagtagctgcaggtatcatttaaaagaattcattttctaaagatatcgataccttttgattttttttttttttatttataatttttcttgcaatatctgcgtataaatattcatatttgggctatgtgcaaattaaagaaaaagtcaaatttgacaattggaatggaattagtgcaggaaatgataatttcaaatgatgaaattaagattaacaaattgtctgaagtaaaaatcacacacaaacattttattttttttttcttttcttaatccatgtcaccaaaggcataatttttatattcattgttgatatagagttgaaatgtaaaagaatagttctcagatatttttagtgcagaaaattatgtttttagatatgtatttggtaaagggaaaaagatgaagctaggaaaatgtagtgtgatagttagataggagactcgtccttggaaatagatgagtatattattgtgaattgtatcagatgcttatcagaaatgaaaattcaactggttgagtaatctaaagaaaggaattgaagttcgttgctaggtctgggtgctgcttggaatgttgctgatatatctaaaggatcaactgttgtgatatttggtcttggaacagtaggcctttctgtaagttcatagacttgataatatgtttacatttcactatgtttctcaacaattggctcctaaactatgattacaaacatgaaatgcatttttttctttacaggttgcacaaggtgctaagcttaggggagcatctagagtaattggtgtagacacaaatcctgaaaaaattgtaaaaggtaccgacttattctcttctaagattggatttataaggttaatgcatgtaaaattcttgatgaataatttgtactattttgggtccacagcaagtggttttggaatcacagaatttttcaatcctaatgactgtagcgaacctattcagcaggtattttattcatctaaaccaccataatgaaaactatccttcccttgacaatcatattagctgactttaaagaataaaacttggttgaacattaacttattagttgagttggtggagttgtcatttttattgatgtggccttaaattaaaacataaatcagtttagataataaaatatgatcaccaacttactttggcaactcccttcttccaagaagtgcttcatgtttgagataaatttatctttgaaactattggaatgttttatcgattcaggttattaagcgtgttacagatggaggagcagattactcctttgagtgtataggtgacactggaatgataacaacagcattgcaatcatgctgcgatgtaatttttatcacacctttatatttcataaatatatattttctaaagtgaactttgcttcaacctttttgtggtgtcttctttcagggatggggtatagctgtcacacttggtgtgccaaaagtaaaaccagaagtatccgctcactatggaacatttctatctgggagaacattaaaaggatctctatttggaggatggagacctaaatcggaccttccatcattagttaacatgtacatcgagaaggtaagcagtcatggctatataatttgttctccatttccttcttttcatgttaataataactaacaatatgtgtatgattcttaaagtactgaagtttagttataccattttagtatgtcatacattgtcttgaaattgaaaccaacttagaacatgtttaaataataatattttaatatcttgtatatgataaattgatattaccacttgggtaaagctcactcccaaaagcgaccaatcaatctcatacttaagtggcgtttggttaggaggaatgaaaacttaggaatataaatgagaatcagaatagaaataagaatagaatggaataaa

SEQ ID NO: 381860 - DNA, 2559 bp, Cannabis indica
tttcaggcccccacagaattctgatctcctctgtgtgtacgtgggaactggagttcaatttttcggaatgatacttgtgaccatgatctttgctgttctcggattcctatccccatccaaccgaggtggtctcatgacagccctgctcttgctgtgggttttcatgggccttttcgctggttactccgcttcccgcatatacaaaatgtttaaaggaacagaatggaagaggatcgctttcagaactgctgtcatgttcccagctattgtgtcctcaattttctttgtcttaaacgcactcatatggggccagaaatcatccggggctgtgccatttgggaccatgtttgcacttatctttttatggttcggaatctcagtcccactcgtgtttgtaggcagctatgttgggttcaagaagccagccattgaagaccctgtaaaaaccaacaaaattccaaggcagattcctgaacaggcctggtacatgaacccaatcttctcgattctcattggaggaatctaccctttggagccgttttcattgaactcttcttcatcctcacctcaatctggcttaaccaattctactatatcttcggtttcctcttcttggtcttcgtgattctcatcatcacttgcgctgagataaccattgtgctctgctacttccagttgtgcagtgaggattatctgtggtggtggaggtcatacctaacttcaggctcttctgctttatacctcttcctctacgctactttctacttcttcacaaagcttgaaatcacaaagcttgtgtctggcctcttgtacttcggttacatgttgattgcttcgtacgcattttttgtgctcactggcaccattgggttctatgcttgcttctggttcacaaggctcatttactcatcggtgaaaattgattagagtttgtgtgtgcctgccaatctcatctcatataactacaacgtcgactatattctagtgtaagatttgaaattaaggtatggattttgtactcaattttgaacattgactagctcatgactcgtagttctgttataatatttgtctatttttcaaatttatatatattaaaaaaatgcaaaaacataagattagtcctctgttttcatatatgtttaactgaatatatgtgccccgttgttgaaccgtaaattaacgttagtgtggtggatatgtgatataggaatgatcatccttaaatggtctttgagtttgatgttttccatgtaatttagatgttaggcatgttaagagttgcagacttgatcacacactgcaatatacagaaataagtactttctattctattagggcttgtagataaacagaagggtatatttaatttatgttgaaccaccataacttttacaacaaaaaaagttatctctagtcaacataagaaagagcaacgacaacagctcttatcttagcataaaaagaacataagccactaccctacttccttgggcgagtgtcctcagactcggccatgccggcagcgaccttggctatatctttggcagtggcatcaggctttttggtagtgtatagtgtgaaatatccaatggtagcgatgatgagtaagccaccaatggccatgatggctgggctgtagggaagcttccttctctgatggaggacacccccaggattgtggcctggtggcctctgagacccttctactccagctgcttttatttcctcttgactcattttgtgggtgtctgccattttcctccactcttcgttcttttccattttcctttcctagatctgtttttgagattttcgttgccatctattttaagttgagaaaaaacagagacctgccaacgtcgtgtcgtgtgtgcagaggagcaattatgccacgtttggaggatggcaactaaaaaaatcacttcgttagacacgttgttgtttgcatgcagaggattgtttgtatgacaagtgtcattgcaattagtcaggaaatattttgggccttaccccattaattaactcgttgctcatcaccgactacatgattagtatgtgcttttttgtctagttggtttgatatttgcattaggaggaatttgggatttttacactagtctaaaattacaataaacatttgtcttaaataacaattttttcaaaaataatgtaaaagaagtcgtacttttctaatttttttgtcaaaatattccaataaacattttttacaaactatattgcttatgcttcaactacctttttaattggactttctttttcttttctttttttttaaaaaattttttttgctggaatttttaattagatttgagcatgatgatcttactgatgactacataattccatctaaatatcacggcggtgcatcttattgcaatgaataccattaaattaaatatgcataatgtaaaagcaacttagaaatgacacagccgcagttttccaagacaagtttgtttatgacactaaggaggcgtttggttcggaggaataaaaatataggaatatgaacgggaataggaataggaatggaat

SEQ ID NO: 381861 - DNA, 1452 bp, Cannabis indica
taccgatcataatcattcttcgaaacacttacacaatatgtcaaaaatcatgtaactcctaaaaccttgtttctcttcatctttgttcttatcacaccactgcatcacttccatatgtccaagccaccatatattgctgtagaaaatgtgaaatgcagattagagtcgaagtagtggacatgattacaagggtctatcttcggtctttgaagtcccatttgttatactcaaatcaaatcaatctccaatcgattaatgttgacaaggaaaacaaaacttagtgtacttttactataagattgctgagaaaagcaacaatcttggcttcccagcatgtacttaagcaactatagttgttgactatgttaagaagatatggacttgcagctgataacataagattaagatgctgaaatagttggcacggaagaaagaattcttgatagaaaatctatgggggaagatttgttttgggtcattcacggcggtcgaagagcaagcttttgagttccctcttggaaacttgaacttgttccaattctatcatttgtgactgtctttacagtcaactggaactaggcacaaagtgctaacaagcttctcaatagatggcaatacatcgcagacaaatttgaagaagatttattcaccagactaccagatggtaaagaaagcaatacaagtttcagttaactccttgtttcttggtggtgtggtgacacttattcccttggtgagaaagagctttcctgagttgggtttggtttgagaagattggtttcaaatgagtttgattgtgttgtgattcatccatcacacaaatgttaatctaaaattgatttcaagaacattaattaatcatggacacaagaaatgtaaaacctgaatacaacattgacaaattaatagaagagaaaactaagatgaaattgggatcaatgttacagtaaatattcagccaccatggcactcctcttctttgttgattacttgagaattagatgacaagaacaaaggtagcaacactcaacaatgaagatgataagaattttctatcatttcggtacaaacaatagtaaagtagagataatagagatgatatattgatattagaagataaaagcaaacatgtttgctgggtattcaagagacccaactctctcccaagagttaaaagctcacttaactaaatcattcaccacccccttaccctccctactcactcatatatatagcataaattcctcccattacaattacccagttaccctctttatttattaccctaaggcctaacaatatcggtcgtccgaaattcaccttgtcctcaaggtgaagaacacaagcctccacaacaattctggctcgtgctttgtcaaagaaccaagatagcaggtgcatgttgttgttgggttttatgccctaaataaaactctttacaatctgattagt

SEQ ID NO: 381862 - DNA, 1457 bp, Cannabis indica
atgtgttaatattattattagtccaaatgagtatcaggtctcatatagtttatatatagcttttagagagtagtcgttaatcaatcgcaaaacgacatatctagaagtgctagcactactaataatccaataacaatagctcatatatatatatatgtcattttatacattattagaggaagtcttaacctctaatctccctaaaaatgacaaactctatgtatattgaggttttttctttgagtatatttaaccaaaatttttacaactttgaatataatatatatatatatatatatatatcaggatgaaaaaaatatcttagtgacaactaaatagcttaagtgcttttgacaaaggcaaaataaaaaatgaggatatattcaatgaattaacaatttttgtatagatatttgattgaaagacctttttattaattaggcgcttttaggttgtaaattgtttctgctataatacatgacttgttttcaaaaaaaaaaaaaaaaataacttaagtgacaagataaatttgtcttatatgacgtgatattttatattatatgacatcataaaatgttagaaattcttacgtttctaataacatttctatattaataaatataacttttataaaattaatgtgtagggattagggtttattacaatgtcaactccaccagtgttggcagatgcaacaggaacttgtagtgcatacaagcctgagtgcattggtgaagcacaaaaggtccttttttacacagcattagctctaattgtcatgggaatggctggtcactcaacatcactaaattcactcatgattgaacatgccactataaaaagacaaacacaagaagaagaagaagttcaagcgagtcagatttggtctttctgctttggaatgtttggtatggttattgtctacatagccattattctagcaattactttcataaaaccatggtctttgaggcttggaatcccagctatatgtactgtgattgcaaccactattttcttgactagctcatgttcttacaagtatgccaaaccacaaggaagtcctcttactactgtctttagagtcttcatcgcctgcctctaaattattccataaactcccaacagacaccaatcaattatatgagaaacatcaaatcgagcttccttctcttcctcatactcctcgcctaaggtacttattaaaatatgacaatttctttttagtactaattgttagataaattaataataaacccaagatcaatttgcatataatataaaataataatatataataattagatatgcatacctgattgatccatatgtgacttcaatttgatagtgcaatattatcaactaaatcttcctcgctataggtcgttaattaaatcagaagcagtttttattttatatttgattatcaaaagtatacaattgtgatgagacaatat

SEQ ID NO: 381863 - DNA, 1807 bp, Cannabis indica
taaaataatttccaacatagcccttaatggttgcgtctctttgtccctccattcggtaaacatgtgtctctgttcttcgaacgcaagatttaccgcaacgcggagttcctcctgatcatgatgtacggtgttggtatgaccctgcatcagtccaagagcggcacggaggttttggagctcagtatcatctcctatggttattctaacattggtagcaggcggaagggctgtgttatgaatgccctggctagctgctgaactggtattcccagtctcttgcacaccaggcgcaatttcatccacaagagttgtcacaccatgacccgcatttgacggttgttcgggattaacatctggcggaacccttgtgtttctcaggttctgcaatgcaggatccactgcctctggatttgtcagatcaaccacgttgaagctgtttgggaggattttgaagatgaattggatcccaaaatttggatagaaagaatgattgagcaaatggaagatgaagaagagatcaaaatctgcaaagttagtcccaccaagaccattaaggtgtgaagaaacttgcccccagttgtaaaagaaaatattgttaatattgttaagaagaacaaggatgtgctagcatggagccatcctgacctgataaggatcaacccaagtaatcttacatgctctgaacattaatgaagatgcaactcttgtctaccaaaagtgaatactcttagatcctgtaagggcagaagtacttaaggtggagtttgacaagttaactactaatgacctcctcctggaaacattgtactcggtttggttagcgaattttgtcttggtacttcaacccaatggcacatggacaatgtgcacataattcacagacttaaacaaagctttccttaaagactattttccactcccacgaattgactaaatagttgatgccatatccggttatgagttgcttagcttaatagatgcctactccgactataatcagatcaaaatgcacattactgttgaagaacacaccagtttccaaacggataagggagtgtactattataaattgatacagtttaggttgaagaatgctaaagccacctataaacgactagttaacaagatgtttaaggacaagctttggatggaacatggaagggtacatggatgacatgctagttaaatccaaaacatccataaagcacaacacttatctcaaggacgcttttgagtccttcagatgtatgggaataaacttaatcccaagaattgcacatttagagtccccttcaagaagttcttgagatttattgtcaactctcgaggaattgagacaaacacagagaagatcaaagcatttgttgacatgacttcctccaagaagcacaaggaccgatatgaatgaattttctgtatctaacatttcctttgctataaagacctaattcatataataaagatgataaatagtagatgaacctaaatcttgagtaatcatgaacttttattcatgtcataagtttctttgattcactcgttaatttttccagagaagatgattcttacaacttctgttatgtgaatctaataatgtggatggctgaaaacattaattaaaattatggaatccagactttcctaaggaatcgaatgctagttctcgttatgtgttaattctagaactggaatgttgtgcacaaatttagatagaatctaaattatacttccactactgaattaatagtactaaaggataaagaagtaattagaatggtaaaatggtaatttgacaaaaactaattac

SEQ ID NO: 381864 - DNA, 2237 bp, Cannabis indica
ggatcgatttatgcacacccctgcctaccccggtgccccaactctgtcttaaccaattggtagaccaaatcactggagtcgtcgtcccctaagtagctattggaggggaggaaccaacttgaaactaagtatgaagaatgatctagcaagatagggacaggaaggctcgatcccatctaggacctacccaagaagtcccatatgaatgaaacatagctaattttctctctgtcaccccaccgaaagcagggcatccttaacctattgagcctctcatcgaggcttataggctatacacatgaatactattgaatagatggaacatgaaacaaagttaacgttggcacaggaaggaattgtggcgcggatcctcggggctcttacctagacctgccttccctctccatgcgctctgggcctaagcgatcaagtcctcctcctccttctgcctacgataggtgttgtaactggtctccacgtcctcgatggttaaatccctgagttcctcctccactacattgtcctaggcattagggcaagtgactagaccaagattacagtcatgcacactttggggggccaccaagagacctaccctgttgtagtttcaagtggtcactaagtccccaatgttgagctcttccttagataaattttggaatactgcctcgtggtcccgaaagagttgtgtaggagccgtttggagtagaagaaggatcctggtccactcaataagaaggtctagacattcaaagtccctgaagccagaggaaaagaaaatcaatgcctaaaatcttttacatttttcttaaaattatatgggactttcccgtcaacaatgtctgaatgaggttgtaaagaatagaacttatctttaaatttgtctccctttttagggattgtaacaagtttataaaaatacaaaacttcagcatgagtgggaacatcccaccccttgtcactatagaaaataaatagctcagctaacagtctgtagccttgcaggatcagttgaaaaggagttagtccgaacaaaaactaaaaagttgatgaagtaattttttattaggagagtcgccccagccattagatgtgcctagctccatacttcgaaacccccatagctatggtttggggtctctttttcctaggggagccgatgaaaaaccccttcgggcggggaataatcccattctccacaacgatcctctgaagctgatgaacgcacctcaaggaggaattcaattcattgccttcccagccattagcacaagaaacataatggggaagagggaccagcccttacatcacaatgggtgggacgactgggggtagagagtcgccagtattttggggaggattcttttttgccaagaagtacaatcgacatcatcagaaccgaggtaaaaagacacaattgataaataggccaacacatgtataatgtgtggctcatttgtatggctgggactctttgtttgaagctaacgtcacacctaatacccccaagagcgaactgaagagacaaagcattattgcaacttccacctcaaaattttatgagctggaacttgaggggtaaatgttgaacctattttttaccaaaatatgtggcaaacatacagagctccacgtggttgagggggtctcattcacaaagagattaatactacttgtggaattactttgcactcgaactcgctaagttaaggcacgtttaggaggatccaagacccccatctcgggatacataatcaacagattgctttagccattcgggaggtgccaagctcccagattaaaggtcctctgagactcaactatttgcctagcacgggttttgaagcaaatcattgtatatgactaatgtggcacatgattaacatcattatgaagccatactattctgacgactcattcacctaggcaaggtaaagtgacggctatgcactatcacatcaaccgcacatgggacaaatcttatctcaccaaactcctatcacggaggctaggtagcacctagagaccgaggagatatgtaccatttcccttctttgatccttcttttttcctataaatacttggaactataatggaaaaagggaattttggactcacacactaaagtgagcccttatattgtaacttgaatattctttattcaaaagaacattcccaccataaataaaagtgactcgtagactacagttcattaatattggaaccacgtaaaaatc

SEQ ID NO: 381865 - DNA, 1068 bp, Cannabis indica
taattatatatttttttcttcacattctttgatctttgtaatatagtagatttatttgtataaaagtgaaaattaccttaaaaacaataatgtaatttgatatagaatagttattgttatctgtgttttcggaaagatgacatatggtaattctaaggaataatcaagtgagaatcgcctggaccaaagcccttccatgtaagaatacccggtccagacgggagatgggcccgagcccatctgaagtccaaaagtctcgcatttggaggcgagacttacccgaacccagaaggcgaagatgaaatggaaaaaccgtcctgatgaacattgggatgcactcggagagaaattccaagaggcatctccaaaagccctttgaaaggtgatgtggctgccctttgacgcttagtcccaccaaatgagatctagtctcctatgtaagaacatggtagtgcacacgcaccaccaaaaagaatatgtcctttttgtctaacatcgcttctctaacatctttgtctactgtagtagtacttgcgcgtgacacatgtctagatcgtgtgggccccatatgcacggacacctttgcctccactagccaaaatcatgtagatgaccttaaagtcatgtgtatttcatgtattcaccctaatagtgggcctagtttcgatcatgagtatgcccgaatccaaatcataacctatgaaattccttttataccttcatgaaaggggggcgaaaaactttgagtacatttcctttagactttctccttcacaaaaaagtaagggaaaactcataaagaaatcactgtagtcataaattagggttcttcaacttgtaagacctcattgtcatacaatcttaagctcttctttaatttagtttttgaaaatctcgataaacagttacatatatatactcataataattgaaagattcttgcagtcataaatgcaggataattttatagtaacattctaaaaagactgttatgatacaccatgtttattttggcatctatgaacactttttagttttttttttatatatatataatcatgtgtattg

SEQ ID NO: 381866 - DNA, 2731 bp, Cannabis indica
tttttttttttagaaaaaagaatgatatttttctaaaagtgttttcgaaaatattacaaagaaatttaaaatatactattaaagtcaattaattttttttttttgacaaattataaacttgagtatttgattgtgcaaaaaaaaaaaaatcactcaattgctaaaaatacatttactaattgttaatagttttatttaaactaaactaagataaaaaaaaaaaaataatccaaactcatgaaaagctatcaagttacatgaaggctcttgtatcacataatagatatgtaatgtagatcattaaaaaaaaattatgtaatgtagttgtaaacttttatttatttgcttatcttttgaacaaatttttttattaattttctttctacacaatattttgttggcaggaaagtttaagtagtcttccatttcgaaacccccatcccccacaaaatcaaaccaaaattaatattccaatcaattgtacaacatacggtatcatagccagttgcccatcaaattattctacggcttacaatccaaatttagatcaagatcatccattgtctcccacgtgtccagactactttcgttggatttatgaagacttaaagccatgggcccagactggtgtcacaaaagacatggtggagaaagctgaaactatgagcctagcaaactttagacttgtaatagtaaaaggaaaagcatatgttgaattttataggcattcctttcaatctagagatattttcactctttggggaattctacagttgttgagaagatacccaggtagagtccctgatttagaccttatgttcaattgtggcgatttaccaattgttcagtcagcagtatttagtgggttcaatacctcagtaccaccaccagtatttaattactgcaaggataataccacacttgatattgtcttcccagattggtcgttttggggttggtatgaaattgtaaacttctttctttttgtttttccttttttggaagatgaatttacattaaaactattttgttgatttttactcttgtaataggcctgagatagacataaagccatgggtaccattgttgaaagaaataaaagaaggcaacaagaagaaaaactggatgaaaaggaaaccttatgcttattggaaagggaacccaggtgttagtctcaatagacaagaccttttcaaatgtaaggcttctcccttacatgattggaaggctcgtctttatgctcaagtaagtaattctatttatttatttatttattattattattattatatttaaattttatatttttaaaattttggtgttttattattaaattatttaagtaaataaatttggaaaaatatgtatttagaaggttattttgataatctttatttgttttaacatgtaagaaaaatatttgagtgaaatatgttttcaaatgatcacataattgtagtttttgtgaccattaataaattttaataaaatttttgaatagtttataatattaaaaataatgttcaacaccagttatttatcacacgtggataaaaaaaatagtcatatataataaaataatttaaccattcaaatatatttgaaaatttacttgtgttttgtcagaaattgacacattgataatgcatgttaatataatgttatatatataagagggatgcgttactcctttcattgagataaaatttcatatatcttataattttaatatggtataaaagaataacgagtatccgattcaaatccaaataaccaaaccaaaaagacgagccaaaaccttaccatacactcaccctattttatctttgccactacacttgttttaaataagtataacatatacgacggtgaaaagaacaatagaccaaaatgctctgtcgaaacaaatagctaggaattctaaaacattatttttaagaattgtataatagaattaccaaaaaaaatttatatatcagttggagataattaatgtaggttatgttatatatgtgttggaaattataggactgggatcgagcagcaagacgtgggtacaagaaatcaaatttggctaagcaatgcacacataggtttaatattatacatgatcactttattatttttgttataatacaacaaaatgtgttgagatttcaaaaatcaattagttgtgttcttatttcaggtttaagatttatattgaagggaatgcttggtctgttagtcataaatatattctttcatgcaattcagttacattaacagtaaaaccacggtactatgatttttttgctcgagctttgattccaaggcaccattattggcccatcaaagttaatgacaagtgtagatctatcaagtatgctgttgactgggggaactttcaccagaaagaggtaatcactgaaaagctattttttttaagctattagaattttctactcaaattttgatatggactaaattatatgctttttaaattttaaaaaccgttaaaaatctcctttgaattattgagattaaatttagtggacatgatttgacacatgttaaaatttaaaagacatgatttggtagatataaaaaatcaaacaacatacatggacaatcatcgaattagtaaaatttgataacggtccttatatctaacaatttcaataatttaaggagaatttttaaccgacagaaaaattaaggcacattgtttggtacatgtcaaagttcacgg

SEQ ID NO: 381867 - DNA, 1504 bp, Cannabis indica
ttttttttttttttgtttattccctttaagttacttttggtccagctggttagaagatggaagaccaactaatatctcagtcccagtttcagttcttaaacgcagccactatttgggattgagaaggaccacatcagaaacacatttaggtacactatttaatgtttaatattagaacattaacatagttttaaagttcctttaaatgtatagccagtcatatgactaatattcaccaaattctttcaacttgtttgcttttgcatcttctaatataatcatcttgcaaaattttgatatttacaccaggttcttcttctgcattgtattttgtctagttcgcctaatatagcatagtctagattctaataaaaacaccaaatgtggcaatgcgtacagcagagtttaacaacattctgaattttaggcaaatgagaatgtggtcttttattctaattttccatatcttaaagaaaaaacttccaccacaactattggagtagtttatttacttgcatagttatttttatccacaaaatatatctgctagagttgggttgtattattattggagatgaatgagataggaaaaaagtggaacacaaacataaatcggattttgtttacttggacttgtaaccaatatgtttaggacaatctgacgttatactctacgttagtgttggagataggagaataggattgggaattgagcagtaaatacaattgaatttttgacaaagcaaaaagctggcacaagtatgaaaaaatattgttttggagtctttggacttatttgtgttacaaattgccataatatgacaggaaaaaaaaaggaaaatttacagcaaaattactgaaactttacttaatggtgtgtttaaccacacatttttttttttggaggggaaactctccaaactttacatttgttgggagtactcaaaatacattatagattccatatatattatagacatgtcaacagttacagtttgtagtgtacaatagtagtagtgtactgtaaactgtaaaggccgtaattaattgtttaaatattataaaagtaattttaaaatataaaaaattattaatcattaaaataataataataaaaaatctttgatttttttttgttcttctctcttcatctgtttgtgctcttcataacaagccaccaccgccacctaaacaatatcaactaccaccactacactactacctggacaatatcacaaaaaatatcaaccaccacccaaatgttacttgcataaatccatgaaacaaacagaagagaatgagagagaaataaagaatcttacgtgcatataagtatttagagtattttagattgccaatatcattactgctttatgtcagttttatccaaaatcaatttcatacatacacttgtaaaatctggatataattaaattgaattttaggttcacaaaatgtgtttgttaattagtaattttttttcccaaattttgacatataccaa

SEQ ID NO: 381868 - DNA, 2323 bp, Cannabis indica
gcatactaaaactgaaggaaattacatttttttactaacaacattgaatgcttatgcaaacacatatatacatatatttatgtaatttatcccactatttatccaaacgtatatatacataagaaaagtaaatgatagtgatgaattattagtattatatattccgtcatgcatgtatagatataaatagttgagcacttgtaaccgatcccaagtagaagcttttataatttgtaataatgaaaatttcaacataattaaattcatcaacatattgatgatgagatctcagaaaggggagagttgcttcctggagaagaagaagccggaaggcttggcgaggggcaacaaggctagcatcacgggactttcagcaccttcggcagcaaccaactgcccagtattgcaagtgatatcagttttgacatagccagggcacacacagttaacgcacatttgagggtatttcttcgccaaaatccttgtgtacgcgttcagcgaagctttcgaaactttgtaccccgaaatctccgtaggccacttcttggcttctaacttaccttgtttgaaatcattcagaaactcactcactacctcatcgattcgctcttctcttagcttatcaacatcgctcagcatgtttttggcccattcattcggtatgtactgtcattacaaattaattaagaaaaactaattatacgaacaaagacttttgaaaactatgtatatgatatatatacacgtacttgtaagagaccgagagaggatgagacattgacgattcttggtgaatcagacaattggaggagtggaacaagtgcttcaatcgttgctttggctccataataatttgttttcaggcattcttcagccgattcatagttctgggtcattatctcattccaattgccgttctcctggctgtaacagagaaaattttcttgtgaaaaaaaaatcactaatcattaaattagtcaaatttttgtttgattttcttttacagcaatacgtttatttttaatataaaagtaggggaaaaaacgaaggtataagaatattgaatgctaaaagaactttatatcgatgtggagtaataataaactactgagaactgatcacatataatttatttgaacctcctcagtaaattactaactgaaaaataaaataaaaatactaacccaattaccaccagcaagctcagtggcttgtgcataaccataagaatcaagtgtacccccagcaattcctgcattatttatctgcaataaagtataatatataggtattaataattacttttccttcattaacaaatatttattagtatagtatatatgtggtttaaatcttatactgaaattattaaggaaaaacttatgtaaattatatctttgatatacactgcatattcgtatataattatcttgatattttgaatatgatcaaacgtaggtacgtaccaaaatgtcaagcttcccgaagtgggatttgatgtaatctgccaaagaagcaatggtgtcagggtcaacgacatcaagcctgtgaaaaacgacgttgtcttcactagtgaaatttgattctttgatcagtttctcaacagcttcaacacccctcttttcatctctggcagttaacacgaccttgatgccatttgaagctaattgtctgcatatttcaaacccgatccccttgtttccacctgtaacaacagcatatctgaacaccaaaagtcaacatattttagataaataattttaatgaaatattcaaaaaagtacttgtgaatatcaattatagttacctctttgttgagagaaatgaagaggagtactcttgttccattaattagaatgatgaaaatactatataattaaattgggaagtgattatggtgtccaaaaatacacctctttttttttttccttccctcaacttgaatctatatcttctctcactgttcttgcttatattaatatgaatttggcttgattgaactttttttttcttttttgtatgattggtcaaattatgtatttacctaacagtgtaatatttaataacaaaaaatgtaataaaataattaaatagcaatgcattattactggcttgacatataatattatatccctgtccagcaaagcatatgcttattatgataacatgcatgataccttaatttagttttattggtagaggttaatcataatacgctataaaatatatattattttattgtagactaaatttcagggtttgatttgctttattttattgagataattgcgtaaagttgaatgattgtttttttatttttttt

SEQ ID NO: 381869 - DNA, 1818 bp, Cannabis indica
atgcatggttatgcagctgaatctttggatttgtttgagaagatgagaagagaagttgtgcctgatcatataacctttgttggagtccttggagcttgtagccatgggggtttgctcgatgaaggatggaggttttttaatttaatggtaagagaataccatattgaaccaacagttcagcattacacttgtatggttgatctccttgggcattgtgggcaattcgaccaggcttataatctcataatggaaatgaaagtggtgccagattctggtgtgtggggtgctctgttgaattcctgtaaaattcatggaaagattgagctagcggagctggcagttgagaaactggtggagcttgaacctaatgatgctggaaattacgtgatcttatcaaacatgtatgctcaagcaggaaattgggaaggagttgcgagactgagaaagttaatgattgataatggaattaagaaaagcactgcttgtagctggattgaagtgaaaaacaaagtccatgctttcctttctggagatacttcacatcctaattccgatgcagtatacaaggagctaaagaggctagaaggattaatggcagaagccggatatgttgctagcactggttcagtcttccatgacgtggaagatgacgagaagactagcatggtttgtagtcacagcgagaggttggcaattgcatttggcttaattagtacacagtccggaactaggcttttgataacgaagaacctccgggtttgtgaagattgccatgttgcaatcaagttcatctcaaaaattacaaagagagaactcataatcagagatgtcaatcgttaccatcactttaaagatggactgtgttcttgtggtgattattggtgaatgtaaaagaaggaaatgttgaaggcttgaagcaaagctagcttatatgatctgtctttaataatggatagcagagtgtgccacagtcaaaaacattcttgcatatagttctttgctatgccatccatttaataggggaagctttcaagcgcgaactagagaggaatgaaaatgtatttatacaacaacgattatgagaagatagtgaatgtaccatgcacatagaggaaagaaatgaagttattgttgatggaattttacatcttgatgcagcaacagtgagaccggaagacccatcatgatgtcaaactccgacatattcgggtttgtcctctcccgatttgacccgttctttccaagaattttcttcatatcgtggcttaggttcttaattattgattttcttgagaaagtgtgcacgaacaaatgcaatcaataatcagcaatccattcattgctatcaaattggagatttactctttcttacacaggaaccttgtaatttttagattcaagtacctacatggtcacattgaatccctgtagaagttccagttgctgcaataaaaatggagctcgatcaagaatttgttaagtgttgtttgattggcatttttgaatgaacaggaaaaattataaagataaggatttaaaagagatatgcagtaaagcatagagaaagaggagtgtttatagagttgacaaaaataaaggaagcaataccgttaatgttgtaactcaaataaaatcttacaattagtgttcacagagataatcttcttaagaaaatcccggaagtttgtcaagataatcctttcctgctccatatagggctttgcattagggatccgcttataatttccatcaaaagacgcagtagcttctctcaaaatggtaactttctcatcacattttaacgcctctgctgtagga

SEQ ID NO: 381870 - DNA, 1037 bp, Cannabis indica
cctccaatcaaacgccacctaagtgtccaatcaaaatctattttatactaaaaccaacttcacttccattaacacacataacaatgttatgttactcaagcaacatttaagggagtctgctcaatacctcatctgcctttggtcttttgcttggttctctcttaagcgatttgaccaaggtctccttatggaagttgtgaattttgcagcccactcataaaaaattacccctaatgagaacatatcatattttcaagtgatgttttgtatagacactttctgatccacttctttggtctcattagcttcaacgggttggtaaagacgttttcattgtatacaccttttctccccttcttttctaagagcacaaaagaaagaaaaaaaaattaatgcacattttaaatttgatgaagtaatttacaatactaaaaataattatgaatttttaaataaattttaacctaaagcgaaatcggctagctgaacattatcttgcatatcaattaatgtagatatttgtgaggtgtaatatcgatatgaataatcttgagggaataaatgtgatgcatggccctcaatacttagattcctaaccaagaagtaccaagtcaggcaattattaggtggaaatccacaacatagactagatccattaatggactcaattagcaactaagtccaaattcatatacatggttatgcatataaatatataaattaattttgttaatatatgtatttgattctagaagacaaattgacacaattaagaaaaaaaatctccaaaaattcaaatttgaacaataagtatgtagacataaaatttaattcaaccattaaaataagaaatatatcttgaagaataataaagtagggatatgattttgtcccgtgatgtactttcacggaatgtattccgtggtacattagatgggtctcagggtacatttaatgagtgtcacggtacgttactactttttaaccctaattacccttagatcaatctcagccgtcagatcaaataactccctcat

SEQ ID NO: 381871 - DNA, 2061 bp, Cannabis indica
agcaaatatataaaaaaaaaacactattatatctgcaagaaaatgattacattgtctatcttgtgaacttacttatgataggcaactccttcgcagtttcaagaaacttgaatgtctcattttcgttgctcgtattcacctgtaaccataatagatgaaacttagagcattatataactcatccatgttccatcaatgcttgtcatgcttttgttttaattgaatttcatcatcacctctactatagcaagatgaaaactttcgggtgtactcgaaaacgcagacatggcctcactctcattgcaaaatattgaaactgcaaaagttaataatggaaaagctatgaacagatgtaaccagttacaaacaaccaactttgataaaagacacaagaaaagaatatcaaacagtttaaattttcactgtttacattaaataaacttggatctagaaataattacatttaagatctaacgtacaaaaactaaataaataaacttatgtttttttgtattttaccccatcaaagaaaatgctcaaagcctggttactaattatcagaatcaacagcttaaagatataaaaggaaatgagatcaaaatgggttattaaaagcaacaaaagtaagcaatcactaccaccctttaaggtaaaaaaagaaacttttaatcaatacttgacaaaatggaccaaatggggaaatgaaagaaaaaagaggggtgggtttaaaagtagcttgtgatttaaagagctcatttaataatacagcaaaataaactttatgaaaggtttaaggattagtaataagtaatgaagaaaaatgagtgaaactaaaaaaatttctggttaaggaaactaaacagctacagaaacataacaaacaaagaagttaagagctaagaatcactaaccaacataatccattgcctcaagatttgatcttatattggtagcagaagtggtgtcttgatcaaggacaagcaccctaagaccctttgggaaatctttccattcttccaagtcattagcagtgcaaaccatagctggtttggcatcgtttctcaggccctcttggagtagtttagcagatttttcctcttataaaacatccacttacttctgcatggtgattcaaaaaaaataataatatcacaaatcagacccatctttgcttgatctataataatcttgatctctctagctactattccaactaagaaaatatatataaataataaatcacagcaaaataaaatgaataaaaatactaaatggaaactgcacatgtatagtccataaaagatagaaatacagtctgatctgacaagtttgttgaatacccaagttccataaaaacagtaatttcaacatgtaaacaagtacagttatgaataataagcaccccagatgatcaaaaccaaaacttttgcacattagtaaaagtaatacgttagatataggaaaaaccagcttaaccatggttaagtaaacacaaaaaccttagaagaaagtaaaatatatgaaaaacccaacaaggaaaagaagaaaaagagcttaaaaaaaagattaaaaagcaacaagacttgcatgcagagaagataattagaaacaaccatattagacactaaacccaccaaataaaaacaagagaaagaaagaaaactcatcccagagactaagactacaccaccatatatcattaattacacaaacataatgcaccaaagaacaaaagtcatgatttttaccactctttaataagtgacttgaataaaaaacctctctttccaactttgttgctctaataagtagagaaataaggaagagagaagaagaagaagatcccctcagaccctcttattactccaacttctcatttggttatatgcaaaattaagagagagagagagagaaagacatatagagagagagaggagtaagtgcgttctctgaagggtgtctgtgacatttgaacagttgccatcagttgaaattttacggaccacacagaatatccaaaggggcatttgccttttctctctctttctctctctaaaggag

SEQ ID NO: 381872 - DNA, 3118 bp, Cannabis indica
ttttttttttttttcttttggagagaaaggagtagtttatgaaaatttctgagaaggggtccctgtgggcttatgaagttgaattttcgatctgtgattttgggttgtagaaaagggttactctgggaagcttcgtaatgtttactccgcagaaggtgtggtcgagttggtctctcacgccaagaactgggagccgtaagagtggaactgggtcagggtcgaacccgaactccggagatgcgactaagggcaaaggtattgcttttcttgagtctgggtctccgccttccggattggtagttcaggacggaggaaatatgctgatgggttcgggtgaagctgacacggacagggatagtatggttcagagaatttcccaaatcgaaaatgaggttggtgggttgtttgttttgttcgtttgtttgttgtgttgttttttatattttgtgttgactttgctggaaaaatggattttgtgtcttcctgagttgaagtgtattatgtgcattaatcttaacggaattgactgttgttgttgccagctttttgaatatcaatataatatgggcctactcttgattgaaaagaaggagtggaattctaagtatgaagaacttagacagtccttggcagaagctaaggatgctcttaaaagggagcaagcggcacatttaattgcaatgtctgatattgggaagcgggaggagaatttaaggaatgccctgggagttgagaaacagtgtgtccgtgatgtaagattgaatattctcttgatctcgctttctttgattatttatacacatttatattcgtagagattattgatgaatgtgtacatttggagctggtagtttggtggtattgttatatagaattaactctcactgactgtttgctaatatctattcttgttatttctgcagttagagaaggctttgcgtgagattcgtgctgaaaatgctgaaattaagtatacggctgactctaagttggctgaggcaaatgctttagttactagcgtagaggagaaatctctagagctagaagttaagttgcgtgcagcagatgccaagcttgctgaggttaacagaaagagttctgagatagagagaaaatcacaagactttgaggctcgagaaagcactgttcgtagggagcgtttatcctttgttgaggagtatgttcaaggcttttaacttgttctattattatattatagcttttatgtgctcattgagtgtgcgaattcatattcattatgttagagcattatgacttgttttaactatcttgtatgttgtatcaatatggtttgattttctcaggcaaaaggcacatgaaagtaatctatctaagcagaaggaggatttgcgggagtgggaaagaaaacttcaggagggagaggaaaggctagccaagggacagagacttcttaaccaaagagaggacagagccaatgagagtgataggattttgaagcagaaacagaaggaccttgaagatgctcagaggaagattgatgaagctaatgcaactttgaaggagaaagaagatgattttagcagtagagtaggaagtctaaccataaaagagaaggcaagaactctcaaatattgagctgtctttaaattgtctacaattgaaatgttagtaactctttttctgggatgcaggaatatgaagctttgcgaataaacctagagatgaaagagaaggaattattcctcttagaggaaaagttgaatgccagagaaaaagtaagcttttgcgccttttattttttataggagatacaagacttggttagtagggtaatgagatagttttgttggggctgacccacttgatatctccttatgtttcgctcccaaatttttgttcttccttctctttctgccctttttctttcttctttgattaaccacatttaagttagttttgtatggctgactggatatactaccatttgcatgacacaaatgcaggatgaaattcagaagctaactgatgagcataatgcaattttggaagaaaagaaacatgcatttgaattggaagtagaacaaaagagaaaatcactagatgaggaattgaaaagcaaggtggttgatgtagagaaaaaggaagctgaaattaatcacatggaggagaaacttgcaaaacgggagcaggctttggaaaagagatgggagaagtttagggagaaagaaaaggatcatgaaacaaagttgaaaaccctaaaggaaagggagaagaccgttaaatctgaggaaaagaacttagagaaggagaagaaagaattgcttggtgacaaggaggaattgcttaggctcacggaagatgttgaggagataaggacggaaaatgaggaacaactgaggataattattgaagagaaagataagcttaaagtgagtgaagaagagaggtcagaatatgggcgcttgcaatcagaattgaaacaggaaattgacaagtacatgtacagaaagaattgcttctgaaggaagctgaggatctaaagcagcaaaaggaaagttttgagagggagtgggaagaactggatgtgagaagagcagagatcgataaagcgctgaaaagtgtgagtgaacagagggaagagttagaaaaactgaaacaagttgaagaagagaggttgaaaaatgaaaaggcgtctgtacaagactacataagaagggagcaggaggatctcaagttggcgaaggaatcatttgcagccaacatggagcttgagaagtccttattagccgagaaagcagagagtgaaagaagccaattgcttcatgattatgaaatgaggaaaagagaactcgaaactgatatgcagaatcgacttgaggagatagaaaagccattacgtgaaaaggaaaattcctttgaggaagagaagaaaagagaactagataatattaagtacttgagagaagttgccagaagagagatggaagagttgaaacttgaaaggcataaaattgagaaagaaagactagaagccaatgcaaataaagagcatcttgaaaggcagagagttgagatacgaaaagacattgatgagctttttgaccttagcaagaagcttaaggaccagcgtgaactg

SEQ ID NO: 381873 - DNA, 2716 bp, Cannabis indica
tttttatgccacgtgttgttacttttgacacgttatcgtcgtgaaaatttggataaacattatctatttgtaatttaatctacttcaatattacgagattatatccaccaaataatgattataagttcacaaaaaataaattcaattttagccttttaggtcactatgtctaaaactctcttcaaacaaatgctcctagactttacttttgttatcactttttttttagagtgataataagtctttacttattaggttacttactattatcactcttggtacctctatacatgtaaaaaaaaatggaaaccaattccaaatattgcatagtgatttgtgaagtaaataggaatcccttcacttgtttaatacaataatctaataacttgaagagaaaaacaagatatttagtgacaagaacatcaccaaacttataggcaagaataaaatatacaatccctgacttttatcagccttgtcaaaaatagcacatcaacgttatataatatgtcttaaaaaacaaaaataatagatggaatgttgggtcctttgtaggataaactttatcattacctttctccaaggagtaaataattactgtatcaccatgcttaattaattaattaattcctttctcatgttgtcatctcctttatcaatctttgtgaaataaaaacaaacccttcaccatctaatggttcctcatataaagaaatgataataaagtattaattttaaacacaaaggtgagtaagcaaaagtttgaagtcaccttgcgaacagaaaaaaaaaaacccctaaaaaagtataattttacaagctatttttttattctatctttttttttttataagtaaaatcttcattgaacgaaaactgaaaactaagagaaaaaaaaaatacacacagagctagtttctggaagcaacaaagggtgcaaccttcctagaagagaaaaaataggagaaattacaagaagctatccaaaccgtaacatcatgagtatagtgacattagaggttctaaaaatccaaaaaaaacttattacagaagcaattacccaaaagagaaaacaaatagagaaggacattagtaaggcgctaatatgggcaggcactagccacaatggccatcacaagttacttgcaattagaggatttccacccctgactagagcatagtgcgatagcatgacaaagagcgagagtctccacctccaagagagaaaatacaaaaactttcgtatagtcaacgcttctacaaacttaacgtggctatccaaaacaaggatagaaaggaaagccctcacaccccgaaacgcagaatccacaaacacattataatcacactaagctcttttaaccacctcaaaacaccatcatccgcttgggatataggtgtcaaggagtgagcattgtgaaagtccaagactcttgtcatgacctttcgaagaagagaccttggctccatcacctaattatcatggaaagctctattcctagccaaccataaattatgccaaatataggatgattagttaaaaacacacctctaaaatactttaaaaaaatgaacttaaaactaggctatcactcgtaaagacggttagcaataattttataaatcactttataggcaaaattacacaaagagataggcttgtaatcattaaactttgacgcacaatgcttttgggaataaggacagtaaatgtttgattgagagaactaacaaatttcccatttgtgaagaactgagtaacggtacccacaacctcattctccagaatattacaatgagcatgataaaagtggctcgacatgccatcaagtcttggaatttcgaattgacccatcgatcacacaacccttatgattttctcacttgaaagagctaaattgagcctatcattcatactcacactaacatatggcacaactagctcttctaactcgagagtgaagaccaaattagacaattgatagaccattttaaaattctgcaagaaataatcaccaatcgctctacgaccaccaatccaaatttctccatccttcgaaatagccccaataaaattcttttttcttcgaacaatctacgaggcatggaaaaagtaagaattcctatctccatctcgtaaccaagtctcacgagatttttgtctccatatttcacattgtctagataagacctcttcaatttcaaggagaatgtctgcctccagctgaatattttcacgggatggcagtcttttctgaatatccatgagaaatttgtcaagtattttccccttctccttgcaaaactcaaaattagttgtgctccatagcatcagcttcttccttgtgcgattcaacttcatcaccagctgaaagcttttggtccctctaacgtcaatactccaagcctctcgaataacctctttacaagaaggatctcgagtccaagcatacaagaacctaaagggtgtatgaaaattatccctatcaaagaacaagtccaacacaataggcgcatgatcagaggattggatagtatctgaaagggatgcattgataatctttatatatttaagtatatgaaataattttttattcaatttttatcttatggtcatgtaaattatagttatttaaaacatttgacaaaattttaagaaattcgaaaaagtttaacatactaaaaattgcgttcaaatagtgtgttgcacgagtga

SEQ ID NO: 381874 - DNA, 3295 bp, Cannabis indica
atatatatatgacacatttgcctactctctttatctctacccaatttgccttacgaatcttcttttctttcttctacagagaataatatagcatgtaacaaaaacactattacataaaaacaaatttcatattcaaattcgcccaacacataaaacaaactaacccattttcttttccaaatctttgtatacatttcaaattgttacacttactcaatttagttggctgttatatattgaatggaatttggaaaagaaaaaaaaattgttgggtttcttttttcttgtaagatttcaatagtaggaatttatatttggcaacttattccacaagagacctaattttatataatatatattaataaataaaaagatactctcatataaaagagaaggggattcacttttggggcaagctctagctagcttcctattgtcttttttgttatattggtgtatgaaaaaataaaataaataaaataaataaataaataaaaattaagatatgcaaaggatagtattatcccaccaaaggttggtgatgttactggaaatgggtcctcctcacatgggcttgttaaggcttttcacatcatttatgagtaatcataattttaatgtaacaagttggttgacttgttttcatttctctactcaaaaacgttacacaactatatatcatttaattaggccttcatatacagcctgtgattaggtcaaatattttaatgctatctcaatatatatatatatatctatatatatatttatagtatgtgatacccaaatgggattttgacccctttatttatttataattattatagtaaccttctaacactaccattaaaaaactaaaaactattccttcacaatcttcttcagcatattcaagaatttatcccataaacccaaataaatatatatacatatagtacaagatacacggtacccatttgcaaattattgttttcaatgctttttctttgaaaaaaataataaactattgtaacggacacttgatttctattttccttttcagactaagaaacataactagaagtaaacatagtaatgaacattgtgaaaacccaacaaagtaatatatagtttaattgttgacaaactaagcaatctatacccagctattgtaaccaagacatgtgcaattactcaattaaagccataatttcagaactttctttaatcatttatttgcacttgctatacaatttttattgattcatttatgcgtttccccttggaatttataaaactatttgacttattttgaaagggaaaaatatttacatataataacgaaactaatgtcctatgttgcaggccaaatagtgtacgtactattaattttttagtgcacaaattaaatatgccaattacatataagtacatatatacattccctaattcagcatctgggcatttaggtgtcatttatacaaattttatgaatttttttctctcttccattccaaaaaaccgaaggctacctcccttagtgaagacctacctctacattttctgcaaacttcccaaaataataaattgttaaaatgcaaacaggcaaactaatttggttgtttaattaattactttttcttctaattgacaaatttgaaagtgttattattattattattttggttttcatgttttcagagtatttagtctacatatcgatgaactgtcaaattttaaatcaaaagagcattgttattggacaccagtggtgcctagcactttctagatgtgtcgccttgcaattggttagcgatactccataaaaattattatattaaactatatgggacctgatacttaattgcaccaatagcgatattgactagcaccagtggtgccctttagcatttctcaaattaaaatatcaatacacataccacaatttgcatatactatacatgtaaatagatagcgattattgaaaaaggtacctagaaataataaagggatcaatgcaacaacataaatactactacactaaactttatattgaaacaaagttagaaaagttgggagaaaacacaaaatgagcatcgaaatgaatgagcatattcaataagtagaaatgtatttttttttagttatagaaactatttagatcataatttccacctaaataaatgtatctttatatatacatagatattgattactacttgtcatctcaaatatagttaacataaacaaagtgacaagcaagaatggaattagaaaatacgtacaaatgaagatttgttcctttactctctacccattatatttaatgaaacatatatacatatacatatattatagtttactttaatgtgtatagttaatactgacttggttttgtgtcaattctagctagccttgggcttgagagttgaattgaaatttgtgagaaatgacttgcccaatgggctacttgggcattaaataatattgcagtttcaaatgcagctgcataagtagatcaaattaaattcttctccccattaatccattaacactgcaaccaactctcaatgcttatgcatttattttactccatttaattctttttttaataccacaaatatatgccttcgtttcgtgtcacccgaccaagtatatcatgtccacattttctgcagcataaccataaggagtaagtacttgtgaaatttcttagtagttagtaaaatttgatgatgattttcttcctccctagctagtattctcatttgattctcttaatatatatacataaataattacataatcttcatgaagaaatacgataaattttacttcaaagacatgtttagaactcaggattggactgaaaaggattaaattaaatagacaatattaaattatgttaaaagtaatcttattacttttttaaaaacttataaaaaaataaaaataaataattctaagtaaaaaataaaaaggaataataaaaatgattaaattataatataaaagaaaatatcatatataatcaaatatatatcataaatatacaataaaataatttatcatatttatatttaataaataattacaatagtaaaataaaaatatttgaataacataaaattatttatgctaaataataatttaaccactaatttaatataaataataattttctaaattaataatataatttttttaataattaataaatataatcttgttattatattgtatgtcttagaattattttaagtaactattgtcaaagtaatattattttaaattttaaaaacttatgtataataat

SEQ ID NO: 381875 - DNA, 3752 bp, Cannabis indica
aaaaatatactcaaacttgttccaataaaatttaattttcacaaatattgtgaattttaatatattaatttaataaaaataaataattttttaaatcgcttaattagttttaaaattttaatttcttttttaattattttaatcattcaaaataattgtttttaagatttaaattaatctattaaaatttaccaaaaaaaatgttgaatttttcttatttctattttaagagggtacgatttgatagtactaaaagttcaatagaaatttttaacaagccatatattttagaagacaaaatcagtattgtcgaaaattcaagaacaaaatttctaattatttatttttaaaacagaaaaaaattggagccctagactgagtggccgtaggcgtcggcctaggccgaccggccctccccagtctatggttaataaagcctattgtgtagaactctatttagttttcgttagtgcttattatttggatttctaaatttcatatgtgctttgctgataaggcagactgatgaattctcaacagaggtttaactttttaattaaatgaaattgggcattggattgtgtaggcactgtgtggacggcatgtgcacacattataacggcggctataggggcgggagttctgtcgctggcatgggcgatgtcacagctgggatgggtgttgggtgtcggcattctcctgcttttctcggccatttcactctatactgccactctcttggctgattgctatagaagtcctcatccagtcaccggcagaagaaattactcctacatcgaagctgtcaacgccaatttaggtaccaaattagatagttaactataccatatatatatatatatatagttatataatataatcattgtatatgcgtatcatgttctagctagtcatgtaagtcttatgtataccgtatagaccatagttagttttcctatatttatatttatcacatttttttctcctaataataaagcccggcttccttatgcatgcatatgcttagctaataattgaagattttaatgatgggtgaattaatcaggtgaaacaatgtgcaagatatgtggatggatcctgtacggaaatcttaccacttttgtaatcggctataccataaccactgcaaaaagtctagtgtaagcaccactactacttttctatttttcaaaagtaaattgataaattaattgatgatatgctaatttaattgaactaacgatgtacactgatcgatcgatcagggctatacaaaaatcaaactgtcaccgcaaaaaggggtcaaatatgccatgcagattctctaacaacccacatatgattggattagggataattgaaattttgttatcccaaattccaaacttcagcaaattgtcttggctctctgccttggctgctgccatgtcatttgcatattctttgatcggaataggaatgtctattcaaaagattgtaaaaggtacctctatttcatatgtaaataaatacacaaataatccaactaattctacaaatgaaagtgaataattaacatatttatattgtaatattatgaacaggggctgaggggagaacatcaattaaaggggtggcagcgggatatgaggtggggatgtctgcagctgataaagtttggagaatgtttgcggctgctggtgatattgcttttgcttgctcttatgctcaagtttttattgatattcaagtaagtttcattcccattaataattaaattattattattgtttctctaagtcaaaaaaaaaattattattttttttgaaagaaaatgaagaaaattaaacctctcggtcattacaaaataagtctgatggcaagtaagcaacatgcaaacaaccaaactgattgtgggtaaacgcccacttagccacatcatgggcagcaaaattactgtttctgagaatacaagtaaaaatacaaccaccaaaacatctagagagatccaagcaagaagaagtgtatttctcaatctcccaacacgaagtcacgtggttgagagagttgatcactacgctagagtcactctctatgatgtacttgtgaccattaagctttgcagaatccagggctaaacaagaagcagatgcgtcgccacacagcgcattcgcaaaggtcgtagaaacccagaccaccttgccaaaatagtctctagcgaccattgcaatgtacgaactgtccaaaccaactctgacatcacaatttagcttgagccaatccgtgggaggagggctccagccatccctctagatcggggtcgcagcgggtaaaaagcgactttcaaatctacataggaacaatggatagtgtcaatacatttattcattttaagcatgtaattattgtggaccttttcattcatgacccgccaaatagtatccaccacaactaaagtatagataaaaacttcaccaatatttatgccttagtattgagagcccaaataaatttaatccattcccaaacacagattttcgaaccaaaaacaagatagataccccacaggaaaaatctctaaaggtggaaagctaagttacatgtaaggaatagatgctccatagattcctctaccattacacaaatagggcatttcacatcatcaacatgaaatctcttcttaagaatgaccctaaggggaagagcattagagagaatgctccgccaaaggactttgtgcctctccatgattttactattccagagcttgttccaaaacgaaggtgccacctcataatgaggagctctctgtaaagcttgaataagtaggccaatttacatgaaaaccggtcattacactctttggcccagatctacttgtcagttcctataccagacagatttcccctttcaaaatagcagtaactgtttctttatcaacatgtcagccaccttatcaaaaccacatgcaggccacccattagatttggggaagaaggagtttccatgagtcacccacaaatcatcctaaatttttgtgtccttaccatcagtgaccactttacaagctcctttacgaagaacgaacaagagagatagagtttgaacttttttttagatataaagtttgaaaaattttatcgtttaggattttcagtatggagagagagagagagagagagtttcaaaatgtgacgtttattatcctttcttaattttgtttttgagttggaaaacaccttttacctttttttttttgcttaatataagaaacatattttaattatacgcgtgaatcagagcattaaatttggtcgacagagaatgcttcacgcgtgctcattaatttttattttttaaatgaggttcacgtccaactttactagacacaagctgtacattataaatgtgtcctattcaacaaagctggacgtgaaaaagacataaaaaataataaaaaataaaaatataacattttacgtccccaaaactttcatgttgagcattgctagatatgataaataatctttcatgttcattattaatgctggacatgaaaacttcccaaaatattttcatgtcccgcacttatttttttggacattgaaggggttttctgtaatagtgttagaaactattataaaaaaaagagcattgctcttggacaccagtgctgcttagtaccttttagagtggcgtcctgcaattggttagcgatatttcctaaaagattatattaaattatataggacccgatactttttttttttttt

SEQ ID NO: 381876 - DNA, 685 bp, Cannabis indica
tgtgaggcctcttaatatatttgggagtaggtcattcatggacatgtaactggtctccttttgaaagaaaaaaaaagtcagtttcttcagctaagaatgtgtatcaaagactaaagacatgatagttgacagtggtgggaaatctatttttataaatggctcgattcattctgtgttggaggatgggagagtgtgggtttcagataccaatgaagtattctcttgtaaatcagcttttcacacttagttcgtatcttttggctcctgaggacaggcgggccaaacacagtttggaagagctgtgcaccatcaaaagtcaaagtgttcgcttggttacgagctttggaattcattagacgcttcacagaggtagccatgccaattgttctctcccggatgatgtgtatgctttaagagaaatggagagaacatctttcatatttttgaatggagtgtgattttgttacagaattgtgggttaaattgctcactgtatatatcacactccattcaaaaatatgaaagataatgaggaagcagcaaaatctgccatccttgctgttctttaggttgtgactggaaataaataatggaatcattgaagataatgaggaagcagcaacagggctttgggagaaagttatgttttgggtagcaacttgttttttttttttttaagcaaata

SEQ ID NO: 381877 - DNA, 4537 bp, Cannabis indica
gtacgtatcaccctgacccaaaagtaggcttaactaacaaatcaaagaacatgtataatactcttgagatcgaacctaaacatatcaggattaagatcatttgatctaggatcaacaggtgatattgaattgaatagatattacggtaaattttaatatatctaatcaaagttcaatatcggtcccttccgatgtatactccatacatccgatgctggtaaactttgccaatgccctggaaaggacataacacttatccaaggtgtaagaatacctatcgctgattatcatgtcagtctaaatccagtgaactgacaaatcagggaataaactttcgaacatataattaagattatattccactgtgttgacaacactataatcattaacaaattcatatgttctggacttaaatagaattcatacattatgtaaataatcatgaaataaatcatgtgaaccatgcaacattaaatgttatttctgatctttattaataagtaaatctgattatattgaaatgagttttatttagggcataaaccaacagctagaccttaggttagctggtaacaataagtcaaataactcaaataacacagttagctcaaagcttaatcatgtcaggattaatatcaaattaatctctgataaactaagtgatattgactaagaatagatataacggtaagatctattatttagtcaatataggtttagtccgatatatatatacaccaatatatctgatacaagtctattttcctaatgtcttgaaaaaaaacataacacattgcctttgtataaatagaccacattgttgattatcatattagtgtaaattctgtgcactaataaactcaagggactaatactttgaataatataatcacaaatatattctattgtgatgacatcattataaatgtgaataactatatgttttaaatttaatagaatttatttattaaaaatataatcatgtatgaacaaaatgtatgaaccaagcaattgattacatcataaataattttttttccttattgaattaataaataagataacataaaaaaatattttatctagggcataaaacccaacaagttttgctctgggaatcgatcttattttgcctccaaaataagatttcaatgtcttgacaagtgagaatgtcatgtaaatgtgtcacatttaagcaaactgacacccttgtgcactagtgatgacctgtttgtcattcgatcgtcacctgtgtgcaccgagtgaaatcaccaagaacggtgaacaacttagttaaggaattagctaagggataaattcacatgacttagacatcttaaaatattcccataactcatgaaataaagttatgggcacatagtttaatgttttatgtcaacctggtcgcccatatgtcaagctggccacccattactgcacaccttgcagtattttggccataactcactcgttacttgtccaaatgatgtggttcaagtggaattttaaagatattttcaagccccatctacacttatataatagctttcttgcaattttaaaaatttcagttcaaaaatttagtcgcaagctgagttatgaaatcccaatgaaatttagtaatttttttttattgttttattattattattatttagttggacctccattcctataaataggaggctcctctatttcaattttcacattcacaatacactctacaaggtcatatattctctctcatcatgtgtttcactctctagaaattctgaggtgaaactttccttagttctttttttctcaagttctctagtaagctacttacttttcgtgattaataaaagctcgagtagacataaatctattatcggcttacacgagcagtgagctactatataattgtagtgttctttctctttagttcatatttttctttttgttgccatcaattataaaataatatgaaatttatcgttttacaacgtcaacaaaaagtatagtgtaaaaaaaaaaatgattaataataaaaattagaaagaaaaaaaatataaataaaaaaaaattataaacataggtgaggctaacattaaaatataaaataaaataattatatgcatagcagataatactttaattttttttaaaagcataattttctaaaatttacaaaagataaataataatgtaaaacaattttataattgcttgcactactaaaaatattagttctttttagcgctttaaacaatcgggtaaagtatccacatcgatttctataactgtcgcctattcgataatcgcaaaacacgggaaaaattagcgatggtttgaaactgttgctattttttcattcccgacagtttaaaaccgtcacctatgatagagtataggcaacagtttatccatgcctaatactatagggcgacggtttaaaataatcacttatagtattaggcacgattgtaaatcgtcgcctattacctttcataggcgacgattttaaaccatcacctatagtataataacctacttttttattattttaaaattttaataattttagattttcattatatattcgtttatatcataatcataattgtcaaacaactcaagcataaatagaaatttatcaataacacaaatataattacaatttatagtgtactagtttaggcttacaaaattttatactcaattctaattctattatcatcaactatgaagcaaaaaaataatttaccaaatgaaatacactctttaaatcctaagatctcaacttcaaatatcctctagtattgctccaaagaaagacttaacaatatacacacacaatttaaaaaaaaaaaaacattaatgaataagcatgttagacttgtaaggaataattatttcaatatatcaaataaactttgtaaaattaaaatttaaaaccaaacattacctaaactacactaaatttataataaagtatactaaactttattttcctaaataaataaacttacactaaaaaatttctttacctaaactacattacatttattttttctggtaacaaattaaacattaacattaaaattaaaatgctataaaaaattttataaatcttttttcaatcaaaattttaattcaaaatatactaagtatattttctaaatttttaagctatacacactacaatatcactaaaaaataattaaatttcacaaaaaaataaaatataatctctcaaacttcgaaatcctagcccactagaattcttatgcttacaaagacgtctccaactaaaccaactaactactttggatttatttggagaggagccccaccaatatttagacattaggctttcaagatgtgagcaagttttcaacggtagcagaaacatagacatggcaaagctaggcaaagcttgagccaccgtgttgagcaagatttcacgaccaacttttgacaaaagacgaccttcccaattttgaattcatttatgcattttctcttttaagaaacctaaaatggcatctttattcctacccatagtacatgggaggcctaagtaagtactacactcaccagccattcccattcccaacaaagcatacaactgatgacgcacatcagtaggagtattagtgctaaagaagatagaggacatactgaaattaacttgttggcctgaagcagcctcaaaaagttggaggagatgtaagatatttgaagtctttttctcatttgcacgacaataaacatagctattatctgcaaagagcatgtgctagataatcgaggcaccattagaaacttacaacctctcaaccttccatcacgttcaaaccttctatcaaagaggagaatccctctgcaaaaattagaaaccaattgggagataaaggatctccttgacagatccccctctcaggtacaatcaggcctaattcatgactgccatggccaatcttgtatctaaccgagtccactgtagcaagaataagttcaacaaagcgtgtatcgaatctcatcttccccatcatggcacggagaaagccccactccacatggtcatacgctttgctaaggtctaattttagtgccatatacccttccttccctttatgcttccttttgaggtaatgcataactcaaaggcattcataatattatctgagattaggcgaccaggtatgaaagcagattggttctgagaaataatctggggaaacacttcttttaaccgattagctaacaccttagaaataactttatatagcacattacggaaagatatagggcgtaaattgctcataaacattggctatttttgttggaatatattttatcaggatctagatttactaacaagtatgtttttaacatcctaatatgaatttctaaaacgatgaaaataaacacataaaaagtatgagaaaccttacagtggttgcagcggaattaaatgactcatcccgctcagatttctaacccttgtatcctttttgtagcagagtatcaccaagatttgagcccgattctc

SEQ ID NO: 381878 - DNA, 2907 bp, Cannabis indica
gttttaaccgaaggcggttttttcggtgtcggtttttttggtgttcgggcggtcggtgtactcagtttggtcggtttcttgaattttttgctcacccctagagtagcccatgttcttatatatgactcaatattgttacatttaatccatgtaagacaatattctccaataacctctaacccaaactcctacctgcaacccaccaccatttcttcgagttgtagtgaccggaggccaccccattgacatttgaaacgaaaaatcaccacacaccatctcagaataagcaatgacatgtcgcgcctctgccactaaccaccaaaccagtcaagtgggattcattaaacaacactcatgaccgtcccaaaagagatcaaacaaaaaaggaaaaggaaaggtacttcaatagaaactcacataggataccgagtctgactgagatccccatgccataacaattactcccgaccaaagccctacccaagtccatagaagagtcggccagattgaccagatgcaatcaaggttctctgacggctaggttataaagagaggaaaatcctaccacggattaattctaatatatacttctacacaaggccagccgtaggcataggcggattcgggggcccaaaataaaaataataaatttcattaggcttttattaaagtaaaattaaagtgtactataaataataaatattcataatttagttggttgaggtgtatgacatattatagaatgttaagggtttgaatcctataatatttttttttcaatattttttagggctccatatttaattcatcttagatccatatattcataggaccggtcctacttcaacatatataaatatttgtatgtatagatatatttcttttttaacttctaagatttatttatttatttttattttgaaatagcttgtaaaattacaaatataagttttaaaatgttttttagcaaatttaaaattatcaaaatttaaatattaatattaatttaaaataaggacattactaattcaaaattaattattttatatttgaactaataattacgaaaactactaggaaatgagtaatatatattttacaattacatatattttttcaaaataaataataaatataaaatatatttctccaataattttgtaattacatatttatccaaacattaacttttataattagtaaatatacctttacatttttacatgttctattattttcactttacatttccttagttaaagctgaggttgaggttaggtaccttcttaaatttgtcggttaacaaacaaaagagtaagaatatttataatgtattagcattaaaccccaaaattgatttgacagcaacgttgttgttggttcatattttttttttttagaaaaagcgtttatattataaattcaaatagttatacctcgtggtcgttacacaatatattattaggtaaaaccgaaatcgggatagacttaaacacttgatgagcaaacacccatttaactacattatgagcgacaaagttacaagttctacttatataagtaaaattacaatatattgttacgatgtcgttggttcacataaataaatatgctattggattttggaagtaataaatacgatctgataatgaataaatgatgattgatgagtccactatcttcatgacccacctacactacactaacactactcagtgcatttcatctcatgggtcggtgtatttttattttatttttgaccctcaattaaaacattcataaaataaagctaataataacaaaattatagtttttttaatgttaaacgatgcgtataatagcataagtttagcttatttaatagaatgttatttttattattttttttttgaactcaattattttttctttatattttaaagaatgagctataataactcaaatttaattacttatttgatgaaaaatttaactcctttgataggaatgctcaccatccatgatgtcagccattggaatatgtaaaatttgtgatacatttgaatcaatatttttttttttaaaaaagaatactatatttagcaccttcttttataattgtgataaaaaaaattaacttcaagaaatctacaaaatagagtcattaaattttattaattttattttgaatggaaactttttattaattaaaaaattatatataaagttattttttaactttatatatataaagttatttaaataactaaataaaaggtaaaaaaaaattaattataaaatacattaattgataacaaataattaaataattaaaccgaaaacaaataattaaataaaaaatgtgaaatatattgtgtaaatttgttctgcatactagttttcaagttggcagggatttaggaataaaaaaaatatcatttttactctgtgttttgcaaaagttaccaattaaaatttgttttttgttaaataataaaatggaccttgtatttctaaaatggcataaataggaccatgaactgattttttgtcagactaaaatttaataaaaatccgatctaaatgtgttatgacaaaattgtttacatttttttttttgtatatgtttgagttatgaattgtcttcaagttagttatattaaaaaaaaattagttgaaaattaagcttagggttctatttttaccattttagaaaatatatggtccattaaatatcatttaacaaaaaataatacatatattcatatatagtagaacctctatttaagaatactctattcaagaataacctttataaataagaataacctctaaaattgtaattagttatatattttttaagttctgtattaacaaagtatacctctatataagaataattatatcttaataaaatatatacatgta

SEQ ID NO: 381879 - DNA, 2436 bp, Cannabis indica
gaaggggaaacacttgggatagaggaactattactattcttctggtgtgatttcaaagggtctactaagacctctgccattagagagcattattgagagagtgatcgagttctttgtgactaagaacgcgaaggggaaacacttgggatagaagaactgttactattcttctggtgtgattacagagggtctactaagacctctgccattagtgattgtactgtttcaaacttgttcatattggattaatgatggtggcttttggctggagtatggccataaatagatttgattcctaggactggaacaaggataaatcttgtctcccttttctattttattttctgttcatgattgattaatttcaattctgctttggtgtttgatttctttgaatgtttttatcaatctgtgtgtgttttagatgagttttgatgttgttgttgagatagaatttctaaaaatatatatgtttatatattagtaggggaatgaaaatttgttaaattttttgtaccacctcatacatatttaagcagaacattattagggtacgcttgattgggagaaataaaaatacataaataagaatgttatgagaataagaattacaatgtagtgaaataaaatttaaaacattaaaaaaattgattaaaaatttttaaattattttttatcttacattggagtaagttggtatttcttttcatttaaaatggagtagtcatttcactaaaatggtagaatagtcattcttttgaaataacattctaaatattttaaaatactaccgaacaaagaactagaataaaaattgattctcttccattccacattacattttattttattacttccaaccgaaaacaacgttcatgttttacttgttgttgtatattaatacaaattttgaaggatgagagaagttgtggtagttaatttcaaacattaatttgagttaagttgtaatgtgtggtataattaaattttactcactttttgtactcttttggagcttgttgaccatgcataaaatgaaagcatcatcatttctgcaatacaataaaaaataatttctaacaaaaatagtgatggatatggaaaatattttcaagagttttcatgtccagaattattgtacatgaaaaaaatattcatcatgtccaacaatgctagacaggggcctcaattaaaaacccaccaaatccaacccatcgtcatttcctcgtcttctccttttgactttgaacccagcagagcatgaaaactaggaccaaaaatgcaaaaacaggttcagcgggaggtttgatttaagtatttataggcaggttttcttcaaattatttatggggtttcatttacaactataaatataagctattttgtgttttattttgataaataagctaagttttggtagaaatttgatgagtgctattattttttaggatttgaagttagattttgatggagaaatcaaacatttgaggatttgttgttatttttgaaggtaagataaaattctttacgaagtttgtagtttttatttatttatttatattttatctgaatttatatacatttatatacatgataatttgttaatgatttattataataattctttttttatatatatttttatacttttttgttttatagttatttttattattaaattttttatttacaatatgttaaggttaaaaataaatatgaaattatataaagtattttgtaatagtgatttcaatattttttattttaatttttgtagtgattatttgtataattatagtacataattaaaaattttgatttatgagcttacttattattctatatatcaaaatacatatactaagtaaagttccttaagacattttttttatggaaacataacaaattttctaacataataaaatttaaatatcaattactttagtaaagttttcaattatggactaaattaagtaatttataaattagctaattatatcatttatagttttctataattattattgaattgattgttattttagtttaactttgattgtcaaattaatataacaaacatgtaaattatttatatatatatatatatatgatattgtttacattcttcacttaggtagagcattgtttgttaaagtaaggattgtattgagcacttatttgaaattagaagaggtatgtcatttattatttactttacttttgtttattaattattatctgttgactcaaaaatttggacttgacttctaagctacacccgcttcctagattgacgagaatgaataaaagtagttaagtaattaagagagacacaatgttaccgattggaccctgtgttttgttaaatgacaaaatggaccctgtattttccaaaatagtaaaaataggaccttgagcttaatttttgataacttt

SEQ ID NO: 381880 - DNA, 1429 bp, Cannabis indica
ctctctctctctcatttctaattcatgttgggtttacgttattatttatcattaatccatgttctaattcatcactactcttaatgtgttagccctttttcacttggctcacttttatgatttttgggctcttttggaactgttctaactttgtttatggtttattcgttaaggtataggatatgctcttgcgaaagagtttttaaaagcaggtgataatgttttgatttgctcaagatcaggtatttacttactaattactggtgatattgtatctatagcttcaattccagtgttcaattcaactacttatcatgtgttttcatgtgctgctgttgttgtttacggtgtaaatcttatcctcctttgttcttgttttgaaattcttttgtctattatactaatctcaacagtagcttttcacttcttgccttctctccctaatttacatttttcctctgaataatctgttatcttcttcaattttccttatctctggttattttcatgatcaatggagttgcacatttctattatgtatcatcacatattataagtggtgtagtttatgaagtcactacaataaagaatttttagtataattggtgatatccatcaaaattatatatattttgaatgtatatattctgtattgcagcagagagagtggaatctactgtacagagcttaagagaagaatttggggagcagcatgtgtgggtacctcctttacaacttattttttcattttaattatgatatattttttctcatttctttcctttttttaagatagtctgtagtatattttcatgccaatagtccaaatttatcttttacagggtactcgatgtgatgttaaagaaggacaggatgtcaaagatctagtttcatttgccaaaagaaatttaggctacattgatatttgggtatattattgttagacaaactttaagatattcatttgctatgcctagagttttgctgctgtgttaatattcttaatccatgttgatgatacgtgcagataaataatgcaggatcaaatgcatatagttataaaccactggctgaggcatcagatgaagacctcatgtaaacttctcatctttctgtatctgtaataataaatgtcccgtgtctgtttttcaccattgtctgattgtttgtgttctggattcattacatgcagtgaagttgtcaataccaacacccttggtttgatgctttgttgccgagaggtagaagaatttcttcctttgacttgctttttcttcctcagtttctttataggatgattcttatgcatgtaaatttaataagtttaggcaataaagatgatgttgaaccagcctcgaggcgggcatatcttcaacattgatggagcaggttcagatggaagaccaactccaaggtaccattttaattt

SEQ ID NO: 381881 - DNA, 3828 bp, Cannabis indica
atccattatttatcccaccctactgcatgtgataaatcccagacagatgaggttagttggattagttatccgaacttctaacatgcccaaacactgaaattggacaaattagcctctctaatccaatccagtcctgcgtaccaaacatgaccttttagaaaatacatgatctattttatcatttaacacataatccaaaatcaataacttttacaaaaaacacaaaaatttaaaataaatattaattctttattttattttagtgactaaattaccaaataaagaataaaaagaaaaataaaatatttagtggcaaactatgaaataataagaaacattatttgaaggagtaaaagcataccttttcttggaaaaataaataaataaatttcgcgccttctttggttggtctctttctctctctctcatattttttcttacttataaaatcagaagagaaatgcaaaaccccattaaactcatttgcagacacacatttttagggtcttcaaaacaaaaatcaaatcaaatataaatattttctttttcactttctttctgtccaaacatgaattcttccattatacgaatcagtactcatcttcctcttcctcaatgttgctttccttcttcaacaacaccgataaagcattctaacaactctaccttaagatgtgctaattctaagttcaagagaaataattctttaaaatgttgtaattttctctcaccggaattgaatgccaggaggaggaaccctaacagtttcaccgagattgaaatgccgccgggggcatccgagctctccgttgccgataagcttcaacggttagttttggaattcaagtcgctggcggagccgatggaccgtgtgaagaggttgcttcactacgcgtcgaagctgccgccttacgatgaatcgggtcgggttaaggagaaccgggtcgcgggttgcgcgactcaggtttgggtagaggcgaagatggatgagaatgggagggtagggtttagagcagatagtgattcggagatttctaaagggttctgttcgtgtttgatttgggtaatgaatggggctgagggtgagaaggttttggagttgaagacggaggattttgaatatgtgaatgttgggttgcacggaaggggaaattcgagggtgaatacatggcagaatatattgataactatgcagaaaaagaccaaagctttggttgatgagagaaatagaaacctctctttcgaaactttatcttcttctattgatgaattcgctactgaaaatcatggaggttcggctcaagctcatgttagtcattacttgctttgctttctctctcatgttctatgattttttataatatatattcatagattatataggcaaattatatctttttcttgaacaggacaaaaatgaacaatatatacagtacaaagaaaattgatgggtatagtataattttgaaagagtaaaacgttgggtgtaaaaacagtaaagctactaaggtgaataggtgatgatgatttctgttaagagggccaaattaaaaagaacccctttttctctttcaccttctttattgtgttttcttgcttttcgaaagaagtcaattgagtaataatatagtctgcttataaaatatcttaaagagaagagaacattgtactgaagttttgatagttagaatgtatgctatgtaatgtattttttagaattcttggaaatggttctatattatttgttattatttgtatggaaagtggaaacaaaaataattggttctagaaaatgaaaactattacttgttctgtcttggatttgggaaaccaatatatagaataactactatgctatttacctattgtactggaacttgtgtctccctttctttatgccaaagattcttctcagcgcaataaactatgtgaatagaatagaagaatttaaatttgggaactcattagctaaaaaagtataaatacaataattttatttttctgttcaaactgcaattaagattccttttgttatcttatgcttcatgatgagttatctaaggaagcttttaaaacttttcattcttcctttcattccagaattacagtgaactgtatacagtgttcgggctaagtgctaataggtgcttgacttgagatttgtgaaccagaagttgtaataatagaagggtgttttaagaaaaactacaaacgggggaacacttcaagtttgaggtaagtcagcaatatatctaagcagccattaccttagttctctgaaggactcttattctttcttttctccattatgagaaatccaaagaaggacaccacagaaaaagcagagaagcaaatcgaagcaatgtcaaatgacacctgatttccactgattccttggattttaaacaggttactgatcttactagcatctgtagtctggccaaaccccacctcctcaccggaggagttgtaagcgtagactctcacaaagtaggtagctgaaggaatatcgttttcaattggccaatcgaagctttgactagtctgagaagcatcatagtttccattagcaatggtgaattggcaggtcttgtctttgttcaagttgtctacggttttcctccatccccggtctatctggctcaccggagcataacacaaactcactttcacattcttgtactctataccgactccagatgccttgaagctctcattcaaaccccatttcccagtaattctgtcctcttcagccttcaatactgcaccataaagtgtagaaagtcacagtgagaaaggctttaaccacacacaccatggagccctaaagaatactataagaaaatattcagatgtaaactaattgagattagtaaaaatcccaagtcttagattactctgtaagtatggatgttccttttgccgattaaattaaagagcaaataaagctacaattcttcataccttgaccttgtagaggggaagcactgaccactagagttcttgggagagaagagaagagaacatcaccataacaagtttgagctaagcagaacagtagaaagctgatgactacaagagattccattgctgatattcttttttcttttggagaaaaagaagaatggtaagactttatattggtagtaaacgtagaaaatcaaagtttgagactgatttttataaggaatctgtacttgtgtagtagaaaaacttgtacaagtgggtctaaatatgtagctgtggctcaaatcaattctcaagagtcaactaagtcctataacttgtctacttttttccaagtagcatggcaaaggggtgggctatgtttctttgttttttggtgctttaagatgtgatcataagtgtactattctcttagttgacacgtatgtaaaagtagaacgtgttgtggtgtactaaaagctcaattacagtactcaaaccaaaaatctaggctgggactcgcctcaagaagtatactaattgccaagtcttcaacctcttcttatatctatgttgtgatattttgcacacgcacttgtacgtgtcgttacaagtagtaaactcaccaggagtgaggtcgatctcacagggattgtaggtaagtacgttgaaattaaacttttacttttatttgattaaataaaaattagaaaagaattaaaaataagaaaactaataagaaacaattatttaagaaaattcacagttaattaaaattaaggtttcgatttcaattgtttctattgattatgacctaatatgattattttcctaaggttaatttttatgcaatagcaggtttactaaggtaatttatagtct

SEQ ID NO: 381882 - DNA, 4421 bp, Cannabis indica
aatacttgtcctctttataaacaaaaaacacagaaataagatactcattgactataaaaatttaatttcaaaactacataaaacttcattgtgtattatttacaaacttcattgtgtattatttacagtcatctttcaatattatttaattgtaaaataagactcaattagtaattaatgaaaaatcgcgttaacataattaattatgcatattacaccacaaaatagattaacagctttaaccaaaaattagtttaatatcaccaaaatgaaaaaaaaaaaaaaaaacaaaaaaaaaacgactttaaaatgaacccaaaaatcaattttgctgaaagttagctctccaaattccttgaagagtttttattacagaataaataaatagtttagccacaagaatattttatccaaacataccttatcatcctctacagagtaaaaaaacttaaattatcatacaactgcacttgtttttttttctttttttggaccaattttatgaacatgaacaaagaataaacatcacaataagtcaattcaattactttacaaatgccaacttttaaatttcaccctgaaaatgagctcgtgctggctgttccggtagagctcacttgggagggccaatcatatcagctaaaccaacaatgtacaaggttcgcaattcgatggtagccaccgaattactaaaagaggagcggttaaagctactgagattactttcaaagcagttgccaatcgtcttcatgtgaacaatcatcttcgttgttactaggcagtgcttcgaatgaatcgctaacctcgctactatctcccaatacattactgtggctcacgggctttggcagattttgtgtcacggtgaacaatggtgcacctttagattcttctgccaactttttacctcggagacaaaagtcatcaaaatcatctgaaaaccatgaatgaatacaagaacaaagtattagtcttgaagttgaaagtttataaagcactaaaccttaactaagagaaaagacttacctttatcacggcaataaaatccaattgctaatgatggatcaatggaatcgagggccatatgtcttacgacactgcataaacaatataagattaaaaataatgcacggcatggaagacatgaatgagtatgaaattatgaatatgatagaaagataaagaaaaattgaatcgagaatggaagagcaagactcgcctgctgtggtacgatgaagtatcagcctctacactattcctaccaacatcaattacctgaacaaatgagcattcaaacattagcaattaaggtatgatgggaaagctaagtagactattgcaagatgatagaacatattaactcgttatgtccacagtttagtggctaattttagaacaataaaagggctataccggctgaacttcatgaggatcaaggtaaaatgctttatcatcttgaacacctacaatgtaagttgacgcacccggtctaccacccattataccaagactttggggaaatgtgaatgtagaccgtaaagctggaatgtacctaaaaaataaatttagagattaccatctcaaatatccaggcaaaactttacaatgagactacctctctcaatgcttcaatggtaaattaatacgaaggtaaacttatatcagataaattttggcctatgttggcaaagaatttatgaaatttcaaagatgagctggaacttgaacctcttagctctggcacaattatatagagagaggaaggtagcacatataagttcaataatctagaaatttaaaaagaaagaatccagactatcggaatttcatatgtttaactaacaaattctaaatcaatttgcagagtgataactcaagcaattgaaatttccaataaagggaatgacaaattcaaattccaacaataaatttggatatttaatctaggaagcaaggaaagaaaaactgtataactaaaacaaaactgaataactagtagagcatctacataaatttcaaacagtaaaaaacctgggattaattgtttcgagcccgagaaccaaagggaccaataaaagaataggtgtccaatcagcttgacctctggaaaactcagagcaatgtctatgggcgtcttcaacacatacaactggggctccaccacgttcgccgtcttcatctccagaaacaacataaacaaccataggaagtggttggttctcaaagtcattggcctctctcttgcatttcgctaaagtttcccatgagcgacacatagcatatgggcccatccatgagcctgcagtaagattgtaagcctttccagctagaagaagattgtggatggaaaaaggtgatgcttccgaatcaccaaatagatgcaatatgtcgatgtagtcttggtccaagggctacaaatacacaaaaaaaacaaacgaccataattataatatacgggcatcattgtaaccagggttgtcagaactgaggataaattacagaataaagctctactcccttgcccaataaggaaacaataaactattgaactcatttacatcagcagcaacaacaacaaaggcatcgagaaaagaacttatccaatgaaaataattaaaaagataaaataagagataatctgaaatgatttgcatcatatggtaaatgtggatccctagaagactagaacaacaattttatgtcaaaatttaataataataaaaaaaaaatcatcacgtttccacaagcccatcttaccttttgtaattgtcttctccaagatcgtcccaatctatgaaaaaccaaagcctgtggacaagtaaagcagtaattagaatagggttgatgcgccattcaagcttaaaggttataagggcgaggaaatcatacctgagccactagcatctggctactccgaagcatgcaaccccagtttacatcgctagtgtatttcaaatctccaagagcactgaaacctggatttggggaacacagtttttaggtcagcaaactacaaaatgcaaacaactcaaagtcaaagacacataactaactacaaacctttccgatatgtcattaaaattcttgatgaaaaatcatgttcgaaatctgctaagccaccgttagtgggaaaatctactaaggaatcatctggggagattctataacatacaccaagaagccatatgtcacttgttgagttagatatgccagttctagcggatccaagtatacgctcgtgaaatcttctcattgggccaattgtcacagccttcctcacagctgctgtccacttaaggtatcttgaacgaatcgatttcttatcacaggccgacgatgactcactatgtgcttcaaagacggaaaatgccgatgaaagaaagttgaccataggtaaaacttggagtagctagagtccctataacctcactctcaataaactgatgttggattttcctatctgtggaatttcttcaagttttagacttcagtgaaaaactaacttaggtcttacaaactaagcaaagtcttactttgttcaattgaacatgtcaaagaaataacagcaacaatcattcattttgatgttacatcaaatgtacagtcacaaaatatcatttttattttctttttgcaatatcaatgaaaaaaaaaaccataaaacagaaaaagcagcagcagccattaattaactttctaaaattatcaaaagatcaatcatttactccattaaatatctgatgacagcagatgattcatcaaatattaacccaattacagtgatgcaaagacaatttaaaaattaataataaaaaacgaaattgaaccagcaaaatcatccaatcgggagcaggtggtaataatcatttacccgtaatccttgatcaattaaggaactcatttaatgtcataatcccaataatttagacaatttaacaatgaaaagtagaatcataattgagagactagaaaaagtacctttaggcgaagaagatgacggagggacatggtgcgaagttgttggtggagtcagttgaggtctcgtgttgttggagaaatttagagagaagtcggagaaagttagggctacgtcgtcggtgttatagagagagagagagagagagagaggagagagatgaaaaagaggggcataaggcgtagcagaagggagaatgagacagcgatggcgtgtggagttgtgctgtacactgacccggttgcccagcccaattttacaaggcccaatttcatattccacccaatttggcccacttataaaaaaattaggaaattacactctataccctttttatattgtcctcttttatttttatcctttttttaaagtctatcatttttacctctttttttaaacattgtaccaattttgcccctgtcacttcaagatactctccatgtga

SEQ ID NO: 381883 - DNA, 2801 bp, Cannabis indica
tgtcactaaaagtagttttttttttaatagtagtaatagttataggaaatattttatatatttttagaaaatttgaaatattttacagtgtcaaaaataaatttaaatttttttgaacacacgtagtaaactagaatatcaagaactatattgttagtaatgtaaactattcatatttgttttaaaaaaaatttatatttttgaatatatattatagttacaatgaacattaatgcaatggaaaaattagaaaaaaaaaatatttcgacatcttattttggacgtagtggaggtaaatacaaaaaagataggaagttgatagaaatacttctcaataatttaatttagtctatttaattaagttatagtattttaattaagttccaattaaaagttttgagtaaatagtatgaattaattttgttccaagttagtgaaaattccacaacccattatgcagttaacacttaaaaaaaattaaattaaaaaaatacatccacaaacacacacgtttgtacaattccacatatgctttaaattagtataaatatgttaacaacttagttgtattgtatgtcataagaatatagatctttgagtttttgttttgataattattattattattattatgggttccattagtgaaaatactactactcttgagttatcccaaggttatgtcaatgtgtacaagcatatgttaagctatgcaagttcaatggctctaaaatgtgctattcaattacacataccggacataatattcaccaaaggcaaagaccaaaccattactcttcccgagttggcgtccgcccttcaaattcccccatcgcgaatttcgtgccttcgacgtgtgatgcgtgtattggtacactcgggtattttcactaataaaaaccaacacgacgatgacaagacagaggaagaagaagtgtacggtctcacttcttcttccaaaatacttctcaccggtggtaataataatggtgtcccgagtgtgggtggttatgttcttgctgttcttgagccagttactgtaaccgcattccatttaattggaagttggttaaagaaagaaagtccacgcacaccgtttcatttagctaatgatgaagggttgagcttgtacgagtattggggcaaaaatatcgatggattcggtgatcgtttggatgaaggaatggaaagcgattcgggggttttgaaatttgttctcaaagatttgaagtcctcttttgaggaaataactacattggtggatgttggagggaatactggatcgatgtgtatgatgctcattgaagaatttcctcacttgaaatgcacagtgtttgacctaccttatgccattgaagccaattcacataatagtacttcaaacttgaaatttgttgagggtgacatgtttcaaagtacattccctgaagctgatgcatttctattaaaggtaattaatgttattatattatagggattatttcataaataagtaaaaaacaaaattttttttttttttaaattagagtgttgttttacatattgtgaaatctagtataatattgtgataacatgacaataaagttgtttttcttctaaaaaattacaaatctataaatttataaaaaaaaaatagtgtattttaagtatttgtataatttataaatttccctgtattatatgtattatatgtagagcattgttatttggcacatgtggtgtttaacactacctagaggtggcgttctacgattgattaacgatattctctaaaacttattgtcgtatacattggagctgatacttaactgtacaatattgacagggccgaccctgagaatatatgggcttaacgcaaattaaattttggagccttaaaaaatatataaaaaaaattaaaaaacaagtgttatgagatctgaacccataacctcaaccaaccaaattataaatatttgttgtttacaatacatttaattttaattaaataaaagcctaataaaactctttatttttttattttgggcctccaaaaagtgtgggctctaagtaggggcctagcccgcctatccctaggaccgactctaaatattaatatgatacttaagaaagtgttaggcatcattaatacttttttaacatttctcttatatgtatacacaaataaagtgttatattgtttcttttatctttaagaatttaaataattttgttttcctttattatagagtgttttatcaggttgtagtgatgaggaatgtgtgaagattttgaagaattgtggagaagctatttcaaggaatggtggaggaaaggttatggtaatagacaataatgtcataaataccaaaaatgatgaggctgcagaattggaagctaagttatactttgacatgttatttatgactgctctcaccggaagagaaagaactaaaaaggattacgaaaatatcttctatcaagctggtttcactcgtattaaaattacacgtatgtttggtttaaagtccttaatcgagggttttctttaattaataataaaataatcaaacaaaattaatatgtataattacccttgaaataagctatgatgattaatattattgtgactatagttgagcacaatatataaaatcatcaatatgcagattctatgaataaccaagggaaataaaaatctactttcttttagtgttgtttgtttgtatttgtattatgaatataatatatatgggtgcacttttaatgtgtattatttatgaatgagtaatattaaaatttttttgaatttttatgcttaa

SEQ ID NO: 381884 - DNA, 1102 bp, Cannabis indica
ccaattttgtagtagtgtctattctatttttttgcttagaaaatgatttaaggattgccaagaagaaagaaaatgtctttgaattgctaagaagatgggatttaatcctagagataagaaagaaaagtactagctagccacctacacattaactcaattgccattaaaggaaaataaaaaattacagatagaaggatgacagaaaacctaagtacacataagaagaaaaccacacgagtaaaggaggaggagaatgaaagcatcattagttctacttcttatattctttttctatttcttcctttcattactacgtaattacatttttataattttataaaaattgaagtgatagccactgtaatgcccgtatttaaaaatttactaattcgagaaaattttattatattatatttatataactccgtaaatcgagattctgagttttagaaacactgttgaaaatacatgtgttatatatataaagtacaataatattttttttacaaccacaacaacaaaatataaatcaaaatgttagtatgacttaaaccctccaggttgtactgtcacgatatgtacaatcattacttaggcctaactcattgctcctccagctttgttttacctttacctacacaaggtagcaaagtgatgagtcaaccgactcagtaaaatacgcataaaatatatataaacaatacaacattggctttatgcttaaaccgctgagcccaattaccaggctcactaaatagttaagaacgttcttaacggaattacgaccactataccacatgcactagagtaccaactccgtacttgtgttggtagggccgactactgtaccacatgcactagagtaccaactccgtacttgtgttggtagggccgaccactgtaccacatgcactagagtaccaactccgtacttgtgttggtagggccgaccactgtaccacatgcactagagtaccaactctgtactcgtgtaagattggtgagcatataaaatagccaccatcttaagggggatgttagagtcccacattgctaatgtgtagaaagaaaatagaatatataagatgaatgagctactcat

SEQ ID NO: 381885 - DNA, 674 bp, Cannabis indica
gcttggaaagtccatgctattttgttgcagaagaagatattgacaacgatatttatgaagctccatcattcaggaagccaaacaatttgtccaggagtcattatagcagagaacatatgtactggaatggagaagaagaactgaatgaagaagtggaaagtatcactgtacctcagaaaccaaggagaagaaattatgacaacagtgcttctatggattatgatgttttcacttactcagatcaccaaattcaaagccagaacaacgtggtgaagaggtttggtccaagaggcagtcaaggaaaagatttagttccaccatatatcagaactgtgacaatgccacaagaaaagcctaaggatattcccaatgaagactttcaaaggtgtaagactttccctattcaaactcccaagcatgttcatccaatgctgccagactatgatgatatagccgccagattcatggctctcaagaaagagaggagctgccattgacctctgaattacaaacaaggatgcagcatttttttctcccattatcttttcttttgagggatatttaatactgataagctagtttatgttttgagtttataacattcattcattgtatctcataattgtgtacatacatatatataagggcaatttacactaatgtatacattatat

SEQ ID NO: 381886 - DNA, 780 bp, Cannabis indica
ttttttgggtttccagtaagcaaagcaatgaaactagttccaacatacaaaattgatattctcaaatttcatcaatataagatacttcttagttatcagtgttctacaacttcaatttagcagtaacagctatagtattctccaaaagttgaataaaagaaaaccctttcctacatgtgacttttagatcaccataaatatggcaaaaagaaaacgacactcaaaaccataaaagaaactaaattcaaattaaaacctaaagaataacaaaaatagaattcaaataggtcaaagtaatagcataaaactagataaatataggaaaatacagacactacacaggaagcaataacaaaaagtagtgaccttgaacagcgcccatctccttctcaaccttagcctgcatctcgcggagagcaccggcttcttcctccatctccttaagcctcttcttcatatcctccaactcctgcgaaaccaaaccaaatcaagctgagcaccaagagcagatcaagaaaaaagataacaggaataagtaaaagtggcgctaccttagaattagggtcgtcgacgtcgtagtcctggccgtcgccgtcgatgtcggcatccatatctccatcgtctccggggatctctccgccatagacctcgtgctcttgctcgtcgtgctcgtccataactatctaaataatatacctatatttatttagtatagataataaatgtataaatacatatatatatagagagagagagagagagagagagtgagtgagagtg

SEQ ID NO: 381887 - DNA, 2996 bp, Cannabis indica
gtgtgaatctaaagcattctcaatcactctcaccaatttcaatttggggattttgtattagtgtgcattagattcacgcacaaactcgtaatcttccttttttcaattattgatttttttgaaatttcaatggagctgtagatgaacaagattgcaactttgatctatacatatatatttatatatatatatatatattattatgcataatctttgtttaatcttttatgatatcacacaatatatcttcagtgtttgaaggatgtgaagaacaagagagaaggggagaatcaaaatctatatttatatataatttttatcaatttagttttttattttatttttcttttgaaatttgatttgcaatgacactaatattttagatatgatattaggaaattttcttataagttaataacccaactgagattcattcctattagatagtttggttttaacatgtgatgttgttgcattcccattttaccaatttttctatttatgcttttatgaattctctcataagaaattctttgtcaagcttttcaacattagatgagattcattcctacctattagaagtttggtacactttttggttttcttttttattctaatcaagtcaaaatcatattctcttagggtccttttggtcctatattaaattgtattatgtgttatgtttctatatagtcctgtgtttggttttgatttgtatgtgtatatacaaagtattatttaaaattatgaaatgatatacaacacaattcattcctattagatgattggccactaatatagtaaagattgttcttttttagctagtgttgtccaaaggtttcttctctaagttctcttgtgttagttatgagcatgaatatctttctgagtataatttttcaatcaacagttccccgaatcagctatggagaaagaagtaagttctctacaatcgttgctaagaacaagaagttttgtttttgattgcaggtgaggaagtgaagttgataggttggagaaggagatccaatatcttgttccattactaagtagtaatgtttatgtggtgccattgtacatactacattgtgtttatatatatatggtgaatttccattccaaggttagaaaaacattcattgctttcaattcatactgtatattgtaatgattaggaaactcactttcctaattctgagaaaaatccattaaacacaaaaacaaagaacttagtgccatgttccatgttttcttcaatgatttttctaggtattacaatgaggattggcaatgtcttttcgtattattattattctaagcttgaattataagaatcttgagaaatgttagtggattcaataaaattcatagctattattttgatttttgaggcatattatagtgttgagttcttaatggggcaatggaccaattcaacatttgttgctgtctttaacaataacatttatgtcttgcaactttcttgtgattttccaatggacccacaatttggtataccaaaaacttgtaaagcaacaactcagaaatcttgttctgaaattttcagagtataataaatgaatttcctatttaaacactcttccactttggtctttgttttgtgtgtatataaaagaattgttttggtgactcaaatgaatcaaaatagagaaagataaagaaaatgggagttttgaaagtgtttaatttgagagaaaatgttttgggtaaaaaaggagttggagtagcttgcccttattgtggaggacctgtcttagcatggaattttgatacccatttattactttgttgtattccaatttatcacaaacttaaaaccaaattttattgcaccatttgctccactagacttgttttttcttcttccaatttataaatagtactaaaaaatttatgtttattatttatatactatgaaaggagaaaatttcctcaaaaagagacaattactatattttcttaagggtgattttcctattttagtgtgtatttatttatcctttgtgtaattgtaatgtagacatttgttattaaatttgttttggaattaaattattattattattattattttatgtaaaattagacattaaattataagaaaattttacaatacttttttttttctcataatcatatacatgttagtatttaaatattgtattgcacacatgattattctatcttatatgcgggtgaactagactgtttgaacactgcttctatgttgtaaattatttcaactttttaaaattttgtttgatgtcttaaataattataatgtacacaaatgtaaaaaaaaaatagattaaaaaaatttttcgatctagaaacaggtagagagtgcattactacattcttttcacttaaatattgctaacattactattagatactgtcgtatccaaaatcactagaggtgacgttttaataacaattaacagttatttataattattatattaaaatataaaatagatactaatttgttccatcatacaaattgtgttcaaatttattaaaattattagagtaaatagtattatttgataccctaaattgcaatgattaattacatgttaaataattaaatttgaattagatggtttgtctttttttgatcatttcgaattagattgcgagtccaattgagtaggaagaagttgaagaatactttcaaattaaatttaattcataaatatctctttttatgagtattatatttaaattattcttacacagtcacatgattaagatataatttcatatacaataaatttgtattatttgaagatggatgtgtaggtttgtgggaaaattaaagtaaaattttgattatagatgaatgaaaattatcgtaaagtgataagggtaaaactagtacaataattaaaaaaagaggtaaatataatagattttaaaggagagggtaaaaattagagacaccaaattaaaagaggtatatagtgtaattt

SEQ ID NO: 381888 - DNA, 3118 bp, Cannabis indica
actgaaaaaaccagagatttgagtaaagcaccgcagcgaacacagtgaattccttcatatcgatcattgatcatccccacaatcaagttcggttaagaatccatttaaaaacctcttcacaattgtgaaaagggatattctcaatcaataaattccatctactcaaataccacatctgtttagtaatatggcatcgagttaggaaatgagaagcagtgtctccccttccattccaaataaatgacaacttccaatatcatttccaaaaatgtagctcagcctagagccaaatggcagacagtccctatacatcttccagagaaacaacttcattctttcatgtataggagatttccataaagaactaagcaccttaccattagcctccatgggaattaatagatctctatacaccgtttttagggagaagactccagaaggtgaagacttccaaaccagagtgtccacatctcgcagctctgaaattctacatctccttagagagttcatcacagatggattaaagatcctctccacttgattccaatcccattcctcatcagtgttagttctaaactccccaattgtcatatccacattgtgtataggattaacatccttttgaccaaatattaccccatcatcacacgtccaaagcaattccagatatccgccctagagtgttgaccaataatcgttagactattgtttcttagaaactcgcgagttttccaaatgccccgcaccactggagaagaagtccgaggtaaggaagcactccaaaagcttttattatggcagtacttccccaaaatgactttagaccataagtcattgcaattggaggcaagtctccaccccaatttagccactagacaaaaattgatgtcttgaaatttacgaataccaaggcctccattcggtttggggtggcagatagcaccccaactcaggagagcaagaaatcgaccctcttccaatccaccagtccaccaaaaccgtctaaccatagcatccagggaatccgttatcttctcagggaggagaaacacagacatagtatatatgggtagtgccgagatgacattcttgattaacactgatctggcagcctgagaaagaatttttgctttccaaccttccattcggacacgagctttctcaacaatgaagttaaaatctttcgaccggttcccgctcagaatcaacggatttcctaggtaagtttcagtcccatccattagattgaaaccatacaattctgcaatattgatgtcgcaagccatatcacaattctttgacaacataaccttcaatttcttctcgttgattctttggccagaccacatacagtatttatccagaatctccttgagaatggaagcctccctcaaggttgctttggtgaagaacaaagcaccatctgcatacatgaggtgtgagatcgccgggctgttaggcgaaacccgatacccggttaggtgaccctgctgttccttttccagtaataatcgagataggacttatgaacagagaatgaagatgaagggggataaaggatccccctgtctcaggcctctatggggttggaaggattttgtaaggccaccatttatcaagacttgaaaactgaccgaagtaatacattccaaaattaacttacaaaacttgttgcaaaagccgaatgccttgagaacattaccaatgaaaccccatttcaatctatcataagcccttgacatatcacattttatcccaacaaaagcctgcttcccgcttctcctgcccatgtcatgaacaatctcttgagcaataaccgagttctccgcaatccaccttcccttgacaaaagccgactgaaagggggaaatgagtttttccaagaccggccttaacctgttagacaagatagtagcaacgatcttgtaacacacattacagaggctgatgggtcggtagtcgtcaaatttcgctgcatttttccttttcgggattaagacaatgaatgtacgattaacctcccttgtgaatctcgccgtgctgaagaattcctggacaaaatcaatagtttggttccccacaatatcccagtggtctttgtagaatttggctgggaacccatccggccccggggacttcaattgaggcatcatccaaatcgtcttctttatctcttcccccgaagggacttcagtaagcgttgaattctccacatcagaaacacaaggagatatcagcctaaacaattcctcactgacgaccggattagaagtggcgtaagattcaataaactgtgatctgaaatactcaaccacctgggctctatcttccacccactggtttccgtcttccgaaatggcccatataaaatttttctttcttcttacaataatagaggcatggaaaaactttgaatttcgatccccctccttaagccataactcacgggatttctgtttccaaatcgcctcctagcgagattcaacctcatcgatttcctgcagcaaggcacactctagctggttgttttcaggagacaggtttcgcttttgaacctccacaaggaaaccttctaatagctcaattttctttctacaaatcccatagcactcctgttccacttactcaaggcagaagccgtacaacgaagtttagagcaaagaacatagctttgataaccatgaaagatctgttgccacgcctattcaattaccccacgacactgagcatccatagtccaggcatccagatatctgaaagggctttaattggtgtagcgtccatcattgtattaagcacaatagcggaatgatcagagtttcgaatgggataattcttagtacctgccttcgaaaattgagttacccaactggtagaataaacaactcgatcaagtttttcacgaaccagatgatcccattgttgtccatttgtccaagtatagtaggcccccaatccttcaatatccacggcaccacatttgaacataaaatttcttagacccctcccttcattctcacaaaccggtctgccccccaatttctcttgttgattgagaaccgcattcaagtccccaatgaccatccacgcctccctgaaaccattcacatcagtagtc

SEQ ID NO: 381889 - DNA, 1900 bp, Cannabis indica
aaaaaaaaaaaaaatcaaactacatattattaattccttataaacttaattagttttattcccatttatacaagtattgagatgtgtatattctagtcaacatgagtatcatgatagccaccacaaagcttaacatttttggccttttcccactcttgagggtctatatcacaatggttataatatatagccttgaaattttggagcaccaaaaagttattttgggttgatatataatatagctaggtatatatatatggtatatatattatatatatagagagacagagtaggggcttaataattttatagtgatcgagatcgatatccatggtaatgtcatcctcaacatctttaacccaattagcctcttacacctttggatcatgatatttttatttgtatatatacactacacactatatattattggattattagtttatatatttatagtgacaagagataagtggaaaagaggagcttccgaattcaaagtgtccccatttgcaccatatatatatatatatatattatataatgtattgttttattaatcaatcgttttacttggtccacaatcatattataattaattaatttaatataagtatatatatgtaataataaatataatattatgaaccaatatgttatacaatctaacataaggatatattaagaatctgttgtatatatgctatatattataatatgaattatctcttggaaaactttggagagagattcgatctagctataatatatataattaaaaaaggttattaatatctctcttactcttgtccccttagtgagtgacgataatatttcttatgttttgccccatttggcttactattatacactaattaatagtatataaattttgtttaatttataaacaaattaaaaatcttgattatgtctatggagtgtgacatgatcatgaatggcacctttgaaatggacaactttttaagattactctaataatttttcctttttcataatataagtcgatgaatttcaactggttggaccaatgagattagaaactgaatcattaaaatattagggtttggtagagcaagtcacacgaggcttaatttgtaagcaagaaaacaaaaaacatattttggttgcttaatgtagttttatatatatgtagaaaacctcatttaagggaaataattggttagaacatatacatcattattaggtatggataactcttatattttcttttgtttttattgtttggttataattgtatataaatacttgattatacattttgacaagatattagcaaataatcatcgctttgataacattaattattagaataaatatggttttccccttcaattataataatttgtagagttttgctcctctaaagttttctccctaagtttttctctgttgcaaaaattcatttctaaactatacaaattgctgcaaatgttatttttcattttattttgctcatcttttaaaataatttgcttatagtagggttggtcttgggcataagcgggctagactcgtacttaggacccacttattttagcagcccaatagaaaattatctttttaaaaatatatactttttttttatttaaaaatactatttatctttacaataatttttaaattatttacctttatattaatataaattatttagaaaaataagtagaatgcaacttcaaagcgatatttgcaatgatttttatagtttagggaaaaattttgcaatagagagaactttagagggtaaaactctacaagaatcataggggtaaatcctatttattctaattgttaatatgtctatatatacagtagaacttctattcaagaatacacttgggactaatagcaaattatattc

SEQ ID NO: 381890 - DNA, 3862 bp, Cannabis indica
ggttttactactaaaaaaaaaaatacaacatagtatatatgtactgttggcatcttaaaatacacttttaaaaagatcgttatagtatatttcttatctatttcgacattcatgagaattatttagtcaattttttttttcataagtgtatgttgtaattatttagaaccacttgtaaattttttaaaaattatgaatatatagtttataatgatgccaaaaattaaggttcaaacaattgtttaccatgcatataaaaaaaattatgtgcaacaaagcatttgaatttcattttcaatactgtaaactatttaaaattttctaaaaatttaaaggtggttctaaataactacaacgcatacgatcataaaaaatattagactaaaaaatattcttaaaaactgaaacaaatgcactataaaattttcctacattttatttattattaatcataatgataagttattatgtttcatatattcttattcatacgtagtaaattttttaaagagagttttttttttttttgagaaaaaagactgtaatcataaattaaagagtgtcatttacaacaatagaaaaaatggccaagggaatttccccaaaccacatacaatcatttttcaacgctaatgcttgtttagtcaaaccgtgagcggcttggttcgcatctctcctaacatgagacacacaagcagaagaaaaataggacaaatgattcttaatatccatcattaagtcttgaaaaggagagagttgatgaaagactattaatagaattagccaatataagagagtttgtctcgatgaggtccacttgactattgtgctgaagagcccaaactaaaccaacagacaaagctttagcttccatttcctgaggtttatattttccaataagaggtttagaaagtgcagcaacaacataacccaaagagtttcgaatgatgactcccacactaattttatgtttggaggcatcacaagcagcatcaatattcatttttagtttggatgttggggaggctgccaaggcacatgtgacgccacaccaaaagaggaagcaaccgattccctctggtttgaaatctgctggtagaaattgcatacatatgcatgagactttgcccaaatttgagaaggagattggatttgtttcccatgaataaaattattcctatcattccaaataaaccacattgtgcaaaaaaaacttctccaagtcagccttagaaacgatggtggataaatgcatgatgaagtcatcgctcttcattctaaaggctgctgcaaaatcaaagaaaaaaccagcagaacgccaaaaatttttggcatatttgcaacagaataaagcatgcccaaccgactctcaagcgttagtgcaaaggctacaagcggctgaatcaatgatctttctagagaaaaagatgcagcagtagggatggcattatggaacattttccaagcgaaaatcttgatcttcgaagggagattcatgctccaaaaatatttttaccaagcagcctggtttgtggaattagaagacatatcggtttcctccatggaatcagcaaggtgatatctagacttgattgagtattccccaatattgtcgtgatgccagatctacctatcttcagcattagaaatagatagagggattgataatatatactcaatgtcaatagatgaaaaatgttggtgcagtaaagggagattctattcccggttttgagtaatgtatgtcaaaattggtgtgtatggtaatcatgtgtgtcaaagtggagtaaaagtgttattccttgggatccaagggtctgagtcacaagaaatatgagagccatcgcccacctttaatctcaatcctttttccaacagttcacgcccctaaaaaataccttgccatgttaaggaagaagatcggccaagagaagcatgcataaaatcacaattcaagaaatatctaccctttaacacttaggcttagtagagattcagggtattggagaaggcggcacgcttgtttcacaagaagagcttgattaaagtgagcaaaagatcgaaatcccataccgccatccaattttgttatgcataaaagtttatatttcttccaatgaatcttcttcttatcagtatctgaaccctaccaatattgtgccatcatttgttcaagttgacgactaaaagtagcgggaagtttgaagcaactcatcacataggttggtattgattgaactaccgccttcaaaagaacctccttaccaccaattgaaaagagtttatcattccaggaatgcaaaagtttccaaatacgctctttgatatctccaaacaattgctttttatcacgttcagaataagcaggcaaaccaagatatctctcatgacattcactaactgggatactaaggatatttcaaaaggattgcttgtctctgttcggtgtattaggagagaacgacataacagatttctccaaatttagatcttgtccagaagctcggtggtagatatccaatgctcgtttaatggccccacatgatctatcattagcctggaaaaaaagaaggctgtcatcggcaaaaaaataaatgtgtgattgaaggagctcgacgggaaacagcaagaccctttagccgaccaatatgttcttcaaattgtaacaatggatataggccttcagataggggtgacaattcatgctcgtgggtcgtgttcgtgtcgtgtcgagacccatgtataacaggtacatgctcgacccgaacacgactcgtttaataatcgtgtcaaataaataaaacccgaacacgacccgtttataaacgggttgacacgacacgacacgacccgtgtaacccgtttatatgtatattttgtttaaacatgtcaatcaataacacgtttatgaagtattcaacacgtttgtaactcatttatgacacgttaaagtactaaaataactttaaataggtcattaacgggtcaatttcgtgtaagtcgtgtcaacccgaacacgacccgtttattaaacgggttagacgagtcaacccgaatatgacctgaacccatttaaggcaaacccaaacccgctaactctcgtgcaggtttcgagtcgtgtcatcgtgtctgacccgttttgccggccctaccttgagagcaaattaaaaatagatatgagcaaattaagaatttaatacatcattatataggagagatgggaaaatattcatccaaaattaattcgttatatcgtttttgatgtaataaaatataagaaatttgcacattttatgaggttttatacaatttatacaaaaatgtgtttatatgtatagttgttttatgggaaaaaaatctaaaaataatatgagaaaagcaatataaagtaaccgattaccccattaattactttaaacaattttccctatatttttcaaatttttgtaattttacccaaaaaaaaccccataaaaataaaaactttccattaaatatttagatctcaaatattttaaatttaataattattactgaaaattgttaactatttgcatactaattaaggtaacaatcttacatgcacattttgatttaatacgtgtatggtatttattatgtatggtccatggtctacacgttaatcataaatcatatatattaatttaggggtgtttattggatcacatccaatatttttaagcatatccacatccgatccaatcatatattggatgttagattttaccatccgatccgatccaattaatttcgttatccaatcgatctaacatccaatggatgttggattggatcggttctattcattggatgtatttcatatatatttatttgtttaatt

SEQ ID NO: 381891 - DNA, 1038 bp, Cannabis indica
ttatttatttttgctgaaagagaaaatgcaacatgaccagtcccctaattagagcgcctatcaaggttcaaagttggtggaagtagagttatggtcaaactgaactttgaacatgaaaattatcagagttccaaagagtcaccctattttttatgatcatattatttctcttaaataaaatatatattttttatttattatttagaggtagttttttaaaataatgattgctatccttcaaatcactattaactgagactccatacctaacactacaagactacgaagacacccaattattaacgattcttattaattaaaacattcattattatttccccatttataatgtttacatcacatttatgcgtttattcgtgtatttcacatccaaatttaaaaccggcatttaaaacatatctatttaattgtgagatggtttaaacactaatttgatatgtaattttaaccccaaatttcattatgtgtgttgaatatgaatcctaaacaagagaatgatatttgggtttataattattttttacagtagagtcatagagttgctacccaaatttctacacctcaaacaattttcgcatatctaataaagaaaagcagaagagaggtagagaaatagaaggttgctattataaatttacagtaaaaaaaagaaagatgaatactaatgatgaagaagatgcatagtaatgaaaactaaaaaatgaaataatcttttcttaaacaatgaaaattacgaataatttaaaaatgaaaaaagaaaattttaaaaattattctgaaatgtaaaatagaaaataatcaagtgtttctttactagagaaaattcatacttattaactgatgtactaatgtgttgcattttattggatctacaaagtctctatgaatgagtcttttcaaaggtcctagtagaattgtcctatacaatatattttatgggatatgattttatcttgtgatgcactttacattaaataagtgtaagggtacgtttttactttttaaccctaattaccc

SEQ ID NO: 381892 - DNA, 4857 bp, Cannabis indica
aaaaaaaatgggccctagatctttatcaaacaaaaaagaaatgggctataggtgtgggccaatccgtcttagctcagcctcgattattcatggtaaaggaaaatgggggaaatcatgtatagctagggcctaggggtgttatgatttttttgtcaatttaaactgaaaaactaatattcagccaaaaaaaaaaaaataataaaaaaatgtaatcgaatcatttttctaatttgcctggttatatattaggctgattggaaatcaatactcatgctcattatttctattcccattcttatatattatttatttgctcccaactaatataaatcttatagttaaatataaaaaaaacaattgaggtcatacggggatatgatagtacatgagtgagtaccgaaaatttattgttgataatacataacatagcatttatttactactttggcagggatgataatatactatatgggatattttataaaataatgaacacgaatatttttttatattcatatatcggaatcaaatgctttccataaacagtcccttgtggtgactctgtccacttgcattagtaccagtaagaaaggttgcaaaccatgtggcagaaagttttgggatacgtttgagtgtggcgcgttccacataatatagcccaaatctaatgccgtaacccatattccactcaaagttatccatcaacgacaaaatgaaatatcccctcacattagcacccttcctaaattaaaaaaccataccacactattaataataaatgtacgtagtgtaataatgcaattatgcttgctaataaatgttattaaaagtacttgagtttcatttgatcgatgtataccttactgtgcgggctaaagcgttaagatggcctttgtgaaatttgatgcgattgagatcttggagcagcgcttgttcactctcctgtaccggcgaagcatatcctagagaaatttttaatttccacattatttattttttttatataaatataaaagaacaatccattacaactctttcttaattttccttaatttaaaaaaacgtagttgtgtggtgtgtaaattaagttgtatacggaccattctcagtaacgaacatcatcatgttataatatctgtgcttaatgtattcaacaatattctccatgcctcttggaactacaaagaagctttccattccggtctatagaagaaatgtaaataaataataataccatgaaaaaaaccaaattaaatttatacctgtaataaactatttatataatatatgtcacatacatatgataacttacaaatttggaataaattttgcattaccggttgaccaataggtataccatctcgtaatactgaggtttcgacaaagcctttaattgggtgttgagacttgggggagcaaggggtgtggatgcagtctttggcgtagaaagttgaatagtagtttaagccaatgaagtctatactgcctttcagaatctttttctcttcggttgaaatctttggcaatttcaacccaatgcactctcgcatttctacagggtaatctccatgtactaaaggatctaacgccctatatatcttatccaatcacaaatcacattcacaatatttctatatatatatggaaatatataaattaaatattggtataataattagagtataattggacaattattatattttaacttcgatcgtttcacttttaattttatgattcagataaaattaccaagcgatattgaaagccaatgctctactcgcagctagccgatcatcctcttcgtctctaagtggttcatacataaatgaagacacagaaattccaataaacccaccctgtttcctctgttgcatttgttaacataataattcccagttaatgtgcaactaccaactgaatatacaaacattaacaattaataataaaaaattctaataaatgaactgtttcaaatttcaaatcattaaagacttataaatgcacaataatggataaggtacatgatttgagtgtgtgagggcgatttgtgaaagtaatgtgattctgaaatccatccatttatatctcctactaaattcaaaatgatggtccacatgaaaatatatatatattttttggttgggaaatggaattaaaatagctaaaattgagtgtcatattaggtactagggccacacagacggtgttcatctaatccaatctgcactattttgctcatagtacatccgattcgcactaagtgcggatttcattttttagatccaatccaatcatcacaatagctcaaatccaatccaatccaatccgcaaagttattttagattggttactttttattattaaattatttaatatttatgaatttttttttcatataactagcaataaaataaaataaactataattattttatgtctccaacaatacattaaaatacataaaatagctaaataataaattcaaaaaagaaaaaaaatgtatgtataaagaaatgttgcctttattttaaattgtatttgaaaaaaatttatatataagaatagaatatacatttgatttattaaattttgaaatataattgtattatatgcattagacttttaaattattattttctttatattaaaatactatttatatatataattttttaactttttttataaaaatgtgtgggttggattgaataggttacttttacatgtcaatcaacatccaaggattttgaattttccaacctaatttaatcagcacaaatgcagatatacacactttgtgaattaaattgtgcagattggattggatcggctattttacgaacacgcctaggcacacacattccacacataaaagtgaaatggcaagtcactcttaataatttaataagtgaaaataaaatctatcttaaatataaacaattggttaaaacaacttgacaaataagtgtgtattcacatgtgtgtgatttgtgtgcacatttcattactgtgtgtgtgtaaaaaacaaaagtaataaactttggagttgagtacctgaaagcatttgcggtaaagatgagcagccatggcatgtgaaattaacatgttgtgcatgacaacaagaggctctgtatcagagtcgccccttgagcaattcccaaacggcggcgaacaacgagccggagggtactctcccctattataggcaaattccgcccaatggtttggctcatttagggtcacccagtactttactctttctccaaattccttgaaacatatcgacgcaaaatatacaaattcctccctgtttatcaaatgacaaaaaagaaaaaaccacatactgagctaatctagcttgtttttccttttcaaagatgtcattcaattggtgcagattttttcttttttatttttagataaaacagatacatctaggattactatttagtttgctgacaaattattttgcaaaataaaagaattgcctcattgaaggatttagccatgccccgtatttgtcctccagagtttgtggaaactcaaagtggaaaatagtcacaaatggttcgattcctgaccatatataaataagaaattctcttattaatgaaataaataagaaacaaagatttgttctcttctataaactatttgggcgaacatgaaattaatattacctctatgtatcaagtggtcgattaatttattatagaacttaatcccttctgggttaacatcgccagatattcctcctgatgtagtaaaaactcaagagattatattatcattagcttataaagttaataaataagataataatccaaaatataaacatactaggcagaattcttgaccacgaaattgagaatcgatatgcattcaccccaagagaatgcaataattcaatatcttcctgtaaaaaccaaaaattaaaaaacagagtaaataatggcatttaaatttatatttaaccaagccaaataaaacaaattaatgtttaccatataccggtggtaatggtcatctgcaacatcaccattttcattatttataatgtttcctgaaatatttgaggatatataagattaagggataaataacaataacaaattaaagagaaatccttgtctttatacatagattaatttgattgacatatttatacctggaatatgagcgaagacatcccagttggtgagactctttccatcttcaagaaatgctccctcaacctaaaaatagttaagaataccgtagtaaagaacataacatttcagaaaaatgggtcgtaaggaactaattaaaagaataataattgaagaagaagagtgcctgataggctgaagtgcttgttccgaagaagaaaccgtctgggaattgagacctttgaatttcttcttcttcttcttcactggagcaatgggccgaagtaggggaaaatgtacgtagaagcagaattaagaagaataaaactccaattttcattttcatttttgttttccgtttgtgagcatgtgacctggcgaggactttatatagtatgtactagtactaataaataaaattaaattaagtacggtaaaaatctcaatatttttactttgttattacattacttaactcaaaatttaaattttggtggcaaaaaacaaaactaagatacttttatcaacggttatttgcggcataactcttaatattttcaatttatttacacttaacctttaaaatttaaattttgacgggaaatgccctaaaattagaaaatattataaataaaaaaaaaacattttttacgtttcagtttttttttttctatttaaaaaataaagaaaaattagaaaaaaaaat

SEQ ID NO: 381893 - DNA, 5726 bp, Cannabis indica
atttagtataaagagagattttttgtcttgacaaatgaagagtattttattttaacaactacttaacaagaacaatacacactgtacatgttgtgtttcaactccaacctatccaagtatcaaggaaataattcacattggaatagtgccattccactccattgtatttttcttttttcaaggttataattctgcttaatgtggatatattgactaatatgccaagccccaattgatcataatcacaaaaaaaaaaaattaaaaaaaaaactaataaaaaatcttctctaatgtaccaaaatcttctacaattttgcaaaaacaggcgttgtaagtagctcactataaatgacgatggtgaaaataaacatcattgtcgccaaatttagctaaaattccaacgtcattctttttctattattaagtattagtaaaaaccctctcaatgaaatttgtatatataaaaataaataacaataataacataataagataagatacagcacatctcaccaaatataataggaaagaagaatctactcatgcaattttgaaactggtcgacaattctggctgattactataacattccagacgagagagtgaaaggtggtggtggtgggaattgaaatattggatgattgagtgagccttcaggcgtcggccccgggatttttcggttaaaagacttaaaagacagcatcaatctacattcgctacacacttaacagacacaatatcaaaggaggactgacaaggcacgcagccagccagggcagcattcattctacgcacgaaaacgctaaggacttggagatttcttaattagaagacatcaggatggaatcgtccgggaatggagttgctctgctgagcttgctttaagtgcattgtcagggcgtagttgttcacctgcaccaccataaaaaaaaaagagattcatttagttagctaatatgaccatcaaagtctcaaaagataatttagtacgaaagaaaggttcaatttttataattgcccatgtggagtgatcgagtgatatacgagttattgagttcgacatattatggaacaaaataaattccataactttatcactgcgataaaatagtaaaaccaaattgatggttcactaactatttggttccggtctcaacaggacaagaatagttgtagttgagtaaaaatagaagaagttttgagttttgattctgacctcgagagttctcaactgctcttgatactgagagaccaactgcttcaactgctgcaattcttgatttttgtcttcataatgtttttggcgttcatgttggatagccacggcatgtttcagaattgtattctcccttacaagtccatcaagttgttccttcagcaacatattttcctgcacttacagaaaaccataatttagcaaggataaaatttgtgagtgacaatgcttataacccaatattagtataatgtagtaaatgattcctaactagactttgacataatactcacagtttgatacataggtttccaccattgaacatcacccttaagtttttcaacctacccctcaaggaaacttcttgcacatcctaaataaatctaacagctacaaaagaaaatgtgcaggaacaacaaacaagattttcaccttttgaaatgtttgagccgcctcagcaccagcacgggcactaatggatttctccaaaatctcaagtaccctagaagcacgatctctcgcatcatcagggctggtggcgttcatcatttcactgacaaacaagctaacccattctgcaccgtccacaggaagttgggctgacgcagcttcagaaacagcaacattttcaccattggcacctgcacaactttgcataaataagtgagatacttaacaattcagcaccacaattaaaacagaagcaaaataaaaaaacattaaataactcaatgcacgaaaggaaaataaaaatcatcacctttctccacagttgcatctggtatctcagcagaatctgggttcttttctgatcgtaggcaaagatcgcgcaggctctggatagcagcatctaagtcattgccacactcttccaaggctctctcaagtagctgaaaggcaaattaagcatttatgaatctccataagaattatatctacaacacaaattaatttgaatgctaaggcgaagccatttcccaacacccaatatatatttatatattacatatatgtataaaaataataacgtgaacagaaagaaaagaataatttctttcgttcacaataatcaatcctaatgaaccaaaaagcaaagaaaatattcaatcattcaaattaactttaaagtaagaatacatccccaaattttaccaaggttgccatgaaaataaagccatacatattcaacagcaaatgacaaaaagaaaactagaattcaacgacacttcagattcaacactcatccttatggtaccatttcatcataaaaaaacaaatacagcaagtaagtcaatcactaaattgatctggtaaaatctatatataactttatatctacaaatataggtcaatgatatactgttccccaaaaaaggacaatgataaactgcaaaagatcttcagatattttcatctcatcaacttcctcaacagccaaacagattcaaagtaaaaaaaaaaatacagatttatatacaaaaccacacaaacttccacattaaatcatatacctgagcgtccatgttaggaaagacggcctgtagttgatcaaggagcgaaggagccgagaagcgaatgggagaggttgaagaagagcaacgaagcctcttggaaagaggaggcgatggaggaagatcttcgaagaaggatctcttacttccgcacacagcagcagacatcgttcaatctccgacaaactttttggtccttcttctcctccttcctctctttcttgctcttcttaccttttccaatcccaatcgccaagaacaccgatccgattaacaagaacaatataagttagggttagggttttcgaagacaaagatgatgaagagggtaaggtaaggttttcgttcagggtttgggttttctttggggttaggtctcctttacccttttttttttaaaaaaaaaaagtctgaaagtaaagtaatggttgctgtttcgtgctttttatatttgaacggtgatgagatgaggtagatggtggatggcagtgcactccacgcgctttataagcacgtagatgttatgttttttgacaggtcaaagtgccacgtcactcccacaagaaacttgtgtggaccatatggataaattatttttctaattaataatttttccaatcaaaaagaaaataatgataggtttatgattaaaaaaattcaatttggtatctgaaaacttttattaaaaaaattgattggcattgtgaattttaaaaagctgatttgcaagaaaaaaattgtcattagttctctgttttacgtttttttaagtaaattttcaaaattgaatttggatccatatagaataaaaattaataaaataacggtaaaattgtatgcacttgactatttccatctaataatattagcaaagaattaatcactagatagtgtgatattcattacaatccaaagaacagatttcactttttttaaaggaaaacatcataaatcagttacaaaaatacccttttttatcacataactattagaacaacacaatgttgttccttcttctagatttctgataattcaattaggtaagagatgactttggcttggtctcatgatcaagaggccttgagaggcagcctatggttcagtgcaaactggtgaatcatatcttgaatttcctcaaatgctactaagaactcagctgcatcaatgggactcaataccttctttagtaccaactctaatgccttgaatctattacaaacataaacataaatgaaatgaaaatctatgttgatgatatatatatatatttatagtcttcagtgagagtagtagtaagttaataacctgagtttttgggctttgatgataacacgttcaatattcttgaacacagattgaacacaagtcaaggcactaccatcaccacctggtttaatgttcattggaccaaagggaaggtgaagaatacaagtggcttgaatctcagccatctcttcatcgattatggtctcttcaatgcgaatgtcattaatgagttgtgacaagagtttttcagcaccaggagaatcagaaccacagaatgaggttgctgatggtgatggagacgatgatgatggttgtaaagatgttgatgaacggacaagaacaagtacaaggtctaaaatggaagagggtctccaatctcctagccatgacatagcagccagttcatatgttggagcccatttgggcatgaggatttgggagatgtccttgagtcgattcgggaccatggctcggttgtaatgggaatggaagctattgagttgctcatctataagttcctcaagttcccaccttgcctttaactgcttttctagtcttgcagctctgctcttttgctcttgcctccattgaccatacttctcccaagagacctcttcacttagtagtcacatttacaaatttacagtcaacaacattacatatataagtggtgtattaattcattcatatacaaagccaatatgcattataaaattgggttctttcacaaattctactatggctacaattgtacaaaatttgattcagcactatacaaactcaattgggttctttaccaaatacttttctcttaccaaaacctgataaattatgtctctatgcaaatgggtttgtaataatttttctgaaaatgaaatcaaaagccacactattcatcattctttaacattttacaattaatgggtattcttagggttttaccttgtttggttggatctctcttgtacaggttaatacagtcgagtatctctactaagcaatcactctcatcatcaccatcttcctctgtacttaacgtcaacccatcttcttttctttgtccatagtcattctcttcaaagtgcttcctgaaaaggtttcgactttttcatcattaaaaataaaaatcgaagcaaacttgtggagaaaagaaaagaaaagaaagtataattgtttttccgagaaagaaaagaaaagatgagaatctttaagaccctttggaaaaaaaataccacctttcctcataattgattttctaaaagtttagaaatggatgagatagcttacattgtactgattcttctggtttcttgctatggcagctttgaatttgaagttgaaggcattctttaacgattttcccgtcgtcttccttcgaagccgggaaaattgatcagcttgtgttagtggaaaagaattatgtcagaaataaacgttgtcgagttagtatgcaagttaaacggtaaggtcaatgtggtcatttcggtaaacgtcaggacgtgggctgatctaatggaccagttaagttattgggctttaagtcttactttgtagaggaaattacactctatacctttttcatattgttctttattatttttaccttcttttttaaaatctatcatttttacctctttttttaaacattgtaccaattttgcccttgtcactttaaaatactctctatgtgattctcttatgtaagggtattttgggtacaatacatataaaaa

SEQ ID NO: 381894 - DNA, 4605 bp, Cannabis indica
gtcgagaaggtgttaagcatggtgcctaatagcaatgctctaatttaatctattattgtgtcactttctctaacctttttgttagattttataatgacacttcctcgcatagtattattaaattatatatatatatattttacaaattttaataacatgaaaatgaattagattgtgatcttttaccaaataatttgctatttcatagctataaataataaaagaaataaaaaatagaatattcatggattgctttcaacattttattctctcccgtcaacttataggagctgattattttcttaaaataaaaagtaggaaaaagaagaatgatactttgcccataatctgtttgataaaatgcctaaaagatattatcactaagttaaacgagtattgtaaaggtatctatttattgaaatcacgacttataattagttaacgattttttataatatgcaataaaataatttaactgaaatttgatattaaattgcaccaataataaattatacttagcaagagtgttaaatactctaaatatcttttagcattttttcaaattaaaaaagtttttttttgaagaaatgagtgaagataccaaaatagtatttggcaccctattttttcagaaactcatatggactgccaaacttaacaaggtcttttttttttttggcacaataagagaaatgttaatattttctcttttaatgttaattctgattggtttatttttccaagtagtcaatgttctttctcaatacaaatgcttttaaattgattttgatatgcaactttatcagattctattaaataaatttgaaaattttactaatttaatagttgttccggtagattatttatcttttcaatatttattaaacttttttagtttaattgttttgtatgttcgcgtaaattacttatgactacacgtaaatttttaaaaaattctgaatagtttacaatgccgaaaataaaatttacacaattacttaagaaaaaaataatcatgtataccataaaatatataaatcttgttttcaacattgtgaattactcaatactttttaaaaatttataaaatcttaaataactataacataaaaaaaattattttcacatatcaaaatataaaggccttaccgaaacattcctaatgatgataagtactacttatatatttgtaatgatgatatgtcattatcatctagtttacgttgcacttacttttccaataatatttttcatttttcatttgtgagattgctcgattgaactaatgatgtttgggcaagcatttcttgataaattacaagaatattgaaatttagttcatctcgtttgtaggtcattaatgtaactaataaagattattagaatggttatacatgcccaaaatactcaaatgaaaacaattgaagaaattaaaaactgatatgaaaaaaaattatagtataaatactaacagataaatatttaagtttaatttttaacagaaataatatttaagttatatttttgaaacttatagtaaatatcaaatcaattggcacgtattaatccttaattagttaatatcattacattagtgacgttttactcattaatttgtgactctctctccacaaagtgggtaccccttggggccaactcaatgcaaaaagcaatgtggaactaatcaagtacctcaatgaagtcgtgtccttcctcttgtagtaatgtgcaagcttttcaatgttagtatcatcgatgaagaatgcacttttctttctttgtgcattcacattgtcttctgttgattgaaacatggctctaaacttcctacccattaaagggcagtcatataatttgtcctttgccatgctcaagtgcactaaaatagtaaaaaatgaagaaaaactatgaatacgagaaaagaaaaggcatatgctttttaataaagagattggtaaagactgataataccttggttgaagctcagcattagaacttgcttctctaatagcatgatgggcttcttttggactgtaacatgaggccttggcaatgtttgctttaccttcgagaaacgaaagaagacttccatatccaagtttaactcagacgtaaacagatgacacctttttttgttttccctttttgggtttcaacatctgatagtaaaattggttaaccatttaaaaatctattctactatatcctcgtttcttgatgatgttattgtcatccattaccagtcttatcttgcctgcattatcccattgccctaaatcagcatacatattgtgcaacaacacatagggtgctgagctttctggttctagtctcatcaaagactcagcagcaagttgagccaaatgaacattgttatgcactttacatccacctagaaaagctccccaaactgccttgtctggtttgaatggcatgttgttgatcaaatccaaggcttcctcaagctgcccttgccggctaatgatatcgactagggatgcatagtgttcaacttgtggcctgattccaaattcacgaatcatcgattcgaaatgctttcggccttctttaactaagcctgcatgagcacaagcattcaacactgcaataaatgttatgtgagtgggttgaacattgagttccttcatcagttgaaaaagttctaaagcatctacagcaacaccatgagctgcataacctccaatcattgcattccaagaaattacatctttttgttgtttcatctcattgaagatgatccttgcctcttttattgccccacatcttgaatacatggttatgagggagttgttcactggtgcatctgccataacagtctttgtaaccaattgatgaacctgtctaccaaggtgcagatccaccaacccgctagacgcgctgagaattgaagacaaagtgtggcgatcatgtttctctccttcatgttgcatccgagtgaaaagcttaatcgaatctttgtagttttcgtttttctcatatccagctataatggagttccaagagaccaagttcttttggggcatcctctcaaaatagtccatagcaagttttaaactgccaatttctgcaaaccccgagaccattgaattccatgttagtgaatcaggataaggcattttaccaaagaggttagaggccttttccatatccaacacatgaacatagccagtgatcatggtattccaagagaaggtatctcgttctgtcatttggtcaaaaagtttcctggcagagacaatatctttagctttcaaatagcacataatcatggaattccaagataccacatttctcgcaaacctcttatgcccttctttcgccttatcatcataaaagggtatctcatcaaacagtctccgagcttcttcgatttcacctctctgaccatagccagcaatgagtgtattataaccatgaaccaattcttccctcaggccatccttgttcccacattcaagcagaatcttagcagcttcatccaacttaccattctgaataagacccgaaacaagcgcattaaccgaagccgcatcacgctcaggcattctgtcaaagaaatcaacagcattaacaacatcaccattccttaaaaacccagtgatcaatgcattccaagagacaacattccgctctggcatgctattaaaaagttgcaaagctagagaaatctccttattcttggcatacccactaatcatggtattccaagaaacacaatccctctcaggcatttcatcaaacagctttcgtgcttcctcaatagccttacccccatgataagatacatagccagatatcatcaaattccaggaaacaacatctctttcaggcatttcatcaaacaccttacgtgctttcgccatttcccttcgtttcacatacccacttatcattgaattccaagttacaacatttcggatcttcaaaccatcaaaaacctccctggcttcaccaatccgaccagtacggatcaattgggagatccttttgttcaaagaaatcaattcgggaaatgggttcaggcttaatctgttggggttcgaagaagatgatgcagagtaaaacttgggcatggcaatggaaatggcgagagaacgtaggtagtaaacagtgatgaatctggaaacgacgccgtatggaattgtactaagcgtcgtccctcgacggaggatcaccattacagtggtcattgaagaagaactacgagtacaactcctcacattgccgaaagaaatagctttgattaaaaattaaacacaccaaaattaggcacaaaaatatgaaaattagtaaagaaaatgcaagttgatccgattctagtctaatctactttttgaatggaaaaaagtttacttattaacttaagactacctcaacaaatatggaacacaacaaatttttttttaaggtattttataaaaaataaaaaaataacataaaaaataatatataaataataaaaacttaacaacaaaattcaagaatataataaaaaaaatactaaaagatcgtattttatgtaaataaaatctaaaaaattataaaaatattaaaattccatacaaattgtatttttgtaatttt

SEQ ID NO: 381895 - DNA, 3407 bp, Cannabis indica
gcaagagcatggatttgcttgccttgttccacaagtgcaaaaatcagcgaaaaactcccataacactcgagagaaccaaaaaccatctattttcatggttttatcgtcttcctcttaactgacctaaacaactccattgcctcttctacattttccttcttgagcataaccaagaatcaatgaactccaagatataatgttcttctcttcaatttgctcaaacactttccgagcatcgaataatcgtccacattttacatagagatcaactaaagcaccagcaatggtggcctgaatttgacatgggaaagttaaacctcttgtgattaagctaccatgaatttgatttccttgctgaattgccccaagaccactacaagccttaagtgtactagtataggtatgctcatcaggaacttcactctcctgcatttccctaaacaaaaccaaagcctttccaccattcccttcaagtgtgtagccactaatcattgcattccaagttacaagattccgaaaaggcatttcatcaaacaccttcgctgcatctttaactcttccacatttaaaatacatatccattacagaattccccaccacaatagccaaatcaaaaccagatttgacacacaactcatgaatctgcataccatactcagcaacacccaaaatccccgacgccttaagactcgtcgagaaagtgaactcgttcggtttagaattcgaaactcccaacatttgattaaagacagataaacatttctgggcatttccattttgtaagtaaacacacattagagaagtccaagacacttcatttctctcagacattttctcaaacactttataggccaaaccagttctactacattttccgtacatatctatgagatcattgctcagcattaagtcagacccaaatcccatcttcatcaacgccgcgtgagcctgaaaccctttatcgagtaactttctcttcgaacaattcctaagaaagttagccaaagtctgcctttgattcatttcgtaaaagaaaattaaaaatccaagctttatccaatatccatcgaattcgataatgtcaacgagaatattggaaaattcattcgtgcccgcgttgagaaactgtgcgaacttgaaggaattgaagaaaatccatgcccatgtagtcaaattctcgctatcgcagagcaatttcttggttacaaaaatggtagatttttgtgaaaaaatttcagaagttgagtacgcgagtttgttattcggaaaagtgattcaacgaaacgtttttttgtttaacgcaatgatcaaagtctatacacatagctacaagtacgatctagctttggttctctacaaggaaatggtcagagatataaaccctaaaaatcccatttttcctgacaggttcactttcccatttgtgataaaatcttgtggagggttgctctgtatgaaattgggtagacaaattcatggccaagtttgtaaatttgggccaaattcccattcaatcatttgcaatggtttaatggatatgtatataaagtttgatactttaagagatgcacaaaaggtgtttgatgaaatgtgtgaaagagatttaatcacttggaatagtttaatttcaggttatgctagaatgggaaagatgaaaagggcaagagagttgttcaatgaaatgggtcccaacaagagtattgtctcttggactgcattgatttctgggtacacaaagattggatgttactctgatgcattgggtgttttcatggaaatgcagaaatttggtattgaatttgatgagatttgtgttgtttctgttttgccagtttgtgctcagcttggtgcttttgagattgggaaatggattcatatttattcagagaaaaagggttttttgaagagttcaatttgtgtttgtaatgccataattgaaatgtatgcaaaatgtggttgtattgatattgcattgaagttatttcatcaaatgactaaaaaagatgtcatttcatggagtactatgataggtggtttggcacataatggtgaggcttgtaaagcaattgaactctttagagacatggaaaggtcaaaagttaagcctaatggtatcacacttctaggacttctttctgcttgtgttcatggtgggttttggagtgaaggattgagctttttcgaatcaatgactagagattatcatttagagatcgaaatcgagcattatggttgtgttgttgatcttttaggtcgctcagggcgccttgatcaagcacttgaaacgataaggaaaatgccaatgaagccgaattctaagatttggggttctttgttaagttgttgcaaggttcatggtaatcttgaggttgcttatgttgccatggaacatcttttggagcttgaaccaagtgatgtagggaattatgtattgatttcaaatgtttttgcagataatggaaggtgggaaagtgtttcaaatgttaggaagctaataacaaatagtaacatgaagaaaattccaggttgtagtttggttgaagactcttgagtctcatgcagtgatgtcaattttctcatgtaaaacaactctatcaaagaaaagttgtttaaagttatgttaaatccttgcctagaattcataggttattttgcatagataataataataaaaaaaacattttgcaaagtaacattataaaatggtatatattcccgacttatttctaaggtattttaatagggataattacactaaattttcaatttttttacttttatattgtggggtaaattttttcaaaaatactgtatgtttttttttttaaaaaaatactgtgtaaattttatactttgtactgtgttaagtttttcactattgttctactgttgttttttagttgttccattgttgtttttagttgttctgttttgtgttccactgttgttttataaaaccacagtattttttaaaaaaatttctgtgtgacaatattttgttaaagttaacccaaattccaatatttttataagacttccttttaatattatataaggtattttagttttggtataagttattaactatttttttattagacattaattaaatataactgcaaaataattttaattgataaatattcttttttataatcaacatatcaaatataatctcacataacttatcaaaattagagtccctaacacacataaaggaaatatgacctataaaattgtatataaattaaagagtaataaaagaaagataaaaattaaaatagaaaatgaaaaatagatatacagtgtaatttcttttttatatttttcatatatgcgtctaggttcacacaaccaacctgggccagaactaaaaaaattggctaattaggatttttacccctaaa

SEQ ID NO: 381896 - DNA, 2511 bp, Cannabis indica
gactccaacccagcttgctgaagtgcttcagccacctaattaatccaaatatacgttaaaatgtagaagtgtgaggttaaggtccatcaaattctcacgaccaactcacaataaaaaaaatagtcgatgtatattgatattacacgtattatatatagctattattacctcttcaagagaattgtagttgtcaccaattattgagtaattctctgatgagcgcgttggtagtactccacgtatgttttgatattgatcacgatcatcaagaaaaggaatattattaagactacgtgatgaagatggagacgaactagaattagaggtggccgccatggtggtgttgctgtggaagcttggtgaattaggcgcatactgaagactatgttgacgatcataattaccaccaccaccaccgccagtactcctatgatattttgatccgttactccccattaattatttgattatatatataaactataacttaactgtaacaaacttaatttctctgtctagcttatataataaatatatttggatttcttagtacgtataaatagcttagaaaacttagtaataagttctgatcgatgatggtcgtgatatatatatatatataactaatatattattacacctagaatttaatctatgtgcgtatacatagggtttcttatatacatataaaaattactttcatatcatagaattatatgaaaccgatcgatagaaattttgaaattaatattatcaagggatgtatacgtcgccatttaataatcaacctagcaattctcaaataaccagattgttattgagaaagttaattaacaagtgtagatgactttttctatataattattgtaatgtaagtattgaatgagtcatatattaaaaaaaaaagagggtcattaaaaaaggaaaaattaatggaagtaaactaaatatattgtaatgtatcatagatatgtaccttatatgaataaagaaaaagtcaatcactcattgaatttaaataatgaaaattataggaatatttacaccgaaatttctaatttttttaggcgatttttcttttttaaaaaaatactgtactttgtcaagtttttattgttattttttagttgttttactgttattttttgtttttctattttattatttaacaaaacagacaatttaatctaaaatacaagttttaaaataatatttttcccataatttaaatgattgtagttttgtaccaatttgtaatttattagatagaaaaaaaaaattgttagacttgcaaataattaataaagcgaaatagaagtcttcggcaaagaacttgggagcttcttcacacacttcatagtcggtcaactcttccgtggtgcctcatgggggactttaataatgtacttagtcaatcggagaagcgtggagggaacccgtatccttcatggttaatagacgggttcaatgaagcggttactctatgtgggctacgtgacttggaactacttgggcatccctttacttgggaaaaaagcagagacacccctaactggattgaagctcgccttgatagagctcttgtaagtcaaccttggttaaacttgttcttttctgctaaactttttaatttagaagtctctccttcggatcattgccctttattattggaggttcaagaggagaatgttcatgaccaagttaagactttcaagttcgagaattgttggacaagtcatcaaggttgtgaggagataattaaagggtgttgggagaggatgagagggttcggtatcgaagagaaaatggctgaatgtggccgactgttgcaacaatggggaaaagatgtctttggcaacttctcaactcgtatcaagcattgcaaccaggaacttaaaagcttaaaaagtagacgagatgaagaaggaaaaaagctcttttatgaggccaagaaggagttgtttgctgtgctgaatcaaaaagaaattttttggaaacaaagatcaaagcaactatggttgaaagagggagatcagaatagcaagttttttcattcaaaggcttcggctcgaagaagaaataatcagattttttgtctcaaggatgctaatgggaactctcggcattggggcaatggcttggataacgtgattcttgatttctacaccaatttgttcactgctgaagcggctacatgggaagaggttattgcttgcgtgacgcctacagttagtaatgaacataatgatattcttcttcggccagttgaagatcaagaaataaaagatgcggtgtttcagatgcatccagacaagtcgccgggtccagatggtatgaatcctaaatttttccaaaaatattggtccattgtgggcaatgatgtgattcttacagtaaggaatttttttcacaatgaatttatgccatatggaatgaatgataccaatattgtcttaatcccaaagagaaaaaacctgagcagataagcgagctgcggcctatatctctttg

SEQ ID NO: 381897 - DNA, 2646 bp, Cannabis indica
aaaaaaaaaataaaagatataggaaaaattatgtaaagataatcaagtactattatggtaactagaagaaaatcagttaccataaatatataactaggtacttcatgcttgtttttctatattttttaatttttttttaaaaaaattcataaaataacttttttaagaaaaaattatatttttttcaaatttatattttaaaacccataaaaataaaaattctccttacaaaaaattaccaatttcttaaagtaaattttgcaaaactaaacatgacaaaagaaatttattttctatatttttaaaatacataaagcattataatgaaaataaaatagcaataatagttacacaaatcatttgtttcatagtatttcaatgttgttctattaaaatgaacaaaaagatgcatacaattttttttttcaaacaaaaataaataagcaaatattaatatccaagtagtcataaacataatctaatatattatttttttagcattaagatcctaaattcaaattcttctccatcaatctaataactaaagttataccatagataattgatcgtttgtgttgcttttgatggcctccatattttgtagcaaagttggtgccttgattttactagatgggggcattggcgaggggcgagtgaacttggtaggtttaaagaaggcgcgaatcaagtctttaagcgttggctcgccatcttgtgtgtagagagtcactctaatagtttcccaaacaaacaaaacaccaactcccataaacataactaccatcactccactcaatgcttctacaaaatctgatgccatatgaagatgaagaagaagaagagaagaagaaagtggagaagaaattattttctattaagattatagtttttttgggttttgttactatataatcttgggtttctatattgtaatattttagttgaaacaacttataattgttgtgttgtgtattttgtgttagtgcttagaaaaatattgcgctgagtcaatccaccgagagacacgttttgattatataacgttgaccaagagacgctagtttcccaagtcaatgagtccatattttttaatcaaattatcaataaaattattcatattttaatataataacttttacaaaataccactaataattttttaaggcattaccttatagtagtactactaacattattaatgtctaataacaatgctcttaatatatacgcgtgattatctatccaataaaaacttacaccatacataataaccgatggtcaacgttatctttgaccacttctgtactcggtggaggaggaagagccgccatcttgattttgtcggacgacaggtctagaactagggccgaggtcggggccgagggcatgataggtttgaaataggaacgaatcaagtctctaagccttggctcgccctcaggggtgagaatcaaattaaaggttgcctttgcaaacaaaaggcaaaatcccacaaacattactaccatcactccaaacaaagcttctgcaaaatctgacatttcttgttcttctttttttggttattgggattgatttgagattatagcttaagtgggttttgttgtataatgtatattgtataataatatatagttgagataaaacgtaggttggaaaaatattaaatatggctttgagtcaatcgcccgagaaagacgttgtgtcgcatctatagcttagaatttaacgtcttaacaagtcatcatctcacactacttcccaagtcaatgttattaataattaaaatttataatggacagattgtacatgttaacatcttctttttgtttgtttattcaatgtatttataatttagagcctattgattcaaagattagatattaaaaatggtcacatatgacaaaatttatagggtaaactgagttaaattaagggatttatttaaaaatgctgttttttatattttatttataattttacggcctaaaatttttatttataaaacatataattttaaagtttcaaaatttcaaacatatgattttttttaaaagcaaaaagtaagaaaacaactaaaaaaatgacaaaaaattaaggaataattacataaggtaccattttttgtaaaatatttacatttttacgttcaaagaatgtttttttacatttttacggttttccaaaaaataacacgaaaacaacataaaatcaacaagaaaacaacataaaagtaacatgaaaataacatcaaaataacaacaaaaaaacaacaaaaaataacatacatataacaaaaaattaacaacaaatgaacaaaatttcaacataaaaagaccgtattttatgtaaataaaatcaaaaaatcgtaaaaatgtttaaaattccgtgaaaccgtatttttgttatttttgtgcatttgtgaaattaacccaaaaattaatctcgcaactataaattaattataaataaactataaaacaacaataagaccaacttctgacaactataaattaactatatacaaactataaaaataactaaaaaagaatatcaaatagtttacaaaagttcgtaatttttgtaaataaaaaagtttaaactataaaaataaaaatttctatgtgttaaagtatttttgtaatt

SEQ ID NO: 381898 - DNA, 2446 bp, Cannabis indica
aaattgtaagatcatgatatctctaagttaattttgttttcaaaaaattaatatggataataattaacttattcatttttatgttatgaataatgcttgataaacagttgagacggatttacaatctggagcagaacacaagtatgaggtatgaataatgcttcataaacatttttatttcttttgtaattggcctttagcattttctattgaaagtgaaaacatggtaattcatacttttttaatctttttttgttagcaagttttttgtattattatacaataaatacattatacttttttgtacactcaataccttgttgattgtacatttttctcaaaaataaatgctttaaggagatgttcaccttgtattctaggaacatcatatccttgtgtatatggattcttcatacttgtttgaatttcttagtgtataaaactgctttttccagctactatggataatattggtggcttcttgtgctgctctcattatccaatccatggcagccaatcttggggtggtcacaggcatgtgcttcatgaatttaatcactgtttacaacaggatttctttggaatctttaatcgaattttgttttgtattataggaaaacatttagcagaacattgtagaaatgagtatcctaaagtgacaaactttatcctttgggttcttgctgagatttccatagttgcatgcgatattcccgaaggtaaaaagaaaaatctccttcaaatcaataggtttatttttcttaaatggtatttgttagaacagaaatgagcccattatttctgtttttgactgagttgtttatttgcagtgattggaactgcctttgctctgaacatgctattcaaaattcctctgtggattggtgttttactaactggatttagtactttagttcttctagcactgcagcaatatggggtatcttatatttctttgatcttacagtttcccatttaagacagaaatatatttgtttactttagatatgacattgaaggggtcatcctaaaaatatttctaaatacaggtcaggaaacttgaattcttgattgcttttcttgtacttacaattgctgcatgcttcttcgtggagcttcactatgcgaagcctgatccaaaagaagtccttaaaggtctttttgtgcctcaacttaaaggaaatggtgctaccggtcttgcaatttcacttcttggtgctatggttatgccgtatgtatcaaaaactcaaacatctttatataatctttatgacttctttccttcatatttcatcatttcttctctcctcactcctacttcaccctatacttgctacagccacaatctctttctccattctgcattggtgctttctaggaaaataccaagatctgtccgcggcatcagagtaagcttttatcttcaatagattagtattagactgtattttcaaagcataaagtatatgaatggcatgtatacatttacaggaggcatgcagcttttatatgatggaaagtggcttcgctcttgcagtggccttccttattaatgtgtctgtcatttccgttagtggaactgtttgcaattcttcaaatctgaatcctgaagatcaaaagagctgtgaagatttagacttaaacaaggcttcatttttactaagggtgtgtgagatttcataaatgtttcccattactatgtagtctttcttgatattgattatctacatttatgtgtacagaatgtcttaggcagttggagttcaaaaatttttgctgtggctttactggcttcaggtcagagttccaccatcacaggaacatatgcaggccaatatgttatgcaggtaaggttgtattattcatacacaaaaagcttgctcatttccctctttggtaacatgtttgtcttaaaaaacttcagggctttcttgatttacgactaaggccgtggattcgcaactttttgacccgttgtttagctatagtacctagtttaatagttgcactcattggaggctctgctggggctggaaggctaatcattattgcatccgtaagatattctattattgtttaactaatttcattccatatcatattgttctttatttttcatttatttttgcagatgattttatcatttgagctcccttttgctcttgtcccacttctcaaattcacaagcagcaaaaccaagatgggaatatatgtaaactctgttggggtaaatctcattactacacatactaaaaacctttaaaaataagtaacaatgtcataacttttatgtccttatacaatacaaatcatattgcagatatcagtagtgacttggatcatcggctccttgattatggccagaaacatatactatttgatgaccggtttcatcaacttactcttcacaccacttccactcgcagtccgtatttttcttggaact

SEQ ID NO: 381899 - DNA, 4242 bp, Cannabis indica
ataaattaattttaaacatatattatcaaatttcctttcacaaatttaatttttttttttttaaaggtaaatggaaataatactatattaaaagtaaaggagtaaactaatgctaatgacaaatcaaataattgctctattttgtttaaatattgcaattggttagataatgaaaatataattttataagaatactcaatcaaacatatttaaaccaaatattaattatgataatctccatttgtaagcaacattgtttatttatttattgatagtggcaacattgtttattgcttgattagattatactttaataaacattgactgactaatattaatattattctataattttttttaaaaatataataataaatttaataatctgaatttggatcaaaacgacgaagaaaaggtagtaaacgacagcatatttggaagaagaagaagatgggttccaactccggtgaagctagaagaacacgtcttcgttccgaccttcgattccaaaccagaaaatccaaatcaatttcttcaagactacgtttcccatctcacaaccaaccctctcgatctctccaaacccttatgggagcttcaccttctaaacctccctacttccgatgcagaatccgtcggaattttccgaatccaccactccgtcggcgacggagcttccctcatgtccctactcctcgcctgtacccgccaaacctccgaccctgaaaagttacccactcttccagcgccgttgaaacggtcggcggagactgaagattctgagggtcactgcggtggccggtttttgtggatcttgacggcgatttggtcggcgattaccttgatatggaacacgttggtggatataatggtgtttgtatcgacgattttgttcttgaaagataccaaaactccgattaaagggttaaaaggggttgagaagaatactaagagattcgtacatcggaccattagtcttgaccacatcaaattgatcaagaacacaaccaatacggtatgtttattacaattaatcagagaaagcttatgaagatttttgatttgatcttatatttgatttgggatatgtttggatgattttggagcagactattaatgatgttttattgggaataacacaagctggtctatcgaagtatttgaatcgcagatatggtaaatttttctgttaagaattgattcattttgttgcattgtatgcattgctactgttttttttattggtttattatgatttttttcttgaaatttgacatatatcaaattgtaccggttgaaatttatttctgaaatattgagattgttagagtcatgttcaattttactaacagatacatttcgtacacgtcagatgctcgttagtaaatttgaatgaaagtccttgaatctaacgatctcaatagttcgaataaccaaaattcgagagaaaaaaattcgtaattagccctgttttttaagctcaaatctgaagttagagtcttttgtgtgatacaaggtctaattgcaaaagatgaaggaacaaaggagaagaagaattatcttcctaaacatattcggctaagtgcaactgtacttgttaatctaagaccaactctggggattgaggtgaataatactgtaaaacatcattgttgatgaatgcccttttgtttttttggttgataatttgatttactgtgtattcacttttggaacaggctttagcagatatgatggccaagaattcaaagaccaaatggggtaattggataggatacctattgctccctttcaacattgctctacaagatgatccattggactatgttcggcaagctaaagccgttatcgatcgaaaaaagcactcgtttgaagctatctgcacatacttctgtgctcaacttcttctcaaaattttaggagctgaggtacatatatgccacctttttttaacaatctcattatacactttaatcagtgtcaaagtcaatggcaacatggattttgtttctgtagtggttttgaatgaaaattaggagttggactacaaggttctttcaagtttcgactagggtgatagattcagtgaatgcaaactaagttgaatgtttagtatattttgcttgaaagatcaaattttgtatgtgtgtgtgtatatgttgtgaaactgaactggtcaaacagttaactgcagctactgcacttagagctatttctagcactactctggccttttctaacttgatgggaccactggaagaagtaagcttctacggccatcgaatcgcgtaccttgccccgagcgtttatggtcatccacatgtaagtactcatctactcaaatatgtgcaaaagattcaaacctcgaaccacctatttaaacggcggaagatgttcaaatttaaacatctttttcttctgattattgagcctgagtgagtgtcccaattggggtttgcaggcattaacgatacattttcagagctatgttgacaatatgactattgctctggcggttgacccaaatgtgattcctgatccacaacagttgcttgatgatgtagagcaatctcttcaactcattagggggactattcttgagcagaggatgaacaaggaaattgtctaacttgatgatttttttttgtgtcacatcagtaattaattaattattttttaaaattaattaattattttttaaaatgtacattaatatgcacacatgttgattaatatcatttcaagatcatgttgtactaaaattttcaaaagctcctaattcaaacatggaattattacaaccattgttaattgtttgaaggcctcctatgtcattgttgctgagaaagctatatgaataaatatctaacatattaacacagcatggtactaaccctttgtttggtagagtgaattgaaggagagatggattgaggggtgtggaatgagacaatccatccttgggttgattttgtttggtaagaaggaaaaggagcaaaggatggaaattcttatggattgtcaattacttgggtccataaaaaatgatcctcccacatatgggtgagtggattgacaatttatttttcaaaataattatatggctaatttttttaatattgtaaataatagaaaataccaattctttctttctttctttcctatgatagcaaacaaaactaaagaaagatgaatctatcaccatttcatattttctatactttctacgtaatcaattttttcttattttatctttcttactaaacaaatgataaaaactaataaaattatgtgaggcacacataaacaatttatctttacaatcaacaaaatttaatgcatgaacacgttaacatattaagagagtagtggtttgtcagtttttgccataaaggaaatagaggattagttgttataattggtaaagtttaatgagtttagccgcaaattactcacaataatataatttcattagctttggtacaccgtgcccatttggctagattatacgtcatgaaatcataatttcgatcgacccaaactagtttttaattctgcagtctatttaaagactaattaaaatctatctaagccacatttaagtttatcgtcactaggaattgaggttgaaagtaattgtgagagggtgaaagtgtaaaaaaaataattaagagaggtgttaatttttttttttagtaaaaaaacatgagaaaataaatatttggaggaaggtgggcatgacccccataagatcaatatacatccatccctaccaacctcgggcctaacatgttgaagtctcgaaacaaacacagtgacattattatactagaaaataatattatcctcatggtcgattttgaaaatatgggaggctaagataatttaaatttttagactcttaaaatataaatatatattatgcacaaatataagaaaataaaactatatgtataatttaattattttctataatattctaatagtctaaaaaaaaaacacaagtaaaaaacacaaagttgaaacttgaaataagcaaaagagaaaataatatatttgtatatttaactaaacttgaaaaataaaaaactcatcttgaacttttctcccacatagtcaatccaaatagcttggttgcctacaagttctatacttatggcgcgtttactaaactgtaattggaattagaataatcaatgggagaaatgtatcagtttaaaatagaaaataatcggaaacaat

SEQ ID NO: 381900 - DNA, 3480 bp, Cannabis indica
tttttcgattctaaataaagcatttaacttgtttgtgttgtttttaacagaccaatttccatacagctgtagagcctttggatatttgcaaacagaggaatggtaaggttaaccaagctgatgagactaagaaagtagagagagctgtttatggagagcatttggttgggaaagtcctcacaaattttgtgttctaagatcagttgaagaagaagacatttgaacctattttgtctttctaaatcagttaagtaatccacctagaatccctaataaatacccagaaagggtaactcagattatcaatgaatgtacccaaatctgagtttcatgatcctattgtaagattaggcaaagggccatataaatgtacccaaatctatccatatctatattttaaaataaaggctgaatatcttggtagtcctgaaatttttcacttatgttgacataagtcattgtttttcacataatcttactatttaaaacattagggacaataacaacaatacccataccacattgtgtagcaataacataagatcttttacaacaagtaatcgagaataatattcaataattatccaaaattgatacaatcaacccctaaaaagaatatagattcaatcaatagattccaaaactcatacttaataacttaaacaatggtacagccatttcttcttttgttaatttctggcctagattctgtcatgcctctagcatgaaataaagtctgactctttcaccgaaatggcgactaagctatgttagtaaatgtaaaaataattggtattcaaattgtaattcataataaataatctgctggtattcaattttgaatagaatgtacccgatttcaagtgccaacaacttgatgagattgtatcacgaagttgacgtatccaaactatctgctgtcgagacttctgctacatcatcatctttcaaatagagcggaattcttacgcctagctctctgagctggtccaccaaaccataaagaaattcaaaggtcagcgtagactgtgcattcagatcttctctaacttgtggttgaatcctaaaccattctcccaacatcttgtgcacatgggcacgaatcattcgccatggcacaggatactgttcgcatagctgcaagtactccaccaatagatctgcctgatctaattttccatctacgaagctttcttcactgcctgcaacccattctgcagttcgatatccagcaaaaacagctggattttcaagaagagtctcagcagaaaggaccccttcaacacctgtctctgccaaacacctatgaacgtcatccatgtgccttatgttcccatttgcaaggacggggatcctgaccgattctttaacagccttgattgaactccagttagctctaattttccttccatctttttcatctctcgttcgtccatggacggctaaaagagagcaaccagcttcctctagcatcctagcatagttaattgtatcttgtaaatttggaaagagacggattttgcatgacacgggaacctcaaggttgagagccaacttttctactaaagatttcacaagaggaagattatccattagaaaggccccatagttcccacgtttagcaatgcgttgaggacaactgcacaaaaattcatacacttaagagattagttcgaaaaaccatcagcacgaaaacttctataaaacggtccataagaatttaaaatgacttaggctactacttttctcgatattcattaatcgaagaataactcattagctttctctaatcatagaaaaccaaatacaccatagcatttcaatgatacaacagcacaaatatgtaaactaagataagataatctttctttaaaaattaagagtatattatagaaattgattgacttaagtcattcttaccccaaattaatatcgacataatcacaatacggctccactctctttgcagcttccagtaaaatgtctggatcattagcacaaaattgaacaaatagcggcctgtcctcctgcaatcatgataagcacatatcaggaaaatttgccaaattaacaacttgtcaaatttgcaaaataaccacatagaattaacacattacagccattatggtcgcaaagtgtaattattggtctcaaaaggtgattattttgcaaataattttatttggaaagttattttaataatacaattttaactaactatgatttttgccctgaactttttaggttattaaaaattctctcaaactattgaattgttggactcaaggacttctcttcaattttataactatcgtgacaattgtccatgttgttagtaaaatttgacaaaagtccaaaaattcaggggccatgattcaatacgtgtgaaagatcaaggaataaaaatcctaattagcctaaaaaatttcgaaaaaactttgttttttttttggtatattggcatggcacacactaagactctaattcaaagcttatacttcacaaaataacaaaaacaaaaagaactgatctttcaggttatacatttactaaaccaattaagttcatcaaaatcagcttgaatttatcaaataaaatcaaaaagcttgtccaaaagactaaaaacaaaagaaaatccaaaccttgcaagtagtaaactccaaatttcgatatttctcagtctcagtaaatatccgagagtgcaacataggagtatacgcagcttcagctccgtacttacgacaaagcaaacgaaaaggaagttcagaattatccaccattggagcaacaatcagcttaggcctaccgagtctcttccagtgatcccaagccctctcaattcgcgattcccctccgtttagactccgggaaggagattcagagcaaaacgacggcgtttccagtggctgaactcgtttctgtccgtcgcagcaaacaaggtcgtctaagtcggcggaagaagaagtagtcggatccgatgagtgggagagaggtagagcgagtgtggaagccattggagagtgtagtgaggtggtccgagatcgagggaaggaggagaagaagagaagagaaggagttggggttttgagattcatgagaggacagagtttgagtggtgcgtgggaatatcaccattccatttgagacagtgtgtatgtgggccttttgttgggctaggcttgtttttgggcctggcccacttacaatctccacactccctaaattatatgacaaaatattttgtttttcaattttttattatagttatatttattataattagtaaattttttacaaaatataaattgtttacagtattaaaaacagtgctactaattagtaaatctcctaaggttttacattttgcttagaaagccctttcaggctgtttgcctacacgtactcaacttcatagtaagcatgttcctgtgggtttacattgtgtgttgtgcaactgtggggaagagtcaatattccatg

SEQ ID NO: 381901 - DNA, 2153 bp, Cannabis indica
acagtgacgattcagtatttttactttgttggagcttatttattattaaaaaatatttatagttatattataatcactcttactagatttatttaattttgtaaagactttttattattttggtttataattatcaaattaaaaaaaattcatttaattttttaaaagataatatttttgttatagttcattgtatatacatatgcatattattatccactaagttaggaacttgtctatgttttgttaattttgtgttcacttttagatgacacagagcaattaagaagggatgttctatgcttaagccatcaataataaataccacttttagttttttatatttatttaaaaatgttaaaatattaatataaattatagaagtgattatgatcattaatcgggctaaattatcattaaataaaaattatatgaagataagggtgtgatttctttaatttatataatcaattaatagcaatattatacatatattatagtaattaaagaaataaagaatataaaacaagacatgcatgaattaataattcctatatggttttgaaatgatcgatcgagttacatgtttaattatgtgcacgctttcatgtttttattattccttaaaaatacaagattttttataaaaacaaattcattccaataaacatatttttggctataaataatattgtattttcttctcatctaatctaatctaattagtaattggatttagaaaattattatccaattcgatccaattacacctcaaaattcaatcaaattagtaatttgattgaatcgattttttaattaaatatccaattacatatctaatttttaatattatcttaaaaatatgaagaaaagtacgtacaaactaaacatcacattttacttaaatttaatattccataaaaatattattattagaagtgtaatgcaattaaaagtttaaaataactaaaacaacaacattattaggcaataaaatagaacaaaacatcatgaaaacaaatatacaaaatagacaaatgttacaaattcaacacaaaaaaaatcccgtaaatgtataattaaaatatgtatttttttattatacataaataaagataaataattttttaatgtacacaaatgtaattagattggattggtttttgattaaatattgagaatgactccaataactgatccaatccacttagaatttaacttttaacatccaatctaattgtaattgtatattcaattttttataatttgaataaattggattggttcggttcaattgaattgaattgaatgttgcccacccctagagatagccattagaggaacatgcatgtagtattcttagctataaaatgtgtcacttcacattacaacaaaaattatcaatagccacagacgtattagtggtggaaaaatccgtcgctaataggggtaacattagtgacggaaacaagattcgcctccttcgctaataggggtagtattagcaggagccaaagggaaaaaaaatcatacaatcaaggtcagtcagttgcgcctccttcgcctcctaatgaaatatataatgttgtggcagatatgtttacaactatacctgacacattaaggagtagtctgatacctgaacaactgccaatttatataactcatggtttgataactttattcaaatgtatagtcaatcgcaaactcctggtggtttgtcttctcagagttatgtcgcttctccacaacatcaacaccagcaacaacattctggtctggaaaaccaatttttgtatatggaatccctatgcagtctccttcgctcggttcaaattttgttaattttgagatatttgggagttcttcgcaggaaaagcaatttttttcgaccccaatactcaaccaagctcaattaggggaacttcgagttggtttatcgtcagatcaaccatatgttccttctctgccatagccagcgggacctcccaataataataatacgaattaggacttttttctccgagaccttaatgatgattttatggaataattagtttaagtttattaataattcaaacactataaatattaagtatattttatttaattagtttaatttgagacattataataagggaaatttgcggcaa

SEQ ID NO: 381902 - DNA, 2416 bp, Cannabis indica
atttgttgctagttatagtagaaaaaaaatattttttttcataaatattaaattatttaatattaaaaagtaaccaatctaaaataaccgatccaatccgcacttttgcggattggattgaattggatttgaactattgtgcggattggattggatccaaaaaatgaaatccacacttagtgcggatcggatgtactatgagcaaaatagtgcggattgaattggatgaacacccctaataactgattactcattatagtaactgattacctccttatagtaactagttacccaaaagtattgattacccttacctaattttcttatatttttaaatttttcttaaattttttccatgataatttttgaaaaaatattatatttttgctttaataatataaaaactcataaaatttataacttcatctaaatttaagaataatttattatctatgaaattgacattttcatttgtaaaatcgtttaatttttgtctcttattataattatagtaaatatttagcattataaattatacaaaaattagtcaaatacttaacatgtaaccacaatacacttgtcataaattaacaaaaaaaatcttcaattagaacgaattcaatattttctgatttggtgttgcaccatgttactgaagccgggtcactgagcactactagtgaagaattagaataggtcttaagggacttttgggaaaatgtatgaaagttttgagtgagttagagagtgagaatattcatagacatagattttctccatatatgtaatcaaatatctttcttttgtgctggttcatttgttgtttgctcctccatgttaaggccaaaataattttattgtgtgattattgctatgtcaattttccagagttgaactttttatgcgctcagttataaaaaacaagctgaaaatcttttgatctcatgtgattattttattacatatcaattatcatcatccaaagccaggacacattaaggaggaaactggacccaatattcacgtgggagaccatactagaaataaataacaataaaaagtgaaactcttgaatgggatcttcttctctttatatgtcttaatctgtaaatgtgttaaaaaagagaatgtttggttcaaagttcaagacaaaagacaggtgaaaaggtgagaaggaccatagatatgaatatgaatatatgatataatatagtcgaaggcaaaaggattctgattcccatatacaaatactattttgttttctcttaagttgtttagtgaaaaaggcaataatgaaacctccacatccaaaacatggacaaaatgcaccaaactcaaaatttagctcaaaaataaaaaaaacacatgacactcactcagagaatcagacagactcatcactcagcatgaatagcaaaaagggttttagccggaataccaaaatagttaggcatcagaacccaagagtggtatcatatggcattcattggcagcccacgagaggccattttcatggggcccttttcagctttgctagtaaatattgttagttagtacaattcggcaaaagtttaggcccatgatggataacaagacgaagaggggtaagttgtttcttttatgtgaaatctggctcaaagtttgtacaaaaattgggtttccaatgcaaacgctgacttgtgtgaaatgaaaaaagaagaaaagaaaagattcattttgtgagaaaagagatggatcttttcttttgggggcgttaagaacaatatataactcgtggggtttgttgttcatttggacaaacatccaaatcccatttcggattggaccactttcatgtatcttgatttagagcatatattaattaatgcaagagagtgtaagtttgaaattttaaacccttcttcacatggttcgtggtaagtcatgatcaataaaagccaacttatatatgttagagtttttattcggagccaatatttggaatgatgaagaaatgggacttaaacttaattataccatttataaaaaggacaacctcttaagttagaaaaatatggtctctactgcaactgtgtacgagtgactaagaagagagctataaattcaaggtggtaccttgcacaaaaacggagaagatttgccatcatgacacttcttataaattatggtctcttttgctcaatgggctattaagtataacataatttgttttttttttcttggaaatttacatccatgacacttgttaatttagatccccctgtcacacttattaatacagtttacaagaagagaagaaaaatacaaataaaaccaaaccagatcctatatggcttcgcctctagtggatcaagatctggtagttagttacaaccgaaattgtaactaactctcagaccttgatcaaccctaaact

SEQ ID NO: 381903 - DNA, 3955 bp, Cannabis indica
ctctacatacaattggtgaaaaacgaacccacagaaagtacattttcatactgtggaaatctaaccatatcaataaataaccagttaaaagtaaaagggaagggtgtaaaattctaactagcagatgggaaagttgtgtcttcgttgcaagcacaaacaacataaaagaatatgctgtaaaaatcaaaagaatgtgtgcctaaattcaggttgtatattagtagcatagatcaactttgatgtcaaactctgaatctttgtactgctatataatgctatttaagtcaaaactttgcagcactatatatgcatctccttttcaagaaaaataacgtctactcgttatttaattttcattaattagttcaacaaattagagaaatgaataattttaatttagaagctaatatgttacctttcacttcacagaccaattgcatggatttctccgcaatagataacaaatgttgatatccaggaaagccatcaattaacattatctcatctaattgcctgaactttccgagatcatctcccttctgcgtcatttcaaagaaagatagatacaactaaggttaaaaaggaaaaaactgatggcaaacaaatgcaagaatatgtcgttagaccccaggctagggagaaattactaaatcaaagggtgcatggatctttgtattaagggtagtgtttgtttgggaagggaataccaatagaatagagggctcatgcaaaaattgagtgttcactctttgcatcataggtccgaaggatcactttctgttattgctttccttttccagaaatataatgaaaagccatgactaaaatggttagcttctcctactgttttgatcgattactgtttcatttgcttttctattattttggttgctgaattcactactcaagagaagagaaagaaaaaaaaatcacagccagtaagtcacagccagtaagtgatttagttctgggcaataaattaacattcttgaatgcttcttcagtgaaataacagatgggtggaatactgatccacttaagacatatgtaccataatatagagaagtaccttcattctaccttcctcaaatatgggcaaaaatatgaaaataggatcaactgaagtggcagtatagagacggccatctgaaagaaataataaaatgacaaaaagataaaaagatcagaacttatatatgtgttcaagcacaaggtaagggaaagaccaaatcagagcaccaaccaacaaaagaaattgtgatctaactccactaagtaaggttgaagaaaagaaagagagttaaactgaaaaccttagaaatcatttcaataaggccttttacaagatatgattacccatcatgcaatttgcaacattactaatgacaacataacatgtacaaacttaggtaagtgaccgattatagcccctataaatatatccattcctgggatagattaggcaggaaatcatgaaccataagtagattatataatttaacactacttgatatatcatacaatgtgataaagattaaacacagacaaagctaagtacacaagattgaacttcccacaagccaaaaaagctaccaaaagttaaaaaataccttcagtaacataatccccaagaaaccaagaactgtacggctgcttaaaccaatgcatttcttgaaggacgtcatcaacaagaagatagcaagttgcaattcctgcaaatcagtaaaataagagaaaaccaacaaagctataattacttgaattgaagcatccacgggaagaacctgaacagaacccataacatatttcactgaactgaataatcatgtgtacttgataatgccaatgggcaaaatcccttacttaaaaattaaatctttggtaatgattgttgtgaaatgaatacttaccagttttgggatggcgaagggagagcaaacgcccaaccccattggtagaggaactattgttatctgcaatgcaagtataagccattataagtaataaaatagcagagaagataagagaagaagtgaattgttatgggaagaggagttaccgggcgcaatgagaagacgggtttcgtcgaaaccttgagaccaagccatgaaaatgaaatcaaactcttcttctttctcttctcttctcttattctttgcccataaaactcatataattaggtctcccgctaaaatatagattgtaaagagggaggaagaaaaaaaaaagaatataagtaaaagattaatttgtagggtaaataactaagtttaactcgattgtagataaatatttaagtttgatttttgacgataatttttgtaggtacttaacttttgagaaatgctaaaggtcacaagtggtgattaacaccttcttatgtgtcagtagcattattggttcaactaaatatcgagtcctacataatttaatataatagtttttagggagtatcgctagccaatcgcaacgtgacatgtcgaaaatgtgctaggtaccacaagtgtctaatagcaatgctcttaacttttaggtgtgaattattttcttatttaatgacttggtggaccaatcaaagattgtcatttgactattgacttacacttaaaaaaattgatgagtctactaactagggtgcacatgggttggctgagttagaagtattttaatgggttaacacaataactgtggtttgaagaagtattaagccattcaatttttctctttcaccctattttctttcctaccaaacatacaattttttctttttctcttcacttttctctccaaaattttctttcctatcaaacatagggttagagatgggtaagctttttataatggtaaatattgttttaaactattattttataaaaattatggatctgaccatctgttttatcaaataaaaatttagagtttatatttttcgaaaatgatacaaaatagtacgctgagtttaattttcatcaaaataaaatttaataataacttgatatggggatatctataaccaatttgattatattttttctttcatttgttcattctagaaacaagcttcatgttgtttatgtttttttaaaaaaattaccacaattgagcttagagtactattttatactattttaaagaatatagaatccaatttatgatttaacaaaacaaataatttgatcggtaacttttataaaacacatgatacaaaatagtatttataatttgtctaatagtttattaaattaatatatatatatatatatataaatattacaacaatgatccatttcattgataaaataataatatcatataggctataggactatacattctaaagaaaaatggaatggaaagttatctagctaaataaattgttcatcttttcaatcatttgatgtacatgaatcactgacactcttaaaaaacatggataactataatcttatatcactaaaaaaaaaatctcttaacaaaaatatacatgattactaaaaagtcagatttaagaacgtacaataaattttgaagatataactatatccaacgtcattaaaattgtcacacattctacttaaattattgaaaaaatctactttccactcttaaattaacagtggatatttgtttcacttttttcaaatattctaaatgaaaataatcaaatgatccgaaattacataaaatacaataaaaattattaagaactatttttaatgaaaataaaagtaccataaaagaaataacttatttgttaaatatgttattttctaccatttcaaatcatcaaaactctaagggtgcgtttggaaagccacattgtaattaagatttgtgtgtaattggaggtaattacacaatttgtcatgtttgtctgaccatgtaattacactgtaactgtataattggaagtaattgaggggttccaattacactctccaattctcatgggccc

SEQ ID NO: 381904 - DNA, 2482 bp, Cannabis indica
ctgcaagttttctttaagtttcaaaaagttcatctatcttcttattttttgatattcacatgatatagaatttttggccattaacatcgttgacgagttcttaccgtcaataagtaatatttaaataattattatttatttttacaactttttagaaacttttaataatcatctatgtatacatgtttatttatctaattgtaatcaatttttttttttatttaattgacaaacaaattgtaagaattgattatgttggattgatgcctgttgtcctgatttttagctagacacgtgttaccatcagatggaggatcaaagtggtgacgtggtgtgcaccacgcaccacataccacttctcgagagaaggtcccgaaagcacgaccttccatgagaataagacaagcctcacattatttggcaagcgacaaccgagagagctcccaggacccaaggtaaacatcactttctgggataagtactgataattgctaatagttttgaagtaaaaagtactgattgtggagaatgctcaaaagtaggtaaggcaatggatatcacagggggagggggagcctctgcctcctaatggataggatcttttgctggaacgtcagggtgatcaacaatcctaataaataaaacaaggttaagaagttaatctctacaaaaagagtaggggttggttggtctccttgagacaaggatcaaggctaggaatctaggggccttgtaccttcgaatgtttgccgggtggtattttactactaataatgcgtggaatagtggaggaagaattatcataagctggaatcctaagatgtttgatgtgaatataatgttttgcttaagttagatggttcatttactagttaaacctaagaatggctgtggttttttggtaacctttgtttgtggcttcagtgtagagaaagagcgtaaggatttatggtctgagcttaaatcaattagtactaaggagccttggttagtactgggtgatttcaatgagattttgaaccatgaggagagaattggtgttagagtgaagtataagaagtctattgagttcaaggattgcatagggcactcttagttagaagatgtatacatgggtacggagtaacaagtagcaaggtgatgatcgcatttattccaaaatagatagggttctagctaatcaatcttggctttattcctatactgaagttggagtatttttcttgaatgaagaactttttgatcactctcatgccttacatttagtttaccaggaaagaaattatgagaaaaaattatttaagtactttagaatgtggagtcaggcttcaaatattaatcaaaaattggctaatgcttggagtaggggtgtacatgggactgctatgtttcagttgatccataaattaaagcaagttaagttgatgcttaaagacttgaataacacaaattttcatgatattcctagtgctgaaatgaagatgaggatgaagcttcagaggtctcaagaagctatgcagaaagatcctttaaataaggatttaatacaaaaggagaaggaagctagagaccagtatgttgcagcaaataaggcgtatcaatatttcttacagtaaaaagttaaatcacattggcttaaggagggagacgaaaactctgcatttttcatacaagtatccaggacaaaagaacacaaaacaaaatatactccataacaaatatatcaggtaggtggttatatcaacctgaacaggttcaagaagcatttttaattttttatgaaaatatcctaacaactaatatgatagatataagaagtgttattaattagatgtagttgcgcacggggctatagtaatagaaaatcaggctcaaatgcttttagcaaattatacagctgaagctgtgaaacaagtaatctttttcattcctactaacaaggctccaggactagatggctatagtaactctttttttcaagatataattgtggaattattggtaaagatcgatgtaagtgaggctattctctcttttttttcatttctgggaaactcttgaaggaaattaatagtactgtgttgactcttgttcttaagagtagatatccaaatttagtgagtgattacatgccaattacttgctacaatgttatttataaagcaactataaaaatgatttatacaagactaaaacttgtcctttcgtgatttaatagctcaaaatcagaggagatttgtccatgggagatttataccacacaatatcatggtttgttaggatcttgttagtcattatgggagaaaacacacaaaatccaattgtataatcaagcttaacttatggaaggcgtatgatacaatagaatggaggttcctggaggaattgttggctacctttcattaatttgattacgcaatgtaatatcccagaaaataaataatatttaaatagacatattttattaaatatgtaattactt

SEQ ID NO: 381905 - DNA, 1338 bp, Cannabis indica
tggatcagatgaacacccctagttaccttatggtttaaataatgctagcatgatatcttgtaatttgatatagtagaattcaaattttaccaatatgaataagcatgcttattgctttttgagagtaattaactttgaaattgaattagtattttaggtaaaattgggaaagaaaacctactttaggtgtagtcaatatgacataggattgacattgttgttagtttgtgtttagaatagaaatattatcatggtaggtagtcaaattagggttggaatttaatgttattgatagatttaaatcttgataggaatgtgggaattaatatattagctagatttacttgtgatttaaaaaagaccttgtgaataattaataacctaggctatcaattaggcaattagaacattaaagtgaagatgatgaaagttgtttatagaagactaaagggggaaatgaaatacctagatttcttattcttgatttccttaaaattgtaagctactagtgttcaacattttaatcaggttaacaataaatgactattcactttgtggttttaggagtaggttgttgaaactatgcactattattttgttgtatatgaacagtaaagcaacttgttcagcaaatatgcaagagaagggtctttctcttggagtgatacaagaagctagtaaaaaattgtttgaacatattaattcctcccactataggaagtactagataatcctcctgttatcccaaattttgcacacggtgatgtggcatccagtaaggtgacatgtggagagccttctaaaacttggacggaagatatttcccttaatgtatcgttcggggtaattcatgcctgagaatgatagtctgaagaccgatgtggaacaactggcaggttaaatgttaccatctgagcagcttccatcgtgatagtgaagtcgagtgcttcacacggggtaaatgcggctgaagcacaattcttagagatatttctcattaatatctccaataaatatctcccatttaaatccctatttttatggggttaacacacattgtaaagttaatagaaatctaacttagttttcccttttattctaatttattttaaaaaaaccaatttaatgtctttcttcctctataaatagtgaagtcatttgactatggtgggatttgatttttgattctctagaaagccattacactctctaaataattgtaaagttttccttaggattattgagaaactcacttggccagctccttgtgatcttgataattctttgaagtaatacaagtaaaaggggagtagggtaataactctatggtatagagtt

SEQ ID NO: 381906 - DNA, 3659 bp, Cannabis indica
gttattaaagtagaatagtaaaaaaccaaaaaataatttacatacaacttcatctacttacacaacgataacaaaactagggaagaaagaaaaaccaaataaaacaaattagtttaatcaaaaaaaaactacaaacaaataaagaaaaacagaagactagaaactctagctgatgtatatcatagcagtctagctaagtatactataatcgatctctatgattacatgtatatatatatattaatttacaagaaatcattgatgtccaagctctcagggatttcgaactttaacaagttgctgcagtagctaatttctctctcgtcctcggtgctgctactactgttgatattattattgaccgtagtattattggtcgacgatgaaggcgttgacataacagaattcaagccaaaagccttgtgatcatcactataactatccaacaagttttggaagtatgaactttcaggaaaatcaccaatattaaggcttggaatattactagtactgctattattagacctacagtccacatagtttggttgtgaaattatattttcttggctcaaaagtactggacaagatgaagagatgatttttggcatgtttgactgattattatcaacattattgggagcttgcatgggattattaaagccttctgatgagataggagcagtttgaaggaactgattgttgggctgtaccaattgtgggatttgaccattagaaaataagtgatgactttcttgtagattttggggattaaacaactcgggattgatattttgatggtctagcttattattattattgagtgataaaatggtggaagctaaccttaggagttctggattgaaaagggcttgagtacccaaaaggcttgagagatttagaagtgaagggttacaaaaagatgaggaggagttagcagcaagaatggaagacaagtccaaaaaatcaagacgaggtgcatgagtcactggatcaattcccattctaagcaacctttttcttatgtgggtattccagtaattctttatttcattgtcagtccttcctggcaaacgagcagcgatagctgaccacctaaaatattgttttaaaaagaaaaaaaaatattagagggtcaatccaaaaatgataattaaaaaaaaaaataagattaattaattggacatgaacatacttgtttcccaaaacactgtgtagttggattatagtctcttcttcttcaaatgagaatcttcctctcttaatgtcaggcctcaaataatttgtccatcggaggcgacaacttttgccacatctttgtagccctataataataacaatattaataatgtatgaagttaaaattataaaataaagtaataattaagatatatttaaaccatatttaattaataccagcgttctttggaaggtttctccagtttccaggtccattcttctgaatatagttgataagattaagatcttcttcaggggtccatggacctttcttgagaccatttttgtcacaacaaggagctcttcccatacttgtttttcttcttttggataaggtaggagtgaagacagtactatagcctgtttattagaaaggtggtataggtactttaattgtgatatgtttctaaatcaaggtagagaaattgttggtttattgctccaaaagggagagatgccatcatatatatatactaggagaatatcaaccttgacatatcatttgaagtcaaagagatttggtgccgtcccttgccacgtgtactttgattatatgtacttttttttgttttgggatgagtatgtgttacatatttcacttctattggccttaattccctttattttagcaaatatgggaccacaaatttagtctcgtggaaaaaataattgtgacgtcgattgttttctggcctcctaatactgtttgactacaataatatataactttttaaaaacgctagctatctttgatcaatctattattattattattatttgatatgtatggtaatttagttaatattaatttattttttatacatgtattacgttgagacaagatctgtggtttgtcgacaacctacattgattttgtacgggcttaataatttaaaatacatgttcttcggaacgaaatacatttctgacacgtacaaaacctaatgcattttttcttagaataatacaaatagtgggatttgcttaataattatatataattagctcacatgattatacatgccttaatgggagatgcacacatggtcatttacatgtcgggtagttaaactatccaaaattcttactataattactaacttattatgatttgatttctagtgaaaaaagtggataatttacctttatgtagtttctttctcttatatatgtataatagataaaatacgtgtctgcttgcgtgttagatatacttggctaaagagaagagaaaaagagcactaaataaacgatgtatttggtatattgtcgagtaatgtaacggtaattgtcaaaagtgtattgaaattaaaatggctgctactaactcgaagcttttttttctgtgaatttgtcaatatatggttccttcttctgttatttatttaattataatttttttttttggcaaagctcaattagttagaaagaattatatggggtggtaaggtagttaggcctaatatcaataacttagaggaaacttttgttcttagttaaaaaatcatcattcgtgatcacattctcaaattacttgtaacttgagctagctaggaggaaataaagaatagaaactaggcaccattttctcttaactaattaattatcatttattttcttcggaagtccaaatacgtttcaataaaagtaaatatttttttccttggaagtattccaattaggtaataatagtaattagcactgcatatataaggtggcggttaatgatattctataaaaattattacattaaatcatatagtaattaatatttaattgtaacaatatcaatatatttttaatggtgacacatgtacacatttttattaaagattaagaaatactaaaacatatttataatgtttagcatccttatgatatatatatcactatattagtatggagtttattatattttattttaataaaaattattaaaaatcacttattaattataaaatgttacttcataataatagtagtagccatcttggtgtctatagaaatggtagactaaacaaaaactctagtccgctcctaaaattttgagtttattcaaacagattagtcattttttgacatcaaatgatttaaaatagttgaggttatctacttatctttaatttgggatttaaaattttgtttgtaatgttactgtatttcaaagtaatacagatcgctcttgtacctaaaaaaaaataaaataataaattattaattaacaatatacataaatatatttatatatatcaaaaatacatattttattaaaaaaaatcaaaaattaattattatcagttattaatataaataatgtcaaatcattttaacaaaatatttttatttagttttatattggcgttatagaaagaaggaaaattacctcatatatattatttttaaaaaattttttttttacattt

SEQ ID NO: 381907 - DNA, 1672 bp, Cannabis indica
cacattcaacttctagtttctattccataagaccgactcgccattcaaactcgactcctggccaataccattaattctaatagcatgccaatagattatgaaccaagtataaactgaatttttcacgatgccaagctaaccaatcagagataggagaatggcctctgggtataacaagaatagccccagcctcatctttttcagaagagctgcgaaccaagtcaacattccataacctcaaaggtcccaataacatactcacagtaacatccaaaggtaaataacgtggagaataagaacaattaccaaacacagtagggatccaacgatccttataaactgaaggctatgagccatcacttgttagccaatgttttccagaaagaaaaaagatctttcccccattaaattgaatgtcagatgaaagaaactttttagtgttaatggcctcaatcagggaagacgtggggaagtaaatagcctttataaatttagccacaagagagtcaggggaagaaaacaaagagcttgattaaatacaaagaagtccctaaaatccatatcacaatcaaatttatgtcaacaaagcatatcccaagtacaccagtgaatcattttcttatcaatacgaccaccctaccaaaacagtgcacaaagtctttgaatttcattcaccaagatgacaggaagtagaaacagattcatggaataagtggggatagactgaattatagactttagaagtacttctctaccactagtagagaaggactgagacttccaattgaacagcttattccaaatacgatcacaaaatagattaaaacaagaccttttttagtttctcaacatagcaggtgttatccatgttttcaaatgagaacacgtgtaatttccaaagggattatagctcaatcccttcagtcctaataacaggcccatctaaaatgtcttaaatactaaaacgtacagagccatttaaaaaaaataaactaagatattctactcgatgccaaaataaatttgaataaatccctacatactttttttttaaaaaaaaattattaaatataatgtaataataatataagaatgaaatgaactagctactatatacaccaaatattgcgtatagtgtacttgtacgcttatatatttgatgcaattataatttcttggagtgaaaaaagttaaatttaaatcaacactataaatatagtcttacaaccactattttaccgagtaccatatgttttgtgtatgaataaaaattaatccaatctatcacacttattttgaaatgaaatatttttaattagtaataaaataacatttgattttattatggtgttaccatagatgtaatatttatagagaggtattataccatgataaacacaaataatttggaaccgaattttaatttatttaatttggtacatactaaaattcttataacttcaagtcattcatttcatattttaaatttgagaggacacaccgtttagttttgccattttaaaaaggattcttttatttgcaacaacaatgggttgtatataatgtggagaagatctaatttaatctaattgaacatcgatctaattcaatttaattaggacattttacaattttgtatacattattttaattaattataaaatatgtgcaa

SEQ ID NO: 381908 - DNA, 2497 bp, Cannabis indica
gcatgaaagaaagaaaataataaagagtgtgagctcgtgcttctgcttctgcttgcacttgggaacaaaaaaaaaagaatccacaatatgagtttatcctattataaaaatttatcaacaaattacacattaacaattgacttaattatcattccatcatagaaggtggaagtagtaataataatatcttagttgattggaccaacaaaactaagcttgatattttagattgagtttattatatggtaatgtggaagtgaagagtcattgtctaattgtgtagatggggccacagagataggattatgagggcgagcaaggcaagaagaagtaggaattgggtttgggggcatgcaaaccaaaaattgaaactaaatagtgttgtgtctgtgtcaaaagagaataattttgctgcccaaaattctgactattacaaatacaacaaatttatcttctttctttccttccttccttactattcaacctctctactcactctactatttccttggcttttgagttttgacccttgtcactatcaattttggctctctcagctgcccacgccactttgcatgtctctatcctatcaccatctgacacgtattcattgtcgggtcaaggacgggcccgactcgtctctttcacgggttggtgaaaccttaccagaccatggtaactaaactaacaacaattaattgaccaaatctaatttgtgagaatgaataatagtttcgtaatatagcttgtacagatacacatttttaaagctaattagaatagttatttcaatgataaaaataactactaagattaaaaagatttactaatatatttcaaaataaaatggtgtaataattatttgaaatattgagtattgataaagtaatttctgtttttggtttaatacatattattcgtgttctattttatgaacaaaaaaagagaaagaaagggagacatgtgatttctcaattatttaatgtgggacctaatgctttttcacataccttctcgtgacctcccagtaacacagtgtatggagtgcacacacaataataataataataataaaaaaaaaaaaaaaaaaaaataataataataataatatattctctttcatttccccaaatttacgatgatatatatcttctaaaattataacatagttggatataatactaatagtaattctattatatattttctttcatttccccaaattcacaatgatatatatgtatatatatctactaaaataagatagatagatatatttatttatattccttttgaataaatattaattatagtggatgaggattttaatacatttaatattgtttttgttgggtagctaggtgcaagctcacgagcacaagcacacaaaccatatggtattatgatgagtagagtagaaatatatgttagatttcggtgattctctctctgtcccatataattgttttcatataattaaatatatatatatattataattattatcatcaattaatatatatatgtaaatgtgggttcaaatattagacaacgctagaaactcaagtcaaatatcaatgggaatgtaaatgatgatgagacgagaccgcagcccacctaaattgatcgtaaattatgtatatatgttaattatttgttttattgataattcatatatatcagatatagatatatatatttatatatatataattgagatggccgttgaaaatttggatccaagagaaaaattcagaggatatgcacatgatcatgtataaactataaatttatgtcttcgattttataatgtttttatatatatataagataattaaatgaatattacgtagtacagttaacatgtatacaacaattaataaatacattatatatataatatcacatagtttacccaggaatactatcattatatattgttggagtattttaaatgtttattaaacaaccatgtatatattactacataacctatattttcattagttacatatattattatttgataatataatagataagattaattaattgtgataaatatatattataagtaaaatatatattaaagtatttggaggttatatgtatatatatgttatatataatgtaacaaaccgtgaagagttacatatgtgaatataagatttgtaacatatatattatatttgaaattatgtaattaaagtgaataaaatacatgtgggagttataaaattaaatggatagatatttatttatagtgttgaaatgagtattgggatgtttgggaaagagttgtctaaaaaatgagagttaaaactaaaaaatagtgtgctgaaattgtcttgggcggcatgtcgatcgtctaaaattgtgttggacgattttctgtagtttaggtggcgtttggttactaagtgaaaatggaatgggaatgggaatgggaataggaataagaatggaatggaatagaatttttattcttttgtttggt

SEQ ID NO: 381909 - DNA, 4992 bp, Cannabis indica
ttcgagccccacggtgggcgaatatgttattctttttttaaatctttttcattactaataaatatgtacatattttctctttcaaaaaaaaaaaaatgtacatattttagtaaatttacttaattatcgtccttgaatttctattttatattaacaacaaatgtgaatgtaattgagttggatgagtaagaatgttgtgaatagaatcatatacaaatgtagcaagtttgctttaggtgtgatcaacgacatttgtgtttttattatattatattttacaatgctttattttgttattatggttaaaatagaaagagtattaataccatatgatatcttagtattagatggggattagatctttattaatgttgtacttgtattaaatcattcatacatttatctaatcaagccttcttctttataaattagaacaaaatatccatttgatatttttaattttcatttttcatttaaataagcaattttgaattcgtgatcccacccctaaaaaaaagaaaagaaaaatatatttcggtaactatacaaaagcttgcataaaaagtataataatgagataaactctctcctcgattatgaactagttcatgatttctcacatgttctatgaacttctcttgtcatatttctctctcgaattctgaatagttgagtcatggtttataactttccatgaatcttgtatttaattctggcacacataaattccaaagaaaaaaatcctacttactaaaatgaataagaacagtaatagtattcaagttatttggtaaaaactaaaaagaataaggaaaataataccatattctcaacctcaagctagaaatattccaaaagactagaaaataatagggaaagataataagcatgaaaatctcctcaacactactaatttccagttcagaaaagagcccccaagccaaagaagttgtaagtatactccttttaccaaagatgcttatgtcgaatacattattgaaattattacaaaaaatcaagaaaatttccattttctgtgtgccacaacacaattgacaagaaattcttttgaaagaaatatacgttgagcacaaaatttacgtcatacaacggtcaaactgccccagaatcagttcaggttcggcatgtaaatcaaccataaaatgagcattattttagcttacttgtactgctgcgacatccgccacaccaacttatccataaactgacatttcttgtcaaatccccagccagggttgctctacaagttaaacaagtaattgtacacgaaagtttagatccatttaaaagaaattggtacaagaaaacctttaaagaagaagcaaggaaaacaaattacaccataaaatagccaatcaacataaaaaggaaataatttaagaacaagaacaaaaaatgaattccaatgtatcttgggaaccccaagtcaatcaatgagactagtaagtatgtttgggattgtccacatttgtaaatgggacatgcaattaagaaaattgggatcaaacagtacaaactccagaaaatagtagaagattcactttctttcttggtcattctataacaacattaagattcatcacagtccacctgcgaaaattataacccaaatactccaagaaaagagactatgatatgtaagatgtatgtgggaagaggggggaagagaatgatctagatcttgtaatacctcgggcaattattttattcacatttttttctattatttctttcagtactgtagtcatttcaaaatagcaacaaaaatattgaactatactacatataaaataattaagtacaatatcaaaaagcacacaaacataccacatgtcaaagccagtgaaaatgcacaatttagaactagctatgaccaaatggtttctatgaaaaaaataataagcaaatcagcttcactataaggatcaaaaattaaaagaaagaaaaccaaagttaaattggtaatcatgtctagttttttgaatactgaaaataatcttatacacaaaaaatactagagtccaagatgtgaagggtgaggaataagagtgaaaacaggatttcaattagttttttgaaaagttttagtatgtttatactagacttagtttcctattctatatagttcctgactcattctaaaatgtacatgttcttccactttctgcctatactactctactcgcctaactgtataaaatcttcctgactcattctaaaatgtatacatgttcttccactttctgcctctactctactcgcttctctttgaaccccaatctacagcagtgatgcataacaaaatcttaattggagatccacattttttcgagtgactgaatcctgatatacctcagccacgcatgatgatcatcatcaggcctcagaccctcatttcaaaagcttcattacattcttccagaataaaaaataaataatcctatatacaacagtacaaattatcccccaagggcaactatcaacaagaaataatccccaaaagcaattaccacaatgtcacagcaacttttaatgcaaagttcatcacactacatagtctcactccaaaaaatcagttccattcttgttgcagactaaaaataaataaataaattttcttatagggcaactacaaataactttaagaacaatcataaccccattccaatggcataacaagcaacattacatgatacattatgaattatgaagactcaatttagacaacaaatgagaagaaaagactaaatgaaattattattcaacaacaaagctaacctggagagaaagtactgcacgatcggtgaattgctttacagaatcaggagcccttacggggagagttttagcaaccctttctaattcttcttgttgtctcttcgcagtcaccctatttggtccactgtagtgatcaacaatctccttcaacaatggcactgtctccattgtctctttcatgatttcctaataaaatgaagaattaaggtcagaaaagacatggacaaaacaacttaattcttaaaactatgtgtccaccatgagtccatgacaaaaactataaaagagaccaaggtgccattgcatctttattctttaccaaaagccaatcatgtaaaaaattaaacatcaactcttacctcccactcttcttggctttcaatgccctcataagccatcaagaatggctttgccttctcgagtgcatctcgaagagaaataggtggcttctcgtctatatctgggttattctcaaaatctcccatcatatattccggttcaaactctatctgcaatccaaaaaaacaaatacaagcaaagcccaaaactgagtaaattgtaataaaccctgttaaacaaaaaacaaaaaaaaaaatcaagttaccaagaaatcatcaaatgacccaagaattgccaagtaatcctaaaccttattaaacagttcagttcaacaatcttacaattataacatggttggttataccctaaactacaaaaaaagatttaatttcaacagaggtaattgctgttcttatcacttaacgaaactaaacaaatccagcaacaccaccaaatacaaaatgttagtcatctcttatctacctgaaaaaccaaataaagcaaatgcatcatcatttggcccaaattcttaccttataattcacatctagagcatccagataggcgtcatccgttggagaaggcagtaccctatcacccatctcttcaaacccttcagtaaatttggtcataacttcagttccaaacttctcggccaacttctcttccattttctccgcttcaacactgtcaccgaacaacgctgtctcattctcatcttccgaatcctgatacctacccctccctcttccagtccctcttccccggccacggccacggccgcgcccgcctcttcctctcatccctctacctccacctcttccaccttctccaacatcagcaccgtccgaatcccgccccaatacccccaatgcatgctgccgcgcctcttccgggctcattttcggcactgctcgcctttcagttgccggaccctgagcctttggtggccgaatatgccggttcacttccttagtttggatctctggacccggtggttgcctcctgatttgtcccctacctgcaccactcaacatcgacgcaatattctccgggagacgactctttccagcgtccgaaacgccgccatctacaacacttgattgcagagaatccctaacctcttcccttctgaagaaaatgggtttcttcggttcagaatcactgaactcctccggtggcctctgttcggcgccaggtgggctcggaactgaatcggagggtgctccccgaccagcagctgaaggaggcttgaacgaggaaacgaaagaggtataggaggggagaattggggaagaagcgaggggtttaccacggccacgtcctaaagaggacggagattcgtcggggtcgggtttgacggcatcgggctgtggctgacccggagctcgcggtgcgttaaagtcaaagcgaggaatggtacctcggcctcgtcctcggccatctccaccgccggcggaggaagtagagtaggggagtagggtttgtttgggtgttgcattggataggttaatggagtaagggaggtttcttccgatagtagagcttcgtctcattttggcattggaaaaccagtaaaaccactgtgagttgggttttaggggttttcttcaatgtatttttgattgaggaagaggaaacacagttttctaaatttgtagtttacatctctctattttataattttatgttttagaccctctttattttttgttttatcaaatgtatctatccctattgggtaggggtgttcgtaaattgatctaaaagaccgtcaaacattagatattcaattgttattcgatcgcgttgcatttttttgaatatctaatgggaaatttacacagattactg

SEQ ID NO: 381910 - DNA, 2863 bp, Cannabis indica
gttattttctagttgtttattttaaaataacacgtattattattaacttgttgatacctaaacccaattaatatggaaccatttcatattgtgctaaattaaaggaaagcaaacataacattttgaaccattatgtaccaaatgaaatcaaatccaacaacatacaacactagacacttaattaagctatgtccacactccacaccacaccaccatatttaccaacacgtcctagaaacaaagatttgcaatttttttttacttttctttttttcctttttaaatttttttatataaacatctaaagaacctagttaattccaattacaacacacatgaccaaccttgttcttcctctaacctccttcctcctcaactgaattgatcaatccattacatttcacagcatctttagtacccaaaattccttctttttctttctccaataatttctcttcttcctccttagccttaatctttttagccttctcaagtgcttcaaccaaattcttcatacactcatctgagtcttcctcttcagaattcaccatcaaattctcagccacatcagcaggagtcatttcagtttcacccaacaaacactcaatcttagaaaacaaatgatgtgactcaacatctaagtagttcttggcaagaaccttaaaagccccaaaaccacaataggaaagctctatgtgcttgtccattcttcctctcctaataagagcaggatcaagtttgtcaaaataattagtagtaaacacaataagcctctcaccaccacaagctgaccaaatcccatcaacgaaattcaaaagcccagaaagagtcaccttactataatcatctattgaatcttcattaacagggtcactactattactactctgttctccatctttctttttcttattcttcttctttcgttgaccagttagatcaagagaacagtcaatgtcttcaatcacaattatggacttactcgaactgtcaatcaacagtttcctcagctcagtgttgtccttaacagaagtgagttccaaatcataaacatcataatcaagaaaattagccatagcagagatcatggttgattttcctgtccctggaggaccataagaagataccctcttttccaaggcttaccaactttggtatagtaatcctttccgtttttgaacttaaggaggtctttcataatgtctttctttaacttggggtccaaggcaagtgtttcgaaacttgcagggtgctcgaaatccacactgatccacttacttgatttaccacttcgataaatgtcagtagagccattggtgtaaagctttctcttgcgattcttgagggctattcgttttccctcctccaagacgtggcggagataagcggtggtgatgagttcgcggtggcgtctatggaaggagagtgtgaagtaccttttgtcgtccgaatttggataaccccacctatcaaaatacaaatattattaagagtggcggattcagaatttaagttgtgtattttttatttttttttttgaaggaatccttttgttttctttatagtataatatgcttaaaaaatgggttaaatgcaaaattgtattttgatagtattaaagatgatttaaagtaaaaatgtaactaaatataagttttattattaggaatttcaaattgtttgaacctttttggtgtattattctatatgagaatgagaagttagaaatgtttggggtatcaaagttccatatcgagagaatagataaaatttgtcgtgagagtttaggtccaaaacagataatattgtatgtaggaatcaaagtgagatagcggtccaacaaacggggcaaacaaaaaagtatataccagaaatattatagacttaaaaataatgtttgtaataggttttcttatttcaaaaagagacaagtagatttgataagaattggttattgagttctttttagctcaactctttgcttggggctttggttagttgtaaatggtattcatgaactgtaaaatcaaactaacgaaatcacatttaattataagttcatattataactaactaaaatacatttatatttttattgtaccttagtgaggatgcagtggggtctattttgtgagaaatccacttgagcttaacacctttgaattgatcagggacttgggagttgtcatctaggcttagaaccatagatttactatctttaacatcagaagccttgagtttttgagctaggcttgtggagttgacacttaggtaagtttggatattttcatagagttggcttcgcatgaaactgtcaccactgtactcgtggaaactaattttcacataaggaaagattaggctcatcattttgttggtaaaggtgtgaacatagagttgaatttcatggggaacgaatcgtgtaaatgttgtataaactaagaacaaactagtcaacattgcacttgatttaccaaatgtttctagcatcaaggacaacatttttcttttctagggtacaattacaaattgaagcaataaagtggtacttagcaaagcatttagaatcatctatttatagaggaaaagggatttttggtttcttggtatagaaggataagattggacttgttctttgccttgatatcatattattttatttgtgggtgatgaggggactaatttgtatgtattttctaacacgtttctatagacggcacactaatagattggatcaaagaaaagatttggtaatgaatatatacaataatgttttttattattatatagagtaatttgttgcgtcaattttaagtttaattctcgattgtaaataaatatttaaatttaatttttgacggta

SEQ ID NO: 381911 - DNA, 1965 bp, Cannabis indica
caaagcttgtgagtctactcttgttggaacctcatcgttcaatagtgatattggaataaagctgtcacattttataggttcatccgcaaattctcctccatcagactcaaagacctagttgtcgaaaaagatcattcatctaaaagatagaagatcatttcagcgtgttgtgcatgtaatttaaggaggaatgtcctcacacggataataatcttaaatcgaaaaggacattaagaaaattgcgagtattattcatgttctaagtaaggacctacatgcatgtgcaagcattcaatgtgttctagttgaaagatgcaaatattcgaggttcgtactgggagagatgtgagtattcaatccttaagtaaaaagtttccgaaaaattccctttttgccaatttttccatataatttttctaccaagaacctagcctatcattttcatcattttcaccctaaaaacccataaggtatgcgaacattcataaattaaacctcaaattaactgagaatttcttagaaagattaacctttagtttcgaagaaatttctaactgtgattccaacttcaagatcttctaaaacataaggtgttggcgaagaacctttcagaaaagcttctggatcgaaggacaattttcaaattttttgataggaaaagcttgagaaaacttgaaaaggagagggacactaagattttcattttgtattaaaaaaaacatatataggggtcaaactcacccactgagattatgacacatggcattcaaagaccaaaggtcatttaatacaacggttaccccaagtcaggcttacacaaaccccaagggtctggttacatggcaccttggaaaagtaaatagtgttaaatgtaaccaccccttcaaaactcttgacaagacaaccaaagatcatcacaacgtgatggtgcaactcgcctgttcctttgaggtagttttgttgattaatagagtgccatcgcgaaactaagggcatgtgttttatagtacaaatttttcgcctaggaatatcagtccagcctcgtgaaaagatgacacgtgtacttgttcctcaaagaaaaatgatgacgtttcaataatatggttctcataatatcaacctcgcatgatttaacttgcaagaagatgcgaccaaaataatggtttaatcgcatgactaaagttgttaaagaacaagcaggaccaaaagaagttagtactaatcacgtatattcgttatatgcaatgaacaagtatatctatcctttgacaagtaaaaattgtttctttatataggttgtggtctaaatgactgatgtgtttgacgactgctaaaaagctcagttgctctaaattgtaaataagaggaatgtccaaaatatgcagtcaaaggtggtcgctgacattcagctaaataaggcctgaagcctattatatgagtacaacaccatagagccctgcgagcttgcatgttgggatacaaacagataagctgcgaactgacaagttgcatacgttgctacaattaaggaagagatgaacaggtgaaatcgttcatacatttattgtttaaatatttttctcattaaattatgtaattatcgtaataacggtcctaactggccggtagcataatctcaacaacatttgcgttgtatataaaggagtgatctaaattcaataagaccaagttgaaaacaattagtgaaggtgaactaagcaaaccgagctctgactgaaccactataaatctcttgtcttatttatatttctattcttgtttttgtctatttcgtagcttaaactttgggtactcacaattctaagtgagtattcgcataacagttggagagtatttttgtctaacttgaatactcgtcattttttagtgttgtctaaatttctctctcatactcttatgtaatatatgcactaagattgatgaagtgatctaattaggggtaga

SEQ ID NO: 381912 - DNA, 2164 bp, Cannabis indica
tccttggaaacaattctgccattcgggtctttaatattccaaatatgattcctcttcctccgaaccatagtggaggcatggaaaaaagaagaattcctatcacccttcgccaaccaaatttcccgagatcgttgcttccacatagattccttacgtttccatagatctcccaagctattaagaaccatattctcggccaataaatcagcctcatgagcttctttggattgaagagcttgaagctccaactccaactccttgatttgcaaatcacagtcaccatatacatgcttactccaccatctgagggcacactgagttctgtttatcttcttcccgaggctacaccctttttcccgagtccaggcttcttcaataacatccctactagatggttcattaaaccaagcttcaaaaaatctgaagggacggaagcctttgtgtttagctacacaagaatcaaacaagatcgggccatgatcagaacttgtgatcgggaagttgcgaacaccacccaaaggacaagctgttagccaatccgtatccacaattactctgtcaagacgttccctgactaagttaccattgcttcttttgttttgccatgtgaacctgcatccactgaatcccaaatccacacctcccgtggctaagaggaacctctgaagaatggctccgtgacgacgcgtgaacactcggccacccgacttgtcttccttgttcaaaatgacatttaaatctcccataagagcccagggccccaaaagggagttaattttaagagacaagaaatcccagaaatcagtcttttgatcgtcataaggcgtaccataggctgccaggaggttccaaacatgtctcacagctttatcttcgactttacacatgaaaccgaaatcaagagtctcagaaatctcaatgccaacatctttattccacagaaaacagagccctcccgcaagaccacgagacgggatatacttgccataatcaaattgtaaccctctacaaatacttatcatctgatcacaaccaaccttagtctccatcaaaaacaaacaatccaacctaagcttcttgacccaagccattagagcttcgattgccgccggtctagcaagaccacggcaattccaggagagggctctcattgggattgggggggcttggtaagggccgcctcctcgcccaattgaaaattttgctcaattctaacatcaaagagttggttttcagtctcagtagaaatacagttagaggtgatacctggctcattggtgtgtgtatctggggtagttctagcatcatgaattttgtctctgaatgaatcttttcggcccttcctcttgctggagctactagacagtttctttggggatgatttgccaggattgaagggagttctcagagaggaattgagagaaggagtcgaatgaagagttattataagagtaacactaccagcagcctttcttttctttgagacacaacccgtatcaagggggttagaattagaatgaaaccaaacattactattgtcaagtgagcccaccccttccttcagaatgggcccatttaacttgttagtaatttcctccacaacatcagaaggcccatcaaggaaaacgggttcagggtgatgatgtggtgttcgagatttacacacctcatggtggggtatttccacaacttgggccgcatctgggcccacatcggccatcatgcaaactaagacactattatcctcagggtttttgtccaagaggttcatgggatgctcttccacgttaatgttagggatgccagatgtcttgccaggtgtcgccttgccattaatttcttttgaaattccctcaacggaattactcgtaccctccgtacgtacgacctctgcagacgaggtagtggcctcatcgcacaccatagtaccttgcacctcaggattcaccgtgctcgcctgaatattccctgtcttcggtttcgccaccggtaacacatccctttcccggagaagacgaggtcctcttgtatcaaaacagctacgaatggggactgcagcttttatccaaggtccataaagaggcactgcctttccaatgggagggaaagcaaattcccgattcctcgagcagttgctactgtcatgtgttaggttttatgccct

SEQ ID NO: 381913 - DNA, 1321 bp, Cannabis indica
ctctctctctctctctcgcccaccaccatctgtggccattcctctatctctttctctctttctctttccatgatccctatttctttacatgtgacccatgttgtcatctcataaccacgccaaaaacttagaaccctaaccccgaagagccacgaagatacctcaaattatcgttcagctccattagtgtcgagtccaatcaacgtcgagccccatcgattccaatctcgacccctttgatttttcgttaattctaagtttatattttttttttctttaagatattcatgttattgttgatttaggttaaactccatttgggttagttttgattttggtcaaaaattaattttaactgaaatatgagtttgtttgaaattttgattttgggtgtgatctttgtaaaatcttgaaatttttttctattgttgccatttgagctctataagcattgatatgtacagtatttttttttcttattttttttgttcaaactcgattgcctcgataaaaaattgatgctaacacgataggatctattttttttttagcataataggttcgataccatctcaatgatattttgacactagctcaattagattaatatagattcaatataggcttgatgggagatttcattttctggagtgtcctaggttaaggacaagctcactaggtggcggtcttcttcgctgtgttgttttggtgtattgattgatggtactcgatggttttcttttttttttaagaagaagaacatgtattcattagaaaccagaaaaacaaagttcaagatacaaactaaagaaggaaatcagatcctttccataaagcttcctaaagcaaacttagctaaacgatgagcggcttcatttgcccctctaggaatatagctcacagtaactttagggaagaaagacagtaagctttcaatctccgttgtaagcctatttaaatggagattgtgagaagtattgttataaatataatcaactagtattttacaatccgattcaacacaatctggctgaagagaatggtttctgcaccaagtaagagcttggtggagtgcatgggcttcctgttggaattaattttaccaggatcttagatctactcacaagtatgttgatttaacaacctaaatatgaacttctaaaacgataaataaaacacataaaaagttaagaaaccttacagtgattgcagtggaataatgtgtctccttccactcagatctctaacccttgattcctgtctgtcgcagagtataatcaagatctgagcccgaaagtccttcagatggatgtgatccttc

SEQ ID NO: 381914 - DNA, 4092 bp, Cannabis indica
ggtcattggaggagccgaattgatcaatcttattacgcacttttaacaaaaaaacctcccatatcttcttgactaatggatgcagaagtgccttatgattgagcttgactttgagtactagaacttgatgccgaatttttttcaatctataatccactcctctttgatagtcagaccgatcctcaagaacattattcatagctggaaattgctttaatttgctagaagatccatagctagaattattttctgatcccatcaagttggcaacctttgcattcattttctactgatcaaataaaacgttaaaaccactatataccttcattttaaaaatattataaacgaaaattataaacttatgtgtagttcctggcatgtcttgctatcccaagtatttgttcttttttaaatagggaatttttttcaagcataaattgcatggtcttcagggacatcctgttgaaaagcagtgttagtttgtgtaatgtgtaaataattttactaatacaaagttaatcatttcagtaatataaaattaatagttttacttacaaattcattacggattgctgtcatcgaatttgtgccttgcatcgacatatacttcacttctttttttttcttgtgttgattagatctcacaataaactttgggctaaaaaataattcaataatttgcttctagctctctgtagagtagtgatcagatttagcattgataacaatttctaaatcagttggatccccagaataatgttctagaaagtgattgtatctgagattctttcactcagaataccgtctttgcatctcatggtagagagtttgcataaccttttcaggatctaactgatcatcaatatcgtataaatactacacacgaataatacttgttaaagaattttgtattcattaaaattaaaaatatataccactaaacttgttaattttttttacctttcattttttgtaaaacttggtctttaaagtgctgaggtacacatctttaaaattcaagtagtgtcctggcaatacattatgacttcaacacccatttgacgaacaaaagcttgttttttttgtgccaaccactttgcctgtcacttcatcaagtgttagtggtaatggttttcctgcattccgcctttgttgttcaacattaaggttagtagcaaggccactgtaatattccgaaaaaatatattgatattttaattggacatattttattaaatatgtgattaagtgggcattagagtaggattatgatcctactcaaactaattacgagttgattaaggaaataagaataaataaagtctaatttattaattacggagattttattgaactatgtgggtatcgtagataccatatttcgaataaattattttcgggcctggcgactgtggaacttgacaaggaggtcagaaatatcacgataataaaagattaattgaattagattttataccagactagtttagagtgttgggatatcggtttggcaaattagctagaattaccaaaatgcccctagattgtgttatagcttaagttgatggggaaggataaaatagtcattttaccctaatttgtttttatgtacccttatagtaaatgggctgctaattaagtcaataatgatatatatatatatataattttaggttgttacttattttatgtaataaggagataaaaaaaacataagtattgagatccttctccttcctccttctacccttcgaagccctaaggtacaaccataaccaggaatttttcctaccattttaagctgggattgagcaagatcaagagtgtttacactagaggtaaaattcttggtacttttcccttggttttcttagatttagattaggtcttgggttagggtttcaagaattttgggactaaagaatagatggggttagaacctgtttttatactcaaattaaagcttgtttaggttgagtttggatagaagtagggttgctggtttaaagttaaagaatttaaggtttgatgagacaatatattcccatgaaattatacttttgttctttaatcagaagagccaccctcctttctctttaacatgctagaaagtttggacgttatggctgcatagaaaaaaaaaaagacacttagtatatattcacaaaggtcaaataaaaacaatgcaaatgttaaaatgtttctaccctgaacctctagaagagcaccctcgtggactaagaagtttagggcatcttcatctgaagattttgctttgagctctacttaggcgacacccttttcttttactgccactactagtacggcaggacggacagccctctcagtaacatctctgatcctaatcgaccgctctatttatgcttgctctcaaactttctgaacgacctctttcttgtccaacacactttattccgaagcggaatcattaactattggaacttcttcattagcctctatggattggtacaatccatatcgaaggaaatttcttctcgaggccagcaccgagatgttttgagcccaagctggtagcttaagaacaacctaaatccttgatcccagtccagggtgaacggaggatgacaatatggttcagctcattggaaagataggtggtcggcatccatcccttgtgcaatataatagtctttcaaaacaccacctatctttgttacctctgtgttgttagtgtcggtcagccatggatgctgtaactatgaaaaataaaagtagcctaagcagttatgcctcgggctaaacatcagattaaataaccagtttgtatcatgtggggattgctccccccaacaccctgattggcgtaaagcacaaatcgtgcagccaaatacttaattccctttttgggtgaattaaatcaagcaaatcttgtaataattggtaatcctcttaaaatatgagtgaataggcaagatcatgccctcctcagtgtgggtccagagcatgcacaaagctcctccagcgttagtagcaagctacctgagattaggcaagaaggcctcgacatctccaagaaggcccttatcttggagattatttatcctctttaaggtaagggtggacggaggcaatattcaccgagttgctttcttgtcctggttttcatggggagggcctcctcaaattctacctcaatgtagccctgatcttggaccaagacctccccggacttcgagatgagttctttggcctcattgtaccctccgtatgacatggtccaaggaaccttttcctcttctatttatttgcttgaggaaccagttgcacaggcttcctcttgttcattagcctcccctatttcctcgacacccctaggcacctcggggtcatcttgtggctctttggcatactctgcagcaaccatggttgtgatccaagcaaggtgaggatcctcagtagaaaccttcgtcaagagttccttggttttttccattttcttaggtttgggtagtaggtttgatagtatgcttagctatagaatctgcatgtgtgaagtttcttcttaaaggccctagacgaccctccaaaagtgtatctggaactcttgcatggaccctttatatctaagaggtcgggagatactgcctctagcctctattgagttcttaaatgaacctttcgttctcctctttgcttatatgtctgaggtaattaatgattgtgttgtacgactagttttggagactctaatgaatcactagatacttcccactcgtcaaagcttgaagtggatgaatctccacttgatgatgatgaatctggccagagtcttagctgatcttcaaggagcagttcgagtagatcgttgtctatttagtgttcacctctctagaattcgcccggattcatctataaaagaaggagagagaggtgaggacagaacagatgagaaggtttttccaaagaaaaatatctccaatgctccgactaaaagacacttgaagattaaaaagggaaaattccttcttggttgtgaaattccaaaccagaaaagcttcgagaacctagctgtaacgccctatccaacagggacgccacgtgtgtgcaatt

SEQ ID NO: 381915 - DNA, 2403 bp, Cannabis indica
ttttcttccccttatctttttctagatttgagggtccatccccagggtggttaaacttccttatttgcagaactctggagttgaggttctcccttgttgccaagccttgcagctctaagagggtttcttgtatttgacttgtggcttcctcttgtttcgccaactttgcttattggtgaaagactatttgtctcaaccttacaacttttgggtcctccttgtaaaactccttatattctttgttgtagtttttgtcgtagtcgtccctttgatcctcatctaggccttcttggttgtcctcatcaagggaagttttgtcaacatgcttttttcggttgatggcctttctgaggtagcaactgactactttcgatgcttcaccgtctcctacaacgtctgcctaagcagtagcgtcttctttattgttgcgagcagttggtttcgcgatcacagttttggttgtaaccatcgttgtaaatgacaacaatggtagtaactttcttgaactctcgatgaaagcactaaaatatttaccaaaatttttagaaactaaattaaaaaatagattgagctacaagaaatttaattagaagtaaagaagacaaatatttttacgtgattgggacgttaatgagccttagtcaacgagtcaatattattaagctctttggctatggagtattttacacaagagtgttcttgccaaattttttaaccctttgcatgaaggtgaagagccttatttataggtcatatttaggttcttaggtggaccgggtttacatgtgtaaaataattccactgatggggtaatatattataatattaacattgggtcgagtatgtgaggcccaattaagagggtgtatgtcgtccatacagattcgtactattggacgtggacagttgggtacacgccagtgatcgtgaatagtgaatgtcagagtagtagacattggacaaaaaagtggttttcattttttattgtgcgcctttccaaagtttgacacaagggacaaacccctgattcttcaagatttggtgtcaaaagtgagttatgtcggattggtcccggacggtcaatactctgcgacaccctctcaactactcattcaggatgactcctgagggcatctggttgcattcatttgagcattcatttatttgaacaagtatcattcttctaaatcccataagtccagcttcaccatggtagagagatagttaaatctggagccacggtccagctatgctcatggttgactctggatcctacttcaactttgttcatggactaggtcgttaatctatttgggcttagcgaatgggcccataagctgacttgaaatgatacatgtttactcgtgtcatgttcccaaaaatataaacaataggtagcttaaaattattaagtagactctcgtactgcaattacacctaggggtgttcacctaatccaatccgcactatttttctcatagtgcatctaatccacactaagtgcagattttatattttggatctaatccaatccgtacaatagctcaaattcaatccaatcaaatttgcaaaaatagggattggatcgattacttttattattaagtttttaatatttaataaatatttttaacataattaacaataaaacaaaataaactattgttcttttatgtttccaacaataaattaaaataaataaaataataaatcaaaataagaaaaaaatcgtatgtaaaaagaaatgattaattttgttttaaattatacttttctcatatataataatggaatacaaatttaatatattaaattttaaaatatatttatatcatatatatatatattagattctcaaattattattgttttacattaaaatattcattgcatatataatttttttaaaatagataaatatgttgaatcggtaatttttaatgtggtttttacaccacgtattaaaagttttaactttgttacttttttactatgggacagaattttttcaaaaatactgtatttttgttcaaaaatattgtgtaagttttatattgtgtactgtgttaagctttcactgttattccacatttgttttttagttgttccactattattttaattgttctaatttgttgttttacagttgtttataaaaagtattttataaaaaagtattttagtaaactttactaaaatttagtattttgtaaaagctcatttttacatatcaatcaacattcaatcagtacaagtacgaattttgaatttttcaatccaatctaatccgcacaagtgtgaatatctaccattttcgaattaaattagattagatcattatattttattaaacactcttaattacacttataatacataatgcagggccgacataaataaata

SEQ ID NO: 381916 - DNA, 1344 bp, Cannabis indica
gttacaaaaattaatgttattttttttttaaaaaaatactgtgttaagttttatactttgtactgtgttaaatttgcactgttgttcgacggattgtttttttaattgttctactattattttaattattctgtttttgttgttttatggttattttatatataaaaaaaatagtattttcataaaattctttgtgacagtaaaattgtaaatttttgccaaaaatttaatatttttataaaaacccttaatggatgtttagataattgaccttgtttaaattaaggatgagtgcttgaattaactctatttgtttattgcgccgaattaatcatccaattaaatctctcttactcttctctcttttccacatctttctcatctatgaatctgaaaacttatccataactacatgcatgtttcataatcaaatgtatcatagtggccacaccaactccatatatatcattctaattttttttatttattaccatcgaatcgatgacacaaaaagcaaaatgcgtgtatgttgtgtgtgtatatatagatggtgacatgatatttattatatatagctagctagcttaattagcattataataatacattaatgaaaggagtttagattaattgtatctgcaaatggtataacatgtaggcaggtcaagtgcaccctttgagaaagataaatggctggtagggttgttcataatttataatggttctgaacattcaatcgaaccgaatcctatgaaactggacaaaataaattcagtgaaaatggtttcgaccagctgtttatgattttctagtgacggttaagaattcccgccagtagctcaaaccaaaccaaatcaattcacttcggtcgcgtttgatttggacgaatgaaatcataagaatacgaatgggaataagaatatatatatggaagaataaaatttaaaatgcataaaaaaaaattgataaaaaaattattaaatttttttcatcattcattggaatgatctttctttccattttaaaatagaatagtcattccaccaaaatagtggaaagaccattccattggaataacatttcaatatttttatatgcaaccaaacaaagtaataaaaataaaaattgattcctttctatttcatttcatttcattacctccaattaaacgccaccttaattttttttatatgaacgtagtatgttttttatgcaatgccaatatttgggaacaatctttacgtacaatatgtattttttctttttgtatttttatgtattataaactttaaaaattagtataaagaaaagaaaaaaaaagaaataataataaaaatgaaaaat

SEQ ID NO: 381917 - DNA, 3027 bp, Cannabis indica
gcaaaatttaaactaaattgctctccctgctcagaggaaagaaaatagaaaggttgcaaaacccaagattaattttaaatgactaaacacaagcccataaatgatacaatcttgcaaatgaaaatgtcataacccactgagatttttctatcacaaattcacaaactccaactaatgtttaaaaagctactactgatttcactacaaactaaaggacaaatttaaacccatctccaacaatgccgaaacaagctcaggttggtaccctcctcattacaccccctctaaacaggttcaagtatcggtttgtggttgctgctgctgctgttgttgaggctgagtctgcggccatggaacgaaagccataggtggtctaggctgttgagcagcgtacattgctgcttgatcgacaggttttcccatgatcatcccagttggtccagcaggatgctgttgcgggacatagtagtatggcatgtctgctggcgatcccaccaccggaagggtagctttagggaccccgagtccctcctctttcaactcatctctaggaataatatcaacaagaaaatcgaagacatcagtccttgaaatggcagctgcaatgtcattcttctgtagtgttctccttttgttttcctcggtgtggatccaagaacgcaaagtcagctcgaggatgaacatttcacaagccttagcgaatatgacaggagcctcggccgaaatcattctcacatcctcatcagctttcattattttcttgattcgggcaagcggtaaactgtgatttttgaaatcagttgtttgttcgatctcttgcatttggttagcccaaaacatctgaagctgctgctgttgctgttgttgctgctgatggtggaagtgctgtgcttgctggaacgcaagctggtgcgatgaattagagaaattagcaggaggctgagtcggggaaggtacagccacagcaggagcaccggaagccaccatgggagcagtttgatacgaggaaggaccatacgacatttgacccgaacctgtcaccatacccacaactggctgctgctgctgttgctgttgtgcttgttctgattgatccatggttgatcacaaaaggcgcttgctttttttcctttcctgattatttcgacattacaatgctgagcaatacaatttataaagcacctgccaatacaagtactactgaatgagaataactgagcatatttcatgtgtaaatctaagagtactaatcaagttttcgagctttacaactattcaaagaatcaattccatgttttcgaaatctcctccttccacaacattttcatacaaaaaaaaaaaagaaaaacctaaaccttatttacatcactttttaaaacttgcatgcctctttttccttaaccaaaacactaagtgaactatgtcaattagccttaactagattaagagttttaaacacaaattagtatagaaaaagtaaactttactgtggagatcttcaccatttacaaagatcaacacatttggtcacaaaaaataaaatgtgattgaataaacacaccatttgtccattttagaaatttagaacatgccctttggtaaaaacttgaataataaacacaaagaagacttactcacccaaataatatataagttttttttcaaggggtccttttcccaaaatattaaacaaaacaaaaaaaaaacccttaaattatttttttattatgaatgcatgcactcaatttttccaccagtaaccatcaaagctaaaaaatttgcatgatttcatatttccccttaacaaagccctaatcttctactgcaaaactaatagaaaaccccccaaaaaaagatcaaatttttaacatcacaacagttgccctaatcccattaatattcccttaaaccagaaaaagcataaagttctcattttcccaaaataaaaaagcaatctttatctcatttttctcaacccaattcccagaaaaccaaacacaagaatttcacaatagaaaataacacaaaaaaacagaacgatccaagtaaaaaaatactgaaatagacaaagaaaaagcttgaaggggatcattaccagcaaattccagctgattgttcttcactgtgagaaaccctagagagagagagagagagagagaattaaaagggagggacagaaggagtttgaatgtggtgttttttagagagagaaagaaagagtacttctgggggcatctatagggtgacacgtgtcgtgcacgaggcttctgaacaaaagcaagggtccttcactgtgtccacgtggcatcttgtaattggtttgttttgtagtgaaagatgctcacgtaacctacggtgacctacgagaaaaatgtgacttgactttttatcaaaattatagtcatacccctttgattttacaaattttgcagtcttaggccccatgaaagaaattatttacttattgcccctctctattgtttatacgacggactagtacgttattgtttttagggtttccgtctaatcttgcaatattttaaaatttactattccgcctttagattattatagttgtcgtttttaaataaagttagtttttggaaatatttttctatatttattaatttaactttatttcgttgaatttaatgttggtaagcattgtaggtacggtctgtaatggatatagtacttttttcgtttattttctaacgttttgtaatggatgtagtacctttttttgtttattttcttacgtataacggaattaacttaacttacaactatatgatggtaattgtttgcacacgtggttgcgcttctaaatcaaaaagtaaaaactatttagaaaaatttaattacttaagttgtcgttctaagttagtttttggatgtatgtattctatatttattaattcaactttatttcgatgaatttaatgtgagtaagcattataggtaccgtctgtaatggatatagtttttttttcatttattttctaacggtctataatggatgtaaca

SEQ ID NO: 381918 - DNA, 3144 bp, Cannabis indica
aggatttttctcatgaactttgacatgcactaaattatgcccctgaacttttaagatcgttaaaaatgctctctaaactgttgagattgttagatttaagaacttttgtctaatttcatttaattttactatttcagtgaattgtttatgtactaaaccatgctccttagactttgatatctaccaaatcatgtccctcgaactttgacatatactaaattatggcccttgaacttttatccatgttagtatttttttttactaaaattagaaaaaaaaatccttaaatcaataatctcaatagttcaggggtatttttaacaacattaaaagttcagggggcatgatttggtacatgtcaaagttcaggggacaaaaattctaattacccaataaataataataacctccataattttattcttattgataagttaatttctaatagctcaattgtaattatcattttgtttttcaacggttggtgaagatttgattaataaataactatcatcttttgtaaataatataatataattgaaaagaaaaataatatacatataatatacctaggtattactaaacaaaaatttgtacatgcttaagagctaagtatatgagattttatggaattttagaaggtgtccttaataataatacaacatgcatgtgttcaaatttgattgaacataggaaacaaataagtaaattaaatttatttaaaaattaattaattaattaatagatttgaggctataattgaaaaaataggcaaggccggcgcacaataagaaaaaggaccacatttatcttatacctaactatagtatcattttttcctcaatagaaactttatattattattattatcatttttcaatgtgacattattatatggttaagtgtttgaaaatttaatcaagaatatgattggaataatcaaaatggattgaaagaaaaagtatcaaaatcaatcaattcactattgaaacttaaaattgttttcatttagatactatggatttatatgtcctttaatttatttaggacatatcctcatgaaaatttcacatctaaaaaaaaaaaaagcagtaaccatctaaatatagcataatgaaaaagttgctccaatttttgttttagataatcatgaacaaaattttaatatttttagtaattattatatattatgattaaaaatgacatttaatcacaaaaaaattgtactgtaactaaataaattttttttttaacttttgtaggatcatcataattatttaggttatttgtattgcacaactaaataagactatttttatataaatcatacatatttgtttaaggataattacataaaatactattgtttatttatatttttatagatattttatcgaaacaacaacgaaaaaaaataagaaaactaaataaaaaaaaaggaaaataacatccaaataacatacagataacaaaaaaaaaaaataacaagagtacaacataaaatgaccgtatcacaaaaagtcgtaaaaaaatttaaaatttcgtaaaactgtaattttgtaatttttttttgttgtttttgtatatttgtgaaataatctcttttctctacattcaattattcatagtgttctaaattaatataatacattataacacaaactaagtatcgaacgactattattagcaacattttgaggtataaactttttaaaattgagaacaaaaattagccaaaaaaaaaaagatgtaaacaattaggactactaatgggaaggaaaggtcaactagagatttggatgttgtaactaatgaatagagaatcatacaaaagaaattagagccacaaaggttggtggtattggtgccctaataagagggcctcaccacaacacttaggcctaaggtcttcaaccccatagtcttcccaaatagggcacagatatgactagagctcttggaccaatgcccctttcaaaaattaaaaagaaaaaaaatcacatgtgattcttttaaattatctagaaaaaagaatatatattaggttgaaaatgacaaagagatgggagtttctttcatttggttttgtatgggcctcatcatgtctggcccattgtcactcaagttaggccccaagactttcttagattggggcccggtccaactgttactaattatttttttaaaataatataaaaaccaaaaaacaaaaaatctaaaaaaataaagttcataacaataattattaatattataggaagaaatatatttcttgtaactagattccacatgtcaatttaagtactcactataaacatttattattattattaataatgtagttttgatatatctaaatatgatttgcaatatatgaacaatatttgagataagaattagtggttggaaaattgaataaatatagttattataattagtaataatatagaaaaggacttagctagctaggtaaggtggtaaggcacttgaattcttaactaaacaataaataatattaggttttcaataatattaattagttcaagtcatcttacaatatgccaaacctatatattttaattcaataacattatgtcaccacacacccatataagttaggctaaggcccattactttggctttttgataaaatattttaaaaatatttttttgttaatttgttgtatttatatgattgctttctataggattatatatatgtatgtatatgtatatgtgtgtgcatgtgcatttgtttataaaaatgccaaataaattaaagccacaatggttgcccatacatactattagtgcttaagagagaagcaattatattatggtccacactatttttatatatagttgttttgcctttaaagatgtcaaaaacagctctcaaatattcaaacttttagctaccaattgtattatatatatatttatatatattgcttagtactattcctccactagatacataattattactattgaaaaatatgagtagccgtggtactttgaataagtttttgcaccatgaaaaattctcaatatatattgtcaccatctcataactaattcaataatatttgtgtgtagttaaaaaaaaaagaagaaaaaaacatttaaatagatgggacaaag

SEQ ID NO: 381919 - DNA, 1255 bp, Cannabis indica
gttggtgcttgagtgcacaacacaaaagaataataattcagacaactcaattaaaaaaaatcattgctatttcgaatatctgactactttaaagtctaatggtggcaattcgtattcgcatatcgtattcgtgtcgtgtcaagacaacaactgctgttttttaacaatctttataaaaagggaagctaaagggtgtaaaaatactggcctgttgaaaattgacatgtagaggcgattattttataaaagccatagctataacatttagaaaaattctttaccttcagtttttaatcaaaaataataaactgtaaaaatacgccctatgacatcagttatttgaaaataaccgacgtcagaggtgttatttatatttcacatgtgtaacctatgtcgtcgggtatttttaaataaccaatgggataggataatgtaataacccttcagcattcgtcttctctcattcttcatcatcttcttctccacaaaaccaaaccagcaccaaccagagacaacacaaataaaaccctcgctaactaccacaaaaaaccaccaacatcttcaccacttttacactattggagcccatttttttaatcttctattttccacacataaaccttgtcgacctcaaaaagtggccaaccgatagcggggtcgtattagtctgatatttgccacatgttacgcaataagaacaataaagtaaataatacaaggatttttatagtggtttggccccgttagttagaaggttatgacatactcctcttttatttgtattgatacgtagctagagataatactatttagatcactataggtgggctctgatatagctctctttaaggtaacaaagcataaattagtgggcagatctctaatgagagagagatatggccttagaggggtgtgacaaaaaggaagggagaacccacttgggtgtgtacaagagagacaggaagacagactagggtttcaaacttagaagcttttatgagacttagactgacttaggtttctagggttaagttaaggccatttatataggacaacctaaatcctcattagcagagaaaatcatagatatttacatattaaattgattaaatacaaaagactacattaccccttaataatagatatttttccatccagtttgttggattattaacggctcaatttgcagttagcttgcactccacgtatcaggccgtacagagaatcctaccaggtcatgttggaaattatttta

SEQ ID NO: 381920 - DNA, 1145 bp, Cannabis indica
aaatatataaaataaaaaggggtcaccaagctatgtatgatcggatgagtcaaagagaagttacttttttttttgacatgagagaagttactagtttagctagggagaaaagaaaaatatatataaacaaaaatgctgtgctcttagctagtctagaatgtgctccttaataagccactagatatatatatatgactaaagctcagtgacacctgtacctatttatttaaataaataaataaatagtttttcttatattataaataaataaaatgcctcattgtagggtcccatatttagcaacaaatttcaggctcaataattactatatccaagtccaattggaactagattagacccaccattatgttatacttctaatgaagatttgttgtgatgagcattcatagtaatcattttagcatcttcaaaattttattaagttttattatcccctaccttttatctaaagctaacgtccacaattccaatggctaatatatatatatataaaaattggtgaatttaactcactttcttcttgccacatcagctatctacttatcttagttggcaaaaactcctagttaaaataattaaagctgaaaccagttaaaacaagcttcaccatccaatataaaaggcagccactcatcatatgattgtccaaggcttttttagttcaattgtacattgatttttcatccagtagtcttagaaagttttaatatttttgagagagtttggagggatgttaaagttatcctcatattaaatgtatttaatagaggaggctcaagtaatgattaatttgtaattgttcttgcattgttttcctctacaaaatgtacagataaattcaatctatactccatataatacaatgatcgtgaataaataaagtggctgtaagtttttgctattcttcatgtgttcatttaaatttagttttagttcttgttcttacttcattttttatttatttgtatccttgcatttgctgtttttttttttagatcaatcttgccactgttgttgatcaactattgtgaattaagtgtttcaccacaaatagtattagagtaatgtttcaagatctgcattcaaatctccaagattgatcttcaaacatcaagaaactattg

SEQ ID NO: 381921 - DNA, 5976 bp, Cannabis indica
tttattggaacaatcgttagagagatgcatcaagtcacacaagcaaaagagcaagtacacaaagaggataagaatttatttatagcgcgtgtgtattcaattacaatttctaatattattttagcatacacatacataatattaaaaaacatttttatttaatttaattttaaaattcactaataacaccgtatgtcgatacttgatagtgtcgcttagcatttttctaattaaaaatatgtaaataaattaacatatgatgacatgagagaattaatgttcaaaaaacgtaagtgttgagaagagagaactgataatatatgaatgagagtagctattgagttatgtacatatgtttttaaacttagggttttattattatattaaaaaaaattagggttattattatacgcgattaagaaagtatttttttttccttttattctttttcttttttagggttattaaatcctaaaaaaataatctaatatttaatttcttttttaaaaaaatagtgaaaataagtttaggatttttgttatacggttatgaaaagatatatttttaactttattaactttagggttggtcaagttcatatatatagatatagtttagttgaccttgggatatagaacatgtcagcttctttcaagtgggctatatattcaatcgtatattcataattgtgtacagagaacgagaatctatataagcgccacataactcttccttctactgctctccacaaagtatcgtatatatattttgtactgttcaagttcttcgctcgtcatctcttttactactggaataaatatcttaataatattgtatgttttttcctttttctgaataaattttacgttttaattatatgcacatatatgtgttatgcgtgtgttagtgagtactgagttggttaacatttatggcctatattttaggatctaataacaatcttaattgtatgttttaattacttacacatacatatatatgtatatatatatgcaggtgcattcaaaatgagtggaagagttggtgatgaaattcagatgaatgaaacagcaggtggtgagttatcgattgggccattaccatacatccacaagcttgggaaacctcctaagcaaaatctcctcaaagaaatcatcactgctgccaaagagaccttcttttcggatgatcctttgcgctctttcaaagacaaacccaagtcaaaaaagtttgtgctcggtgtccaagctgtttttcctattattggttgggctaggaactatagtctctccaagtttaaaggagatctcattgctggactcaccattgctagtctttgtattcctcaggtttgattaattaatattttaaatactccatttgtttccaatttgagacttattagtgtcctctccatttttattaatgtatatatatatgaaaatcttgtgtattaggatattggctacgcaaagcttgcttatctgcctcctcaaaatggattatgtgagttttatttttttctcatgactagtaagaagagcttttgcttattggtttcccatataatcagctatgtgtatgtacatatgaatatgcagatagtagctttgttccacctcttgtctatgcttttatggggagctctagagacatagccatagggccagtggctgtggtgtctctgttgcttggtgatcttctgcaggctgagattgatccgaatgatctcattccctatcgacgtctcgctttcacagcaacattcttcgccggactcactcaattggcacttaggttttttcaggtcaatatacatacatatagtttctaaaatattcatcattaattaataaacaaagtattcttttttcacttttgtctatctaattaattcaaattgatggatcctactatttcagattggggttcttgattgagtttctatcccatgctgccattgttgggttcatgggaggagctgccattacaattgcccttcagcagctcaaaggtttgcttggcataaaaaagaatttcacaaagaagacagatattgtctctgttttgcgttcagtgtttaactccgctcatcatggggtaaaaataaaaatattatgattctttttttaagctttatactaattgaattaacaatttttaactaatcgatcattgttttacagtggaattggcagactatagtaattggggtgacattcttggcttttcttctggtcgccaaacacattgtaaggacaatccatatagctccttaactttccaatcacatgagatattcaatcttgttattaatcttttttcctatcttgattggattggatggacagggaaaacgaaacagaaagtatttttgggtgccggctatcgctcctatgatctctgttgtggtgtccactttttgtgtctacataactcgtgctgataaagatggtgttcaaatagtaagccacgctcattggtggttattaggatataattaattctcataatttaatcatgcaaatgatcatgtttgcattcgttctattgccaatgtgtttagtatcttaataataatttaatatgcatttatgaatatgatgtgtttgcgctattcaggtgaaccatattgaaaagggtataaatccagtctcagccaatgacttattcctctccggagaatatgttggcaaagcctttaggataggcgttgttgctggcatcatagcgctaaccagtaagtaaaatcaatgataaaattaaggaatgaaattttttgttaattttaacccaaatgattattcaggcaattttgttttctgaatatatcaggaagcaatagcaattggaagaacatttgcaaccatgaaggactatcaaattgacggtaacaaagaaatggtggcattaggaacaatgaacattattggctctttgacatcttgttatgtagctacaggtaatcatttcgtgtaattaacagaactctctataatgtttgaaaatttcccacatgcataaaataatgagaacctctaaaaagtatttcagtagaaagcttttcaattaattatttttttgttatacttgtagtgctaaatactaattagacttaaaaacaccctaatctacccaaaaatcctttagtggtgttcctcattaattaattaattaatacagataatattattcattattatactggcagggtcgttctctcggtcggctgtgaactacatgtcagggtgccacacggctgtgtcgaacatcgtaatggctggtgttgtgttcctaacgttagagctgatcacgccgctattcaagtatacacccaacgccatcctcgcttccatcattattgccgccgtggtcaatttgctcgactatgaggctgtgatcctcatatggaagatcgacaaattcgactttgtcgcttgcatgggagctttctttggtgttgttttcatgtctgttgagattggtttactaattgcggtaatcaacacccatattttttatatacatatccatataattgtttttataagtaatctttatattaattgtctacttttttagaaaaattaagatattatataatgtagttaaaatttagaaaatttaaattcaatcaactgcacacacgcacaaatattggaacaaacacacactagctagtaacaaattgtttaaattagttatcataatcataatttagtggttacgttcgaatcttctacccaggtatttaaaaaaaattgaaatttatggaagttcattcaaaactataacttgtaaaaaccatttatataatgactgaataacactgcctaataatatttaatattgactgtttgtttattatggccatgaatataggtttctctatctcttgctaaaattcttttgcaagtgacgaggccacgaactgctgtactaggaaaactaccgaggactagtgtgtacaggaacacccttcaatacccagaggcaaggaagattcctggagttttgattgtcagagttgactctgctatatacttctccaattctaactatattaaagagaggtacgaattagacccagaaaaacacaaccaatgatatgactaacactattatgagatcaactttcttaataagtgttaattaaaaatgagcatacttgtgaaacatggtaatcatgttgaggatatgcaatcatatatatatatagccagatgcatagtttgatatattgctagaatttgagataaggtgtgttatctcaaaattaattagctatgagagaattaatccatgaattttacatattttattatttttccacataataataatgactctcttggtttcattttggatcaatttttttaaaattttttgtaactctttttaatttattattcctgaattacaagtaattctttttgtaactctacttttcctttgatcagttttttattttttattttttgagatccttagtatttttatttttgttctattagaatttgagataatgtgcatataaatttatatattctattaatttttcaatggggaacactcgtgtgtgtttatatatatacttattattattttaattttaatttgtgtcagaattttgaggtggttagctgaggaagaagagctagtgaaagaaaataatttgccaagaattcagcacttgattgtggagatgtcgcgtaagcaattccattaattaggctattattagctataggattaattatctttcttagttaccaaattataaaatctactgaatttaacatatttatctttttcatcacaactttactgcagctgtaactgacattgacaccagtggcatccatgctttggaagaattatacaaaaaccttcagaagaaagaggttcaggtaataataatatctcattttggtcctacaaaatcacaaaagttgactttccttttcattaaattaaagagtacttcttttatataaatatactggcataactttttctattttaattataaatatatactatagtcaaatctccctcccccatatcaaaaagaaaacaaaaaaaattataataacttttttctttttagatgtttaattataatattttttaacaataaacagtattattcgtgtttatttctattatatagtaattattatatatcgtaaaaagagcagtatttttattagtgtcgttttatatcataattatgaatttgtggtcattgctatcgataatattctagttgctgttctcaaagagccaaaacgttatttttgttcatgttatataattaaaaataaaaacttgtaaaaaattgcttggctaaagtaatcgggtttttcgctcttaatactttatatatggggtggaaaatgtgggttttttaaggaagacattttattacctgcagtgagttgatatgcatttatttttgaaatatttttccacaaatgaatatattttttctacgtactttatattttgtaatgaagttataaaatattctcatatatagtgtgtttctctcttgttttttattttatctatgagattatcttaagtgtggttgtttaaagaatttattaaaatatgctaaaaaaacataaataagttcttcttattaaaaataatatttgaaagtaaactagtttgtggacattatcctaatctatatatcttgagaaatggtaaagagcactagtggtgcctagcacccttctatgtgtcaatatcgctattggtacaactaattatcgagtcacatatactttaatataatagtttttagagagtattgttaaccaatcgcaacgcgacatgtcacaaaggtgctaatagcaataacaatactcatatatctttataaatattaaaaggatttggttaataatgttataatattatttactattttgttgggcagcttgctctagcaaatccgggtacgat

SEQ ID NO: 381922 - DNA, 3971 bp, Cannabis indica
tttttttttctttcttcataatataggaagattcaaatttgggactccttttttttatccgagagacatactttggtaagaatttgttttctttgaaaaaatgggattataattcattaatcaaaattaaatatatatatataattatagagaattacccatacaacgtttgagttactcaagtagttaattcgttgatttttatgtgagttaatacgtgaattttagttacaattgaagttacttcattaattgttatgtgatagttgttatgtggatttctcatttctgtaaaacatataaaagaattgctaaaaaaaaaatctctataatatattcatgaattcaatatttaattaatgaagtaactgttggaaataataaaactaaactttacacctaaaattaattcaaaaattcagtaaccatatatataaatatacatattatatatgaagtttaatgattaataatactcgcccgtgatgcctaagtaatcaccatttcctatatattgaaaaaaaattaaaattgatcgatcttgatcaaaattaattagcaatatatatttttgaatattcaaagcataatatgatggtctgtaagtgacacacaacagaatatacacataatatatctagttaattttaatgttagtggatatgatgtatatatacatatatatacaccatatattaattcatatataagtaggtgatatcataataaggggaaatagttgattttataatttatatgtatggtgggaggcagcatatgcaaatatattcgattatgtcaaatattgcacaagtgagtgtctcattgttattacactcatacataatattcattatgtctcaaaattattatatatcataattattgaatccatccaattaattaagagagctgttgcaatgcatcatgatttttcatagcatctttatttccctctcttttacatatgatttattccttacgagggataggatttacaccttatttatttatttatttattatatgatttacattttattaaaataaagagaaattatctcatatactatttttttaaaaaaatttacagtctgagattctaaagtaatttctcctgtgatttctatgtgggttgctaaacggattttagttgtaattatttaagttgctccattagttgcaataagaatttctatatagaatttccgtaaaaaataactaaaaaaaaaaaaaaaaaaaaacggttttaaaagtgtaaaaataaaaaatacattaaaataaatgtatttgaatatcaaataataaatactactataatattcaaaagtacttattactatttttttttaaggttttcatcttgttctctcggctagggccaacacacgactttttttttttttctagacaagaggatgattccatttatggtatgcgtggctttgttgatgtttgagtcttatttggttctagtgcgtgggggcgctattacaaaaacttttattcccgtcagttttggatcgatatttttggaatcagcttcaggtttcaaaactgacgtataagcaataaacacaaaaagtggagttgttgcgtcgattagtgaacgacacatttgatgggtaccgttgatttaaaactgacactaataccaaagcatatcgacataaatatttagttgcgtcgatttttgcacaaacacaaccaaaaaaaatatacccaagataccaccactttttgatttgtaatacaatgtccaataatctcaaatatgagattcaaatcataaaaatattaatactatacaaacccaaaaaatataataaatataataaaatacaaatggatatgagaatcaccgctatcactgccctcttttgtccatcgccactgtcccctactacctgaagaaaaaattgagaaagagagtgaaaccaaatttagtgcaaacgagagcgtgaaaaaatgagagagaaaaatagatgaagagagtgacaccgaaagaaaaagagagaaatagagaaagatagagagaaacaaaattagtgcaaacgagagcgtgaaaaagtgagagagaaaaatagatgaagagagtgagagcgaaagaaaaagagagatatagctatagctatatatatatatagagtgagcaagagatagagttatagctatgagttgtgtaaaaaagagaattaccattattttaaattggaaggccaacaccgtcacccatacatatggttggttttgagtgaagtttgcaacattaagagtacagtgcgtagtggcaccgaaattaggataccatgcttcatcagtaacactagaagcaataactgagtgttcacattagcagcacctacatcaaaaaaagtcatattgagccgttgataacatagggaagtaagatgaccaactcgagaacacagctgacacacaagtcgtgttcctagagggacagtagggggagtagaagaggaaccacgacctagagcagaagatgaattgattggagaggaacctggttgagcatatcttggtgaaatggcataaggatttgagacaactcgtgcctgaccattgaaggtgggattaggcgaagacaacaatcttgattcagcattattagatgtgttggaagtattttgtgatttgaatcaaaaaccacatttagtagcaagatgaccagaatcaagatccttgttatgattctccattcgatgctcttgagaaaataaaagtgtttcaatttcaacaacagagtagtcatcatatcttgaattgacatatataaaaaatgtatcatacatcgatggtaagcctttaaaaatgattgcaatgtgttcttttactgaaactttgtggccaagtagacgatccacaagagtttttatacgaagtaagtatacatttatggatagagaacctttcttgaaatttagcaattgagtggtgtaaagatcaattttaacaaaagtttgagtaacaaaatatacctctagcattttctagattagagcagaagtttcagtgccaacaatcctggtgagaatcatatctgacatggaagaaagaaaccagcaatagagaagctaatcctgaacttcccactcagtgaatcgaggattgatttgaccaaaatcttcatcttcttgagtgagaaatttacgtgatggatgaaacgaatctgagatgtaatcttgaagtcgatgtcctcaaattgcaaaaataacttgagggtgccagaggagaaagttattgtcgttcagtttgacatagactttgtgaggaaagaccatgggattgaaggtttgagctggagcagccatggaatccagagagagaaagagagaaaagaacggagaagaagaaagcataagcagagagagaaaaaagttactctgatactttgttaagagtgaagagagaaatgagaaaagtatgatttcattacgttaggaaaggaacaacaactcgatatatatacagagtacaatacagttagaattagcaaaagctattgatataaatcgtcacctatactatacccgacggttttaaactgtcgggtataagggtctattaaaaaattgtcacctacttctcgccacatttcccacgttcccacttactttttttctatataccacatgcccacctattttttctctatttttcacatcctaaaacgaaaatcttaactctcgaaaaccccatccatgcctcccaccatcgccgtcctctctcgccgtcttcctccctctctcgatctccacccacccctcctctcgtcggtctccctctcctctctctcgcttatgtcggacccaccaccacctctcgtcggtgtctctctcatctccgtctcatacgttggaccaccaccacctcccgtccgtctccctctctctctttctctctatccgagctcggtagaaatacatttatttatttattatatatacattt

SEQ ID NO: 381923 - DNA, 2528 bp, Cannabis indica
gttgtaggtgaggttgattttatgttagtaattaaaagcttcaagcattgtaggtgtctatcacctttttcagtattacatataattaagtattaagtcttatataacttaagaaaatatttttttaaaaatattactaactaatcataaaatgccacttataaaaatattaaacactactaatacctattaataatactcatttttaagtggctataagcgtgttgggatgagttgggaatggaccatagttagaaaagacacatttgattccattttctatgtcctcactcctcaacaaaatttaatctctttattaattattattattattattattatcattatttctatgccacgtcatccattacatgattattattattatcatcatctctttctctcatgaatgaaaggtcaattcattacactattatttttaatgattaaaatttaaaattattcatcaaaggcttggtcatgcatgcattatataattcaatatcattcacatttagtaggtgtgtatgtgacatgaggaatggaattagatagtgtgagtgatattttggacaaaataataataatattataaataagataaaagagaaaaaaaaaattacatgtggaaattaaataaaaaagtatatttatttgttggggacataatagtaaaaatttgttaaaaaaaggagtaaagtgtaaaagaagaacatataattaaaaaagaagttagtggtgggacctatgctcattagtctaatcctcttaaatttataatgaaaattaattaaagaaagactatattatagtagtgatttttttaattaatattactactaaatataaaagttaatttgactttttgttttaaatttttttctttctataacatctaacatttagttcatccaagaaacttataatacatcaaaataatcaatattgaaccaattttctctctaaaaaataaaaaatgaaaataataaaaattgcaagttgtgggtttaattaaagcatacttggtggatttgttgttaaagggtccaatgatattgacataaaacatttattggtattcaataatgaaattgatataaatgtatcaatgtatatggttaaaaccaagaatcatttttgaacttttccttactttgctttcttaaaagagccaaatgaccttttagtcttttcatatgatgaagcataatatatttatgtatacaaacaaataataggctctatttatattatgtgactacacaaactctatgtaacaaaaaatattgattaattggaacatttttgtttgattgtcattgataggtttcatctatcataaattcattcggatttgaaatctaagcactttttacatctttgattgattgtcattgacaaatttaatttgttagaaatttattggatagaaaatctagtacttttcacattcttttaatatttcaccgctagtagttaatcctttaattgaaagtaatattaaggtttgctttcttttatttttgtttgattcttctcaatgagtgatatcttcttatatggattatatttaatttattaaaaaaatttaactaagtaatctatacaaaaattgtttgtaagctagctaagctaatgcttgatttgagctaaatcacaattaagagtggaatatggacaagaatctagtattagtatactacaaaaatagcaacttttatttttaggaaaagaaaatatataaaaataaaaatacaatatttatagtttgtgacaaatttaagtaaaggatcacatcacatgggtttgataatattataagttacattaatatatataacattgtaagttcttcgaacttcacatataataaaaattgtttatttataaatactaagcaattattgaaacaaaggaaaattgaattgattttattcgagattaattatttttgaaatattattattggacattagtggtacttaacattttttataagtgggtcttacgattagttaacaatattttttaaagctatttttttaagttataaaagactcaatatttaattacaacaataatagtatgataccgagaagaataattttttttagcaattttatacaactaaattttaaaataattagattattaattatgggaagaaaacaaagcaaattatacatttgattctattgacaagcacaaacgcgttttgatgaattaaaccaaagacattaaaaaaaaacatttatttttttacattattttatatgttatgtaatttaaaaatatttttgtctttacaaataaatcccaaacttctccactcttcctataaaacagaagaaataatagtgtgtcactttacatttcaatatgtgaaaaaattgtaacttaattttagtatcatacttgtcggtgagaaaaattataatatcaaagatagaatttaaaataattaatcaaacgcatataaaaaaaatatttaaattatatttttagtattataaattattttatttttt

SEQ ID NO: 381924 - DNA, 1942 bp, Cannabis indica
tttaacactgtctcatctgagtcacatgtgagataaatgtattaattatataattaactaatgataaatactaagtgattagcactacttaaattaatatcatattattattagtgtaataaaatattagaaaaattattagatctaactcaacttaataaaatggactagcgtaaactatgtcaaacaataattgtgaacaaattgatcatattagggcacccaacatttcaaaattgatcccactccgataccatattaagaaagttattggacctaacttaatttaacaaaatcgatttgttgtcctcgctttattaagtgaatcgagtatatatttttaccgaactctaatattaaatatacataatttaatgtaatgaattttatagaatatgactaaatcttcttaaatattaataactaataaacatgagaaaaaatcattataattatgcaaatgaaaaattattagtacgtaccttgtcatcatcagagtaaaaagtatcatcattgatcccttttgatttatctagcttagtcttgagcctaagcataacaattggatccaaaaacacttcatgggaatgatcataacttttggtatgaaaacaatcagggcaaacattgaagatgtaattgcaatcattcttgaaaaagcattctacacaagtaaaatacaatccaacaatgaacttattattgcaatctaaaccattgcaaaatggtctaccgctttcgattatgtaaagtagagttatcacgtcagcataaaccaaatgatctttttttcctcgctttagttggtcgaagaaattcttcgatccaaattgggggaatccaatatctttcatgtaagcggaaaactcccgaaatttgatcttgtttggtagggattttgtttccatttgttcagagaaagtttgaattgatttctgagtttcatggttgaaatgctcgtagtatgcgtatgccgtgtcccgcaagtcatccataattgagactcttttctatcctaaaatatataaaaaaaaaaaagtaacacaaagagaaataattatataattattaattaataatgaacaaaaatagtataatattataagtaccttttcaaacaatagtactagtagtattgaagaagagcagcacaatgttaaacacagagatctcacacaaatggatcatggaactatttatagagagatttattacttattacttttaaggctaaactctaaattatttaagtaacaaattattacttaaagttatttgctgtaatttaataaaaagtagtgggagaattaacccaacacaaacagttattcttcagtttttggtcttttcttatatattaatggtagatcactagatctatatagatatatattatacataaataatttatgtatatgacaacgtacgtatatcgagacacatgatatatattcataataataattatataaaaaaagtcaattatgatcatatactaaaatgaagtgagaatattatatactaaaatgaagtttcatgactatgtataattagatttccatagatccatttccatccatgatgatctatattttgatcatatatagatctaatatcttgttctttttaattacgtatttttgcttttcattaaatttaggttgagtttggagtgtgtgtataagtagtgtaattagtaggggaagatagtaattacataattatactatattttaaaataaaaagtatgtttagacattataagatagtatttacttataagttctaaaaaatttatttagtaaaatagttagtaattatatttaaaaattataatttttaatatattttatgtttaaaattgaaattttttagtaattacactaatataagtaatctctcaattacttgtaaatactacataattataatgtaatatatt

SEQ ID NO: 381925 - DNA, 2744 bp, Cannabis indica
atatatataaaaaaaaaacaaataacaattcaaaaggcctactacaagtcaagattgggtgccaccaaatggattcaggaaccccgtaccaaacaaccgttccaccgtctcctagtataagtcgtaaataaccctcatgccttgtataaggcgagtctgctgagcgtagttggcctccaatagctagttctccttctttaggccttcaacctaaagcttggtttcattgagctcggctagaagggttttgttagcattgcccacgtcacggttatctgccctgacttgttccagttctgtcaccaacatgccgaccttctgggaaatcctctctgccagcaaggccacctgttggaatgggccaagatgaaagagtccaagtattaaaacagagggaagaacataacaaaaagaaagaaaataggaagtgaatgtctcgaggccttaccccgactgcctactatttggttgaatgggtcagagcgaggacatccaagctgctggaggaagcccaggtctccacgggtagttttaaggcgttccacaccatttgattcaaaagctcggtggcgaagggggcagcctttcttcccaccttgaaagctagaagcatttcaaaggcttcaatctccacagttggctcagcagggggcaggccatgcatgccatctgaaatctcggccttacggaccgctgagggcacggtggccctcctccaaacttacagcttcttcgcctccaagtgccccttcagggccttgttcactctcctctccttctgcatgtcgagagggttaaaaggaatggccttccttgggaaagtgaaccccactgaaggtatttttagcatggctgaggagttgtataactgaggttggcctagcctcagcggtggatcgtgatgctgggggtgggcctccgtttcaaaggtggctgccttaagcctttgcctttttttgtcagaagcactaccacatacctctttggaagaaccagtcctctccattactgacctgatgtatctgccagacattaaaacaaaagtaaggaaaattcatgcaacataaagccgcaagactctcatccgtctcatgatggagactgcaggcacgatatcaatatccccagggcatgtaattgcagacaatacgcacaattccctcagaactcaacaataagttaacgatgaaggaaacttaccggttgataagaggaaatgaggccgatgattttaatgttgcgtccttgccgacgagatatatgtctgagtatggagaggtgaagacggtcttgcaaggcagaggaaagagcgaaactaaaggactttggtacgacgggtagcgaaatatgtaaagtgcaaaatgactgttgaaagtatttaatgggtacaaggaagaggtgcctcccaggagaagcaaacggtacaactcgtttacccaaaaaattttgccggttggataagtgggaagctgagaaggtgtatcgcctcccaacggttggctcacatcattgcatgcattgtgaaaagcactcagcaaatggaaagtctgctcaaatccaatcaccgcagtctttgggcatcccacagaacacgcacacaaaactcaaaagtcagcatttaaagccttgataagaaaatagaagtaattataccttttgaatattgacgctttagttggcggctgatgacgtaatgtaataaagaggttgtcataaatcccacatgctcgaaatctctcagaataagttactgcaagctcctagaccatggtacgcccataaagctcgagggtaaatgttatccgcattttcataagcacaacatgtggattttaatcaaggaaggataaagagtcattagctgaccagtttcctcaattgacgctccgggaagataaaagcatcaacttcgtgggaaaagttttcgcgaagtggagtaccctgactactagtggcatggagggtgtccgtgagctgaagtctccctctattccagcaaccaaagccatatgttcccaagaagagtatggacttccccaaaggggccaaggtattttgagactcactacgacgggctacgccttagtctgtgtaagccttacttatacgtgtcagactatggacctggcgatcaagctttttcaggtacgatgtcagaggttgtctcctatgacaagttatcgtacagagcatgcatgtccttgtgtacctgactaaatgatccaacaggtagggataagggaaattcaaaaagaagaggccctaagatgacacgtgtatgaggcccagcctatacgatctgacgccttaaatgccatatgagaaaagtgtcacctaccaatccaacggttggattttgccccaatgatgattcatctaatgtatcacatgcgaagaagttggcatataaatacccctgaaaaagcacatgagaggaggacattttttcagaggaccttttttcagagggaagactcattcttcaccatcctaagaaaacacgcttttgtaaccctgttatcaactctagaatattcttactaagctttctcttcttcaagaggaacaccgtgggaaggagttatagtccattgtatatctatttgtataaacaattaccggccgatgagcttaataaaatggactcgtggactaaggatagttaatgcctgaaccatgtaaaaatatcttatttattatcttgctatttattctatctttactttcctaagctctaaaatatt

SEQ ID NO: 381926 - DNA, 2536 bp, Cannabis indica
ttccattagagaagcctcttcctgcccctgcaattgttcaaagtacacttttctttttatatttatattttcagaaaatctcttacttcatctatatatgttcatttgtttgtttaaattttgtgctgaatttccatgctacttttttcttcttccaataatatataactctatgctgtttattttactgttgttgttttgcaaaaggtggaagaatctttttaagaagttttctttataattgtttgaattttattttggtgaaaagctagagagaaaattaaaactgtgttgaagtaaatttcaaaataaattactttgtattattattgtttgctctatctaaaattatagagtaaattatgataaggtgaatcagcttacaattaaaaactataagaattttatttatttttgggtgaggacaagaaaagttgttaattctaaggaaaaagaaaaagggttctcatctcttaccataaattttatcaaaattcacacactgaataaggcttctttgtaattatttgaccagaactaaagtgactttatcaaagataaagatgggcatcactagttttagtaatttggttgtacattgtactcaattatgtcattaacttattttcttttagcttattttctttcttttagttgtttttcaataattattattattataatgttgttttttttttttttggcttgaacttgtaatgttgttatttttttattattatttttttgaaaagtataatgttgttaattagaagggtctttttttctttatttttctggaaatattgcttagaagtttattatgcttgaaagatagagcttttcttgtttaaaacatgcctcatgagataaaaaaaaaatcattgtcaataatatcagagccattaaagttaattctagtgtatacaataaagcttgttcttaaaaattggatgagtgatttgcttttcattgacacttatttttcctttatccagaagttgttgatccttttgttgagaaaaactcagaggttgcagttgacaggggtatgtatatctttgatctttgcttttcttgcattcattcattcatttcaacttttgttgttgttttgtatataaaaaaacatataattttatatattttcatggtcatatggaaaattggtcttttctgcatgtagatgcagtgcttgcacgagtagaagcagagaaaagattggccttaattaaagcatgggaagagagtgagaagacaaaggcagataacaagtaagtattatgctaattcaattatgtgagtttcatactctttatttttgtaatcaattgataattttacttgatggattgttgttaattttacattaagtacctaacttttttgtttattattttttgtttattattttaatcttaatcctattataatttgttttcattatagggcatacaaaaagttgtctgctgttgaatcatgggaaaacagcaagagagctgctgtggaggccgagctcaaacaaattgaggtaaaaataatatttgttaatccaactacactgtgtactttgattagcatgatgattctttttgttcatttaaatagaagtttttacatacacaaattataataagaaatatatttctgatcccatgtaatctaactttagccatggattaaacaacagtctataattgaacaaacaacaaactatttttatctcacgctgatgtgggagtacaaaactttagacatatttttgtcttaattcaataataatgtataacaggaaaagttggaaaagaagagagcagaatacacagagaaaatgaagaacaaagtggtggaattacacaagatagcagaagaaaaaagggcaatggttgaagccaatagacaagaagaatttctcaaggttgaagagactgcagcaaagttcagagcttctggttattcacctaagaaattctttgcatgcttctctgcctaatctaataataaaaatcattcctaaacaaagtttagttttggtgtgtgtgatcacttaaataacttttattttcttttgattgtttgtttgtttgatttggatacgtaaaccatgtttctcatatcattttgtgtatatgttcttggatattggttttcacttataaaatgcatgttatgttatgtggcatcatgagtatccaactacacacccctttctagttttcataataaacatcatttcagttttaatttctcattcgagtttttactaaactcattcaacttagaaaatgacatatctttaatcattcctttcgtttatattttttttttttacatttttactgttccactaaaaataaacaatttatgagtaagagtctcactaccaagagatccaaattagaattttgatctcatcccactttccaatcctcccgtgactaggggtgcaaatgagctgggttggctgggttagaagtgttttaataggccaatccaatgattgtagtttggataagctataaaacaattaaattttttt

SEQ ID NO: 381927 - DNA, 1588 bp, Cannabis indica
gggtacaatttttgaaagggatgtatatcgctgatttttaacctttattgttggagaaagacattactaattattctttttaatcaatgcatagaaaatatgttttagtttaatcaaaacatgcaaaaagtgaaaaaacaagaaaaagaaaaagaaaagaaaaatgtgttcatgtctttagttttgagtatatatcatatcctatagaatcaataccatatccctactaaacaagaaagcaatttttttttcttcttaaacttctgaaattcaattggaatcctttaaattccaacaaatgaccaattgatgataacaaagttatattatcaaatctccatacctaaagagatattcccatcagagatattaagatcttcccaaatactataccataccaatacattttgaccattcattcttcttactattttggacataagtcaaaattcatattgtcattaaaggtagcagtcaaaatattaaatattcaatcccacacatatattttactaaaaaagaattagattttacataagaaatatgaaaataataataataataatagtaataataataataataataataataataataataataataatcagaatctggaaaagtaggaaacccatgtcatatctcataatttcacttacctttttcaccttgcaaagatagggatgccatcttgagaaaattaaaaataaaaatggacaaaataaaatgggccatgctcatgtttggttgtctcatacttcctttcttatctaattaaatgaaatgccttttatgtctactgtaatatagtcaattggatttggctctatgattcaattttctactaattattaatgttttcattttgttttggctcaatagatactattttgtcctatttaattcagttgggtgatgtgaccaatgtaatatttttcattgagagtactcagatatcttatcttaatggaaaagcaagatattaatactccacttataatctatttgaaaaaattattcatataaatcccaagttgtagaatctaggtcaaaattattcataaagcaagatacttgaaactgtctttcaacaaacccattgaactgagtaaacagtaagagtgcttcaaattaatttgactttcataggaaaaatcctaaaacttggtaaagtcatcaacaaaattacaaaacttaggtaataactatagtaccgtttggtaacacttttgttttttaattttttaatcacaaaataaaagtaaaatttttgaaaaacaaaaatgcgttctgtaactacttttgtttttcaattttaaaaacagaaaacaaaagtgtgttctgtaaagtttattttaattttaattttttgattttatttaagtctggtctaggtctggggtctgattcaggttcaagtcaaaagccgagtttagcgccaaggccgtagggaggtgatttgggtccgggtcttgtcgtaatctaaaagattgattcagaaaaaaaaaattgttttaaaaaaatattgacagtgattttttttgtttttaaaattttgatttctaattataaaattgaaaagtaa

SEQ ID NO: 381928 - DNA, 1831 bp, Cannabis indica
atatataaagatacatatataatgtgtaccatatgtgttcctgtttggctgagaatcccagctcccccagatgcataattagccccactcaatagattgaagctattattatcaagactagcaaaggctggaattaacttctcaaaacccaaaaactcacctaaaataaattaacacataattataaacaaattatgattttttttatttttattttttttaaaataaaataaatatataaaaaataattgaagagaaatatataagagtaccaataatatcaacagtggttcttccattggtgaatcttcctgttggttgagaatcaatgaaatcaatcccataaggcttataattggctttagccaaagtgttgagattattgttattcccattatcagccaaagaatctccaaatatgaaaaagcaagaaactttagggtttgcattaacataactaataatcgttattatcacgatcataaacgctaacaatctcccactttttgtatgatcaaataatgttgactccattgtagatagcttgcatagaagaaaattttaacaacactttataataaatatgtattaatgacattgagagagtttgttgtatagttgtgtggaagagtaggtgagaagaagaaaaatatacatgtggttttattgttggcttggaaatttaataggtgagtgagtagctcatatgtttgttgtagtggttttattatttgcggcgaaattttgttatgttttgattttttacatttaatttttttattttattttttggttaaatttttttttatgtttgtttattattattttttttttgtaaattatatttgaggtgtcagttggatattactgttaaatattaattggattattgatgtattggcttcaaaattttactttcatgtatacataggtgtatatagtgttatctatttggtatttaacggcaatatttaactaacgttttaaatttgcaaagaaaagtaaacttaaagaggttttgtcacaaaaaaataagaggattaagtatataaaaattaaaacataaggaggattcgccgcaaattattcaaaaatttattattgtatcatgattaatcctcactcacataattgttatgaaatgaatactattttggactttgttttagcaaaaaaatttgattgcatttaaataataaattgtcttatatttttcatagtatactctaaaaaaaaaattattgtcaaaatataatttaataagtcgaggtattatgacaagatttggtatattttctgtatgattttttcgtgcgagaaattattttcaagttaattatattaaaaaaaaattatcaaaaaaactaagcctaaggtattattttataagtaattctattatatagaaaaacaaaaattcatttataacgttgggaaaacttctaaccaaccaaattttaaattgcaaaaagtacaattattagatacgagtttggaatttttcatttttgagatcaatatcacattgattaataaaaactttatttataatatatatacataaaatgaaaattattagcttatattaatttggcttctagtatgggtaatattctattcaatagcatatgtcccacaagagatattttcattcaaaaggccaatcatgtgaatttttttttaagaaatactattttatattttatattttacgattgaattctctattctgttaaattataaattagaccatgtattttcactataaaaaaggaagttaaagtgtgtgaaaatatccgtattgatatttagaggcagttttttggtaaaa

SEQ ID NO: 381929 - DNA, 1554 bp, Cannabis indica
gttgagtgtctatctaaactctcgaatctactgcagaattttcagtaattttctctaaagaagaagaagaagaaggaattccccccaaaactaagaacaaacccagtgttaattttaattggcttctaaattctaatcaatcgaaaatgactcgtgtttggctttgcaaatcacaaaacgacatgccgtttctgaaaatataattttcattttatttttgcagtattgtttcactttgttgagtgtaatatctaacaaaaggttagtattgtttttttttttttttttgttaaagggaaattaattaaccaaacaattacaatggaagagacaagtcaattagaagtcatcttaactaaatcaggaggctagttttttttttttttttgaagtgaaagaagcgcagaccaacaatacaaggactctcacagagaggaagggaagtcctgaacagctaaaggagtacttgtgacactgggggagcaccccggtccaacaagcagacgctttagactacaaccaatttcaacaaattgtactattaacgtctctacagcccctagaattagaattaataagttgaatagcagctagacaatcagacgcaatagagacatcctccaacttgaaatattgtttgaataagttaaaattttggctgagatggcacacgtcggttcagacttctaacaggttgatgaaattgattagtcgaagtaaattgactccctttcgcaaggtagttttaactaccattagaaaatagattattgtaagagatatcgattagttttgggctttgaaacatgtatagtttgttttgtggccaattagggttttttcagtggttgctttgcaatttgtagatttatagggtttttgcccttatttgcacaatttgtttatcaatgaaattcttactcataaaaaaatgtgtaaatcctttggagccagtaactaaggaattaatatttaaaattttatttcgagtaatagtatatatgtataaatattacactaaaatacatcattcactagagtagtatttttttttaaaaaaaaaaacaaatcattgtattttttaattatatgtgattggatcaaagtttaagactcggtaaatgaatgtataatattacaataatagtaataattatataaaaaatgttattaattattttttaaaaaaataattacaatagctagcaattaattgtatatacaatcaatatagaaatgtaaggtatcatcataatatcatatcatatatgagtgtagatcgagtacatcccaatcagattggcacccactctaatctacactttaattaatcatcatcccatgcagttacgtacgtacaattacaaaccctaacttctttgctactcttcctcaacaacaatccttccaatcaccacagtgatatcatcaaatttgcctcctctacaaggtttaccggcctctgtagatgctattgagaaatgagtttttcgaaagtgaaaattacatgaaatatgggatttcataacaaagttagaaaaatatggcattttt

SEQ ID NO: 381930 - DNA, 2153 bp, Cannabis indica
ccgtctgagttcggtttactggtaaatgattgcaaaattgctttatcttctttgagtcatgctgttattcagtttttgaacgatctgtgaacaaagccgcccattatttggcgtgtagctcttatttttctccaaatcgtacttttcaggattatcagttaagtcctgaattgcgtaatattttactggttgattttgctggttaatgaaatttttaacttttattcaaaaaaaaaaatatgtatacatcaattccttatcatgataaattattatgtattcttaaatcaacatgccttaaataataaatacattttttttaataagggcagatattattttagaccctatattttgtaaaagttattaactggaccttctgttttattaaaaaataaaatagagcctgtatttttcaaaattgtacaaataggaccctgaactgatttttaatcaaaataaaacttaataataatctgatctagagatgttatgacaaacctagttacattttttgtatctgttcgtattagaaattgtcttaacattaattatattaaaaaataaaattgttgaaaattgagctcagtgtcttatttttacggttttgaaaaatataaggtccattttatcatttaacaaaatacagaatccaattgataatttttataaaatacaggatccaaaatagtatttaccctcttaataatgtgtttgaaaaaatgtttccctatgttgtgcatttaacatactccctatccctacattacagatccaattataagtagtcagtattattttaacaggatcaaaaagacttaattaataaaaatatacattataattaattttagtcaaatattaatgaaataattgaaatttcatttttatgattaccaaataaaaataacaaacaatttaattaatgtgataaaattatttgaacaaaatcaaaatttgctctatcaaaaactgaacttgatacaatagaataaaagtccagaaatcaaaatgatgcgtgatattttatatgtggtatcaaaaaattttatagattgctattagttcacggagtcatgtccagagataaaatttattagtcaaaattcaacaattacaaagtaattgacttaaataaaacttaaactctctctcatgattttgccacaagcttgatgtactcttatttgttgaataaatctccttaggacaccatggtttgaactcccttcaaattacttggtgaatgattgcttcctctcgatgcaagacttgtagtatcttctctcccgaagatagcggtgttagcttcctcctgatgcaagacttggatgaaccttctcgcgaaggttattcttcccttcaaaatttacttcatgtaaaagtaatcgcaaagacacgcaaattcaccaaggaatatgagaacaactatcttttacaaaagaaatactctcttctaaaaatataagaaaataagaagtgaaagagttcaatcttttattgctagtgtaggtgatatttataagaataaatgacacccaaaactgaactcaaacagcctgagtataaagagaaaatattaattagctttcttgcaaaaactcattaaatgacgaaattctgactgaatagatatggaaagtatgcagacgaaatcctaatctatctaataagcattgtgaatctagactccctcaaagtcaagtttatcctcacaaacttttattggacatcatgaatcttagttgcagagattaaagtaaatcatatcagaaaaagaataaaatatatcaaaaacaaagaaataccatatatcgatatagtatttatttcacaataaatcattttattattttcatataaaattacaacctgagtaaggatatacatactcaattaatacaccttaagtcgtactttacaagcaaggaaataatgaagcaataaatgaaaaatattcctaaaaagaaaagttggatttttttcaatgtcaatccgtttaaacagttttagtgcacggttctttagcgaaaaaagaattagatcaattaaaataaaatgaatattaatactttccttaaacatacaaattcaagataaaatattctaaataaaaaaactactgttataaatattaataattatgtggatgt

SEQ ID NO: 381931 - DNA, 2044 bp, Cannabis indica
ataaaattagttcacacaatcaacagaaggagaaaaattaattacattaatccatagaaattatcatacaatctccattaaaaaaacttaaatatgagtctagctcataataatcattataaaatattgcataaaactaattgagaacatagaataaaagaaagaagaaaagaactttgtgaaaatcaatggtagtagtctccaaggctgctttttctctcaaaatttgtgcctcctcaaaagtcaccgtcttccctttttcgaattaagtttacttagcctaatttagaaatattttcacatgcgggtcgtagcataggcttcaccatgtcgtggctcgtgtcttcttggaattacttcctggtgaaaaatagaggtggcgggccgcgacatgggcttcatcatgccatggcccgtgtgtcacaattctgggcagcaaccttgtaatgccacgacatggttaaactcatgccatggccggtgtgtagcacccattactccaactttttgctattatcttccaaaggggcgccttggcattgaatttctatgccatgtcgctactccaacttctttaattctttaagtttaaaggcttaagttgcaccaaaacttcacaaatctactaaggatttccactttctgcatgcaaccaacaaaaacatgtttatttctttgatttgcaaccattttttcctcaactcattcaagttgttccttattcactaaacataaaaagtttaacaaaataaagcattaaataaaactaaatgcaacaaaactaatcaaaaacactttgtcaacaatatatgcctcaaaatcaaaagaattttaaccagttttaacgttaggcttaggtaaaggtcgataaaaatatcatttaggctcaactataccataaatttttttattccaatcaagtcactccattgaactcaaatatcaccccattccccttttcttttacaaataaataagagaatttttatgaataacgctacaacaacaaaatttttgtatttattatttgaaaaactaaaatttagaaactttgcctttttcacttcttccaccccacccccttttttgtgtgtagttgcaactcaataaatttttctttaatatctctcatagatttttctctttatttcccacatatcacaacctaaatttctcaattacaatttctcccaaatttattctaagcttacatcatagctaaggataattgaagataataataggattgtttctagctcaaaatatttgtaaaaacaagaataacaagtcaatgcgcaataaatggaaactaggaataattatgaaaaggtgagcttgaaagacacaaacattttaaatattgcttaaataatttttcaaagcacatgtcatcaagaattttgcctcaaagatcaaataatataagttctatccaattaaacttatcatacctctaaccctagtcaagcatgtagaacaaattccaattattcacatgtacatgtcatatcatgctctgtttgagtgcaaaagagcaaaaaaggcttggcgatcttctagaattcatataactcacctcattggcaataatgattcttgtaagtcctttttattctacatatcagatattttaacaaagaaagaattagagaaagttgcttgtatcatatgaagtatttagactgaacgaaacaatgaatatcatggtaagcaaccaaagccaactgatgtgttgtttcaatatgctctgaattatgttattaaatatcataatgcacattacaaaatcgatattggaggccaaaaaaacattgtagataactctactccatgttctactacactacaatggttgaatctaccttctggccgactgaagcttcacactgatgcatcagtgaatacaatggaatgtaaatctggttttggagctattcttcgcaatttaaatagtgaacttgttgggttttgtaccctaaataaaactcatttcaatataatcagattaactaattaataaagatcagaaatcgcttttatgttg

SEQ ID NO: 381932 - DNA, 1410 bp, Cannabis indica
taaagttcacattgtaatgtataatgttcaatctgtatggttctgtgttgagctacactctgtatttttactgtaaatgggaggcttaatatgagtgttatagtgagaaggatcagttcagttgggataatgaactaaatggactgatatttagttagagactgacagaccgttgcttcctgtttcctgttagagtgttgcacatgcactcaagttgccgtaacaatgggaatcttagggttataaaaagatatttcctaatctgagagacagtcaagaaacaaatcatgtactttgttgttataaagtgagaaaagggtgtagtgaaaacaaagttctcttctaaattttgattgtggtcacttgttcaattgttttgtactttgtaattggtatattttgagatataattaagagagttttgagactaattacttattattcattatgggtagcataccttgaatcgaaatctccaaaatattacttcactggaaagagggtaattttttgcttagtagggtatagcctgacaatgtaaccatgtgaaagtaaaaaaactatgtgacatattaagctatctacaaaaatatgtaactccattcttttcctttgataaagaaatttaccagattcttcttctaaagaccttatttggtagtgcaggttatgtttatctgcaaccactgcccatttgttaaactcctgaagaaagattttgtgaagctttcaaatttttacatgaaggtgagacaatttctgcatttggccttgcttctttgaaaacctatatgagttgatgaatgaacacaactattatcacaaaatgtgattatgtttactgcagaaaggacttgcggttgttgcgatatcttcaaactctgcctctacacatccacaggttgtagtaactccataatttgggattagagctggcttgaagctattgtctgactgtccaacatggaatgttactaacaggatggacctgaattcatggctgaagaagctaaaatttttcagtatccttttccatatttgtatgatgaggtattctactactaatgtataagtacatacatttccatgcttttatactgtatttctttcatctgtttctctctctttctacagtcttttgggattcttcatgttgaatagtatgggtgatgatcttgtatttcaactctcactaatctagttgtttcttgattgcaactgtattataccgatttgtttttcttgatggtatcaatgtatcaaattaaaaaaattattaaactaaagatgataagataccatctcatgttacagccacagatgccaacttctaatactctcagaaaaggaaaataatactttgaaatatttagtgttaaagaataatcatcccaaaggccacccaaaatt

SEQ ID NO: 381933 - DNA, 2173 bp, Cannabis indica
ccatgtcatgatcacagaggataaatatccttctcagtgcactaatgcatcgaggctgcaaagtttgtttttcttgatcgaacaagggggttgttggatgaagcactgctctttgagcataatagaaaacttcagggacctaaaattaagcaagtataattcttaaagccatcagccacctgactttataactaggaaattgagagtaagcactaaacaatgttaagaacttgtaaactatctcattgaaaccctttgatatttacatcagcatcataaagtcatttataaatagttatagtttataaacatataaaagacaagggattcgagtattattgaggtaccctttactctaccaagttttgtttcccttggtcaaaattaaactcttgctccactgtaaaagaaaaagtaaatggaataaaacaattctccatcttattttgtatttcttcatcaaaaaagagactgtgagaccacgtaatgcactgttgtgactaaacaaagttcacattccgatttcttaatggctaaaggttacacttacataaattaccaagaaaagggtaaaaaccacactcactataccaaataaaaatcacaatgaaacaggttcgtgcattctacaatacatttttggagccagctcaacacactaatcaaatgtgcatcatttattggcacccatatttaagagagaaagtgagagagatccagccacacacacacacacacatagtatataaaaaaataaaggttcggtttcttcatttcatttatacctgaatcaaagtagctgcagagcattctatgcaggtttcaatttccctgaattcttgcatgattggtgacatgagctgctctatgcttattggttcgcgctcatctcgcaaatccagcttgcaacctactacaataactggtaccttaacctaaccattttgtaagattagataaataaataactagtttatcttctaatagagtttttttggaaaaaccagctcattataaaagaataagagttacagacctccaattggcgaagttcaggaagccagtaattacaaagccgagtgagagtcattggttgatcacaagcatatgttaacaccacagcatcagctcgcttcaattcctcattgcgcttagttctactctccaaactagtattacattaagtacagagtaatattaaaacaaaatgatttgaaatttctaacgtcggttttgaaaattcaggcaaaatcatagtattgtacatgaataaccgaagctacttatggtaaatttcgaatcaagctggatcgcatatcaaaaaggaagacgaagttcgaacaagataacttcagggttcagccatgaatttacagacattattgagtgaaatcaatacaatggaaaataatagagattatattcctgaaataatctaaaaatagatagattattcctggagtaatatatattaatatatatatatgtgtgtgtgtgtgtgtgtgtgtgcatctatattatgtatacggacctggaagaggtatcgatgatggtgaggggaacaaaatcgggaaagaaatcggctggaaggcgtgttggggaaagtacagaaggcacgttatcggagaatgattcggtagcggccgcgacgatcaagctcgatttaccggttccgcgatcaccggcaacgacgactcggatgccgtttcgtcgactggagctaaaattcccggtgaaaccacccgacattggattgaagaacaggtaatttggtcggaccaacgtgcctggtgaaactttgggtaagattttttaaaaataaataaataaacactattacaagaattgtcaaaagaaaattgatacaatatggttacccgctcaactattttttttctcaaagttagcccactcaactaatttacagtttttattaaattatatactatttttttttaactttttttcaaatttacgatttgagtttctaaagtggttgcagcgctagttacaataagggtttctatacgattttttgtaataatttaagttgcagccgctagttgcaatagatatttctaggtagaatttcataaaaatataaaaaaccaaaaactattttgagacataaaaaaaaaaaacttaaaaaccttttttttaaacgttttaaagt

SEQ ID NO: 381934 - DNA, 1528 bp, Cannabis indica
aaaaaaatatattttatatcgataaataataaattgtaaataaagttaagttttagtcacaaataaattttgttgtgagtaacatttatgttgcgactcaaaattgtcaacaaatgatagtattttggtagtgaacaaaatccaaaacgaggttaaaaaggtgctatatttaagatagacaaagttttagaaatacattattttgaaaaattattattttatatgacttgtatatttttgaaaacaatgatcaaattcactatcctattattgggcctaatatttgggctaattgttcatgaaaatgaaggcccaaactcaaagcccttgatgagatcacacccctcaatttcataataagccaaaaaaatatctttagatataataaagcatattattctaagacaagtatatactaaaatatatacataaatgatacaaccaccatcataaacgtttgaaatgcttctaatataagtttatcttttcaacaaacaaacattattataatgcaataattaattattgatatatattaattatattaatattataaacataaaagttttaaccttttagggcattacttgcaaataattccattctcctttgaagaagaatatttttgggtattgcattaagcaaatgtcataatccactaaaacactaattaatatattaaagttggaataatcaatttaagtttgtatccatagcttttttaagttgaaaaagcttgattctataagcatatactatactagacctttttattttcatttataaataaataacatattgttttcttgataccctttttacttttaccgttatttttactttttgttattaaaaaaacataaacatatataaaaaagatatgtttatattctataaagtagtatactatagataggtatagatgaacaaaatatcatctactaatgaacaaacatataacataaaataataaacaacacaaaaaaatcaaaagaagaaaagaacaaagaggtgtagaataatattacgtagtcaataataagtactacctatgctatataacattctcttgcatatgattttgatactttttgtttcgtatatattaattaattaaccaaaacaattaaaagacaaaaagtgtatacatatataatcaatataattagaagtaaaatgaatgtaattttaattgtgaaaaaccatatcatgtctttttatatacgtgttaatgcatagtgtattcataatgttattctctttaaaatgggttatatatttttgagcattcctattagggggaactctatgtggaggcatcttactttggtatttattggactttataaatgattttgaaaaacttacactccatattcattttttattttttattttttattttttcttttctattattattaattaatttatactcaattttatatatcatatttccattatatctactagagactaattttgataaatgatgtgaagttatatttaatattttaattataaaaaa

SEQ ID NO: 381935 - DNA, 1515 bp, Cannabis indica
ttttgtaatggtgatttcaagtccatgtattacatgttgcaagacttgaagctcttttctcaatcttctggtctctttccaaatgaggagaaaactgcagtgtactgtggaggtatggctaaacaagatgtgcagagggtcgtgacagtttcaagatttcaacaaagtacattaccttttgggtaccttggtgtaccaattttctcttctaaaattttagctaaacaatgtgagattctaattgataaaatgataggaagaataagacaatatatagagcacaaggaatttctccttttccgagagaatcacattgattaattcaattcttatttcaacacacatttattggagtcaaatgtttaggattcctaagaaaattttaaagcctataaatgcatattgtcgttcttttctatggcaaggacaagcattcagttcaaatgctgaaagtataacttggaaattagtttgcaaaaaaaaaaaggtgggtgatcttggtctgaggaatattgtagcttggaatacacctatcatagaaaaatatgtttgggccattgactctaaaagagatgatctttgggtcaaatgagtccatagtgtgtacataagaatgagaattgatgggcctactctgcacctatgcagagtagttggtactggaggaaagtagtggttctgaaggatgtatttcgtgatttaatagaacaacatcatcattcgatagagcactacaatatttatgatagatgatattgtttgatttacgcagaaaatgaaagagttagataaagcaatgaggtatggaatagatttaatagtccgaaacatgttgttatttcttggttagttggttggctgttcgatggattgattaaattcaatattgtgcatgaattgacatgttaattatgtggcatctgaaaacataaaccagctcttttttaatttttcactgtgagtatgaatggtttaagggctgctaaggagtgggtagaatggcacactcgttctagcactcttgctgcactttataggtagataactcatccaaaatgagtaaatttagaaggagttatttcccaattattgtgcacttaagcactaacaagaatgcaagaacaatataaaatagagactagacacataaaccagcaaatcagtaaaccaaaaattaaaatgggcagttgctacactactacaaaacaagcctttagaggcacttttttcagcataataataaataaccgacgccatagggttagaaatttttggaaggaacttttacgctacttatggcgtcggttatttagaaataactgacgccataggggtttataaccctagcccagccattcatcttcctcattcgaccagcccacccagaaacccccaaaccagagaaaccccaaaccctctctgccaaccaccacggaaaatcacccccatttcacaattttttcaccattttaggtcatttttgtttctaaatcttctatttttcatacttaaaac

SEQ ID NO: 381936 - DNA, 2408 bp, Cannabis indica
aactgacatgaccaccattagtcatatcaacctcaactgtcctcctctcttcttcttccttcttcactcatcgccctcttctacttctaacttcttcttcttttttttacattagggcaaaacttcattttctattttcgtttcagattatccaaaactcccattttctattttcttcacttcgtttcatataagatggtcccactgcctctgttgtttttacacaatcgatgaggataataccacttatgttcttagatagaaagtcacggtaccttgtcgtagtgggagggtttcaaggaactcaccctgttatgacttggaagacacttgtgattaaaatctattgttactttaaacaagtaatggatagtcaaataaagaactaagaagcaaagccaagagaactatggttaaaatcattcatattcttatttgtccaagtaaagtaagctcccgcactcttaacctcctcaacttgacccaacaaaagtcattgttgagcatcttcaatatccttagctaagattggcttacccccattcttatcttggaacccaaacatggcattaaaatctcctagaataagccaaggagaattgacatggcctaatctagcaagatcctcaaacatctcttttctttctgcaagattgttgctgccataaactggagtacagaaaaaatctcctgagttccctaccactttgaccctgctgtgcacaaactgattagtctcatacaacacatcaacatgaacaaacttagcttgccaaaaaaggatgattcaattagtgatagtgatgctagaatagaaatcccaattaggaaagctactagccatcatctcactaactttctcattttttattttggtttcaaggaaggctccaaggccaaccttattcaatctacaaacttctaaagcagaattctgcttctcttttttatttaaacccctcacattccaccctaaaatgttacacacttccatcaaatcacatattattgttagtaaccaatcctccctcatcagattccaaaagaatctcataaccattcctagtaacaacttttgaaccagcattaaccaccacttttgaacctttcttcctgggagtgatccagttagtatcctcaggtttattctcttgctcctttcccttcaaatcctgagttggagcaacttctttttcctcacatttatcccctggaaccgaaccaatatcctgctgtttcgaattctctgttggaccctgctctttattgtgctatttttccagttcttccttcttctttttttctgctccttcttcctccacacatgactcttttctttattgcaattagctaccgtatggccaagtgaatcacatgccttgcatttagaaggaagccattcatacttaacttgctgttcagccaactgttttctctcattaatataagcaatcgtctttggcgaattttcagaaatctccatgtccaccaagactcttgcatacttcaccattgtcctattcgcagtgactttatccaccatgattggtttaccaattgtgctaacaagagcactaagattgttttccccccaatactgtaaacccaatccattcaatctcacccaaactggaacagactttaccattctagcagagtccatatctgtagtccagggcctaaggatcacgggcttcttatcaaaatatataacacctgtttcaagaatgagatctctagtttcttcatccctaaaactaaccagtgtaaattccgagtgcatccttacaattttttccactcctaggtttccccatactcgtttgataaacccttcaaagactctaaatggtggattagcacccaaaacaatacaaacaacagaatttttctagaactcaacttcacattcaatttcatcaacatccaactttacaaccgattggtctccaaccttaattggttcagtaaattcaagtttggtcgaggttgtacgtacttgatttgtcttaaatttactccagactttctttgccgacgtctgaaaatccatttgctccaattgcttaacctcctttgcccatgatttagggtttgttctgatcgagctctgcgtgttctccttccagaatctcacacgaatcatggaatatctcagttccagttgggtcttcttcttccttttggattgaagggagatcagtatcagaagttccttcatcgattacaaccttggctggcttcgaagcaatctgtttcttcttcgccatgagagaaaactgagagcatcacacgcccttaacgctatattcgttcacataaaaaatttagaccatttctcaatttgtgcgtgtcatccttgaaattattttaacattattagagtaaatttctacatacatataagt

SEQ ID NO: 381937 - DNA, 2659 bp, Cannabis indica
gaatccaatcacattatcaaaactcaaaactgaaaagaaatccaaacaaacaaacaaacaaaccttatattaaaaaactctcctttaacacacaacacaaaacccaaaacaccaacaaccaaaaatgggaaatttgtaaccacattcaacgtgcttggtactcctgaaacaaaacccatataccaaaaatcaactcttttaatcaaaaatcaaaaagaaaaaggtaaagtttttcgaaaaagggtttaccaagaaaatttctcatgtcagcaaaaagatggtgttttggagagtgagaaatcttgggagtaacccacatgaagattagccataagagtgaagttcctgcccagatacgagctttactccatagctgattatgattctgatgatggtgattcataagccataccatctctgtctctctctctgtgtctctgtgtctgtaaagtttgaatcctttttcttcttttttgtaaagaaatgattttttttaaaagaagtaaagaaatgatttgagacggttcttttatggtatttgaggttgttacacgtagcggagggagtactgaatgggacagtcgaggttgtcgtatcatgatttggtgatacgaaggccaaaaaataaaaacatcaattgaaacaaaaagaaaaaatcattcatttattagtagatggaataaagacaaaattaaatattttgtaaagttatttgtgatataaatagttaattaagtttaatttttaattataaataaataatttaatttaattttttgcggtagtaatatttaaattataattttaaaacttctataaatagtgttaagtgttaagtaaattatcacgtgtaatttttaattggtcaaagtcattaaatttttattatttttttatttttttaaaatataacaataagaaaataacgcgtagataatgatttaacatttaatattcaagtacatacgaagttctagagatataacttaagtaatattattgtcaaaaattaaaatgaaatatttatttacaagcgttaaacttaattatttataccgcaaattaatttattttgtattaaaacaatatttgaggtaactttgtttgccacgtggtttgggttttttcttaaatgttcaaattaaaggcactaaatctttgtagttgttgaatttgagatgagtattgatattttcaagaattcttggcttctagaaaaaaaataacttatttgtggttttgaaatatcttagtttggataaggtaaaggtttctaattttatgaaggttggagagttgttgggatgaaggaattcttaaagatatttttgtggagagggatgtaaagtttattttaagcattcattagttccccatcaatgtataacgatatatatggcagaattgtgagagttctcgtgcttattcgatcaatagtgtgtatcgatttcttcaagagcttaagggtgatttaattagagttggtaactcggtcttttaaaaagagttgtgagatatgagaatgccttttaaagtcaaagatttagtttagaaagatgcttccaattgtcttcctcttctacttagcttattatgggtatggttaggtggtgtgtgactcttctagttagcttattatggctaagacagcaagttgaatgggggtggttgattgtgatcttgctaaagctatcggagttgaggaggtgttgagttttttgaaagaaacagggcggcatgatgtggtggtagagtcgaacagtttggtcacaatccaagctatctgaagttcgttagatatatagcttctatttttgggttctgcattttttagtgcaaaagaattctttctactttgaataatatatttttgaattttatcaagggatctgctaatcgtgttgctcaccatttagctagagtttcgtggttaaatgttggttgtacctatttgatttctctgattctgagtagtttacctaatgtacttttcctgagtagtttggctaagtgggcatttacccacaagaggttcggttgtatcccgacttcctctatcccggaacacttattttgtaatgaccgtgaggtctaatttattttgattataatatatgtacgcttttcttcaaaaaaaaaaaaaaaaaaaagagtagtttgtgtaaggcgtgtgccgcaacgcattggaggtaaatacactagttggtagagagtgggcagattaaagatcgtttgagccatgagatgaggcaatgtggtcctgtgtttaagaggaagataaactagtattagagtttgattcgtaatcatgtccacagtaaaatacgatgtggaaaaattactggtacaaactctttaattggacaaaattaacgttatgttaatgctacattaacaaattatttaaatacatgagtagaatataactgtagggtatttccagcaattttttataaatcatgaggaatttttgctaacataaaaaaatttagaaagcaaaattgtataagatcatagtttgaaatgataaatcctatttattctatattttaatactacaaattacaattatataaaattacactcattacatttttattttattcctcatcatgaaacccactttcagaaaagaaaaaaaaaaagttacatttatgaa

SEQ ID NO: 381938 - DNA, 2925 bp, Cannabis indica
gctaattcagagagtttggtaactgtaatttcttcttgttgccaattgggagcaacacatcttggtcgatcacttcattgctattcaataaaaagttccatagacaaaactatctcagtttctaattcactcatagacatgtatggtaagaatagtcatttgacaatagcatggagaatatttttccgggcacagagagatattgtcacttggaacacaatgatctcatcctatattcacaatgcaaattttgctgaggcaatagctctatttgatgaaatgctttcagaaaacttaaatccaaactcagcaacattggtaatggtgctttctgcttgttctcatcttgcttctcttgagaaaggagaaaaggttcacctttacattatggaaagaggacttgagatcaatgtatctcttgcaactgcattggttgatatgtatgcaaaatgtgggaagcttgagcaatcaagagagttgtttgactcaatgagagagaaggatgttgtttcctggaatgttatgatctcaagttatgggatgcatggacatgccaaatctgcaatagacatattccgagatatggaacattctcatgtacaaccgaaccaactgacattccttgctcttctctcagcttgtaatcattcaggtcttgtggaagaagggaaatatctctttaacagaatgcaaaaaacttatggtctgaaacctgatttaaagcactatgcttgtatggttgatcttctcggtcggtctggaaatttgcaagatgctgaaactttggttctctccatgcccatctctcctgatggtggagtgtggggatctttgttaagtgcctgcataaaacatcatgaatatgatatgggagtaagagttgccaagcatgctattgagtctgacccggacaatgatggttattatataatgcttacaaacatgtatagttctagtggaaggtgggatgaagctgaaaatgtaaggagaatgatgaaggaaaggggtgtggataaaggagctgggtggagtgtaatataaataatgtaaagagattcttgttcattcttgtttatgcattctcaacctgggttaaaggagtcatgggatttacctttcattgagtgatgaaagggtgaaaacattcatctgaataggtgttggcacatctggcgaaatggggctagaactgcttctaatctgaaaagataatcgggtaatatcacaatcacaattaacttgttcaatcttttccccttgtagaaattaggtattttaaataattatttgattgtaactcatgtaaatacttttcaaatgaaaaaaaaaacagattgaaaaatgaatctgtaactgtgatggtacaatttctttttgcaggttcttaaacctattgtggaacgcttttacttaatcttgtggagacctggttgttgatttgaataaatttaatcaatcatattcactttggatatcattgtgaaagaaaaatccacccttaagtgtggtttgggattttcacttgtgaatatttatgcagtctggaattattttagttatagtaaaacaatggcattaaacatgcatatgctgttatctttgcagggacttaaagtagccatggtaagtcctggcctgggtttgtttatgagccatatgttcctcgtgaagcggtctcttttgggcagatagttatctttcaagtgagttagagtagttttggccctttgggggataatgttttcttattgattttcatttcagtaaattggatttataacaaaggtaatggaggcaaaactgcttagtttcattgatgtgattgtactgtcaagattccattgaattcatttaagtttaaagagtatccccaaatgtcattgttaagactgcctttagtccattttggttttcttcctttaatgcagtcctcttatcagatcttttgatgtttgctactctcatatggtttacaagacccggttggagatgaacgaaagatgatatgattttcgaggtaatgttatcttaaagcattgtagagaatgttttgaatggtttttggcgttgcgtatattcagctttccttcttcacttcatcttgtagattttttcctggattattgttatcattatattttctttgcattgtgatgttttgtgttagcaaatgtgtagtcttattataaagtgcaataaaaatttccttttctaatcaaaaagtttatctcataattcttaacataattgaaataactcccttacttttaacttgcatgcactaatatttggaccacaacatgttgatgaggaatttcatgttaattttagctcgctgattgttagcctctaattattgttgatagtgtaatacaagattattattacctttctagttattctttttctagttttgtttagtctttacctaatgattttatgttgatttatctacattttctccagatcaatactctaatatcaaatggagacgaaagctcacttcgaaaagcagttacagagacatacttctcccctttttacagacacgaaagaatgaaattaaacaaagagaatccatgcgtagcgaggtgtgatctaacttattgtcaaaattcgaacccttctagctcgaatggcaagtttttcttttgcatttaaagaatatgtacaatgttattttttttaggggtcccttctttttattggtggccaaatattagaaaaggatttgtaaatgtgagagtgtttggagaagaggcttcttaattttgtgtttacaatgtaaattaagagtggtgagtagaaaacattggattggaggtgtttcaatgagttttaataaattaaattctttgttgcttttatgattttattgaaaattagtgaagtgggggagagaatatacatttagtttctcattat

SEQ ID NO: 381939 - DNA, 1974 bp, Cannabis indica
gagagagagagagagatggagggcaggtaagaaagaaagataagcaagtgggattgttggacctcaaagaaatgacccacttgagcttgaaaaaaggcttaattagaagaaattttcacggtcccagaaaaaggttgaaactttggtgggaaacaaaccaattggctctccctctctttctttctctctcctcttcacactaatcactgacttgggttttgtttgtttactttggtttttgcagacccccaaaaagaaattgggatagtgggagatgatgagcatgagttggaaattctgtgatgaactgttgagaaaaatcaaaaaatggaatattgaaaaagactggatttttatttttcctgtgttgtgttctttggttgtaatctattattgaaggaaggaagagaatgaatgaccaagttggaaaagtaatatactattggattgtatatcaactacaacttttgctatttccagcaaaaatgtgatcttgtcattgtcacttctcataaattttcaacctttattgttctttgttaaaattttgtaactgtaactaaacgacaattcttcttttcaaccatgtttactcttttactctaaacttgtttgcaagttgttaaatttgagtgtgtttaaaagttattaattaggttgaattttctaaaatattataaatagaattttgagttgaattttcgataattttttaatataattcacttgaagactattcttaatgtagtaaacgtaatcagttttctaataacacatctagattgggttattattaagttttattttgacaaaaaatcacttcagaatactattttaaaaaatatattgtctaatttgtcatttttcaaaatagtgagtccaattagtaatttttacaaaatacatagtttaagatagtatttaccataaatatatagaacatgactattgtaggaatcggaacaccacttttgttcctaccggtaaggacatctatatttttgatatttgaagaaattatagtccaatttttttatacgacgatcttcactatagttacagtaagtatatttttattaaattctaaataatttatgatatgaaaaacaaggtttaaatattcagttgtatgcatgttcctattgtaaaatttaccaaattggtaataacattattttacactgatgtacaattaacttggtaatatatataaatgtgcatgtactttttatttgtatgtatttatgtggctacttaataaatattttcttactgaatttagtagctcacttttatcaaatttaccatgtgcaaagttgtaaaagttagaaagtcggtagcgagtgagaccttggaggcttgtatgtgtactcgttgagggtcatatagttgagggtggtctagggcacgctccaattaatttattaagtgttattaaattaatgttgtatttacttatttattaattattatgtatttaaagaaactgagctcaattatgaaatattttatatttatgaacaaaagcaacattatagtttttcgtattctgacacttgtaagtaagttaggatttttatgaaaaaaaacgggcgttacagttggtatcagagccttgaccaaactagaagtgtggtcgacatcgaatcctttagggggtgattgtaatagtcagtagtctcatgatccataaggagaaataccggcttcctcttctcaacttttagcatcttccaagtcttctaaaaatttatggcaatcccgtttgggtcatcttgctcgtgatattgtttctaattttcgtctttatgtaatttttccatttccaaaaataatcgtatctctttttgcttctaatgtcaatatgttaaatctcattgctttagtttttgtcctttgaattaatacatactaatctttggggtgctttgtgacagtcagtagtcccgtgatccgtaaggggaaacaccgggt

SEQ ID NO: 381940 - DNA, 704 bp, Cannabis indica
ggctcggattgctgcaagaagaaatgcgttgacttgtcatctgacagagtcaactgcgggcggtgtgggaagaaatgtaagttctcggagttatgctgcaaagggaggtgtgtgaatccgaggtcggacaagagaaactgtgggagttgtaataacaggtgcaacaaagggagttcctgcgtttatggaatgtgcagctatgcttaattagctaggcaaataacaaatgataattataattactatactaattattaattatatattttgtcatgaaaaagttgcattaatattattgtagtgtgattatataataaaggcgagcactgtcatatgttaaaaattattgcatttgacgactatatatgtatagctcacccatgtctattgtttggttaaattttttattgttgtattaattctttgttatggtttgtgtaatgtgaattatacgatattaattatatatgttgagttcttctttctttcaatatatgtataatgttgatagttgatctattataaataaatttaatataatatgtatacgcctatatacttacgtatatatggttttgatcatgtagtgtatagtgtataaaaaataaatatatatataggagcatacaaattaatacaattttgtgctcataataattaaacacatgcatatatacatggcatattaataattaattaaatac

SEQ ID NO: 381941 - DNA, 2226 bp, Cannabis indica
aaaaaaaaaaaaaaaaagaggggtattttgagaaagaggagaaagattagcataattttgtattggattccaatagtaagttaattttgttgtttggttccatttaaagcaaagaaagtcaaatttccctttgaaaaagagaataaaaacaaaccaaggattcaactctagggtacctctgccatctttgtgatttcatatacttagaagagttgtttttgtaagtaaaggagagtcaattctactattcttttgtagatcgattttccttgtttataatctaaacatgttactaagggaggagtgtgatagagagcctttgggagaagcttgcatcaagagatgcaagcactcatcaagcttttgaagggaattcaaatcttgatgtttcagtaaagattcatttagcaaagcgctagtacatgaagtttgtgacaaaaatattagagtcaaaatttttgttttatgtaaaaaaccttgtacttgtgatatttaactaatggatcttatctctaagtgtgaccccattgtaaaagatattgaaaccacggataaaatcccgtgtcattttatttacagctatcacttgtttttcttgctagtttgataattctggagttgcacactttatttgtaactacaaatatatctttgcattaccaacttgtggcttccgcatttaattaatcttttatttcaaataaatgttggtaattcaagttttattgacgaaaaaagacagccttcaaatagaatgtagggatgtaaagcaacaattgtttgatgttaaatttgtctttaaagaattttatactcaaagggaaaaccaacaacaaagttagatggatggtcaaatttcttatcattttgttggattgctttggtatgagcttcaaagggacttttcagttggagtctaccattctcagaaaatgaacttgagctcgagttctttcatggagtgggtgaatgatgtaggagaggagataatgaattagaatgtcatattatgttattttggtattttattatttgggttatttttgtaattttggtaaatgctacatttatgcctgattagatgtaaagaggacactattgattaatgagtagtaaagttgagagtgttcatccatattggggttttctactttgatgccatggatttggcatgcacattgctctcacttatccaatccacagcatcactttttctctaagttcaataatatttcagagttcttcagatcaaaattctgtcaaaacagcatagattaactatatataatatgtgaatagcaggaagcataccctctcagcagatatctcttttgtcaacagtaaagaacgattttgctctgacatatgaaaaaaagaataatggttaactgtagcacattgacacagaccatccaacatgagtagtgacatgatattcttaccttcgacaaataactcacgggtgcttttgaatgctctgaagagatgaagagacagatttgcaatagcagcactagcagcagggcctgatagttttgtaagagaaatggagatcaccggcattccctttgttttctgagcaactaactttgcacttgcagcacctgaagtgccacaaaattaataaaagtattaatttccttgcagaaattataggttcatcatcttgaaagtgacatgcatctacaataattagcaaacaaataaattagagaagagaggaagataatcccttctctttttttagttaaaaaaaaaaaaaagaagacaaaggtcaaatgtgttttttttcctcccctataatcagtctaacacaattgacaaaggtcaaatgtgttagactgaccttctcccaaatttattagggagctcacttatgacaacttatatgggaggaaaaccgaggtaacaaaatagacattagaatttaaagcacaaatcataacgataatacattcagtacaagcccctagacatttagaactatatcttatgccccaacattgagataatttagatgaagataaccccctcttgccccaagcaaaacaacacaaactcaagcctaaaaatgtagttcatattctcctagcctgttatagtggctaacgaatatgggtcagataccaatttcttctgagcaagtaatctaaattcacagaagctacagatcggtaaatactcaaatctttctcagtaataattagcttgttatttgatcaaaac

SEQ ID NO: 381942 - DNA, 2250 bp, Cannabis indica
attattggattgccaatattcttagtgatgacttgcacactcttatatcactaattgccatatttacagtattgatgtttacagtgtggtctatatcaaagtggaggaagccacagttgaagacaatatatgatctagaaaaaggacggtatatagtgactcgtattggtaggtatcgatagattctttagaaagttatttttactgtccctcatccagatttaggattggtcttattctgatatttcttcaaaaccacggagagcaaactcattttagaatctgggaatatggtgaggatcaattatctcaagtttactaatcatagaccatatatatatatatatatcaaaaaaaaaagaaaatagaaggtcgaattgtatctggacctaggatagaagaatagaacaccatttcttgtttagtggtaaagtaagatctgtctaatgaaacgacttaatttcgcaatgccctatgtgacagggttaggataggcagtttgggggagtggaggttggaatgtataccattttgtatgattacacatgatgaacttgtccttttcttacaatttatgctatttcatgtcactgtcagggtgggttcccatttcattagtaagtttcaagccatttgatttttcttgtgggagagttaaaaaatggtcactattgtctttttatttatcgatcattgattgtacggataaattatgtaaaattttgtgtaaatgtatgcttataattagacagcaggaaggtatctactggaccagagttgaggtcgggttaaaaggtttccttctctttccttttcattcattcatcagtgttacacgcacctcagcgtagtaatatttcttaatgctgctatattgttataggaggtattttggcccttatttttcatttgtgtaatatattttagtgaattatgacatagatatggtaaatcaaataaatattttttgcttcaagtttccttttagattatgtttttttaggaaggatgaagaataaggaggatagagagttgaaggatgtagaataggagggagggagagtaaaatctttttaagttgtttagtgaaagggatggagtgatagaagaatggacaatatttatttatcgaattattatattgtgttcatatgtaattttattttttaataatttattaagaggatatatttgtaattttcaacaattgaagattagagtgatggaagaattctaaattaaaactttggaaggatttgctctctattcaactattctttccctcacaatctttctttcaaacaagggaatttgtcatctcctcccatttttctctatccacacgctcttccatttaccaaacatagtgttggatatcgatgtagagttacctagacatagggaatacaataatgaggagggtttgtctaaagttaagactgacatatacgaggtctgttagttataggaactggaaatggaaatataggcaacatttcagatcagaatagataataaaacaaagatttaatggtgatatagtgtcatcaacctatttctgagaattgtaacggttgtaaaggtagttaattcaacgaaatagtgaatgaataaacaataatattattggatcaccctaaggatagttgtagtaaagctgtgaggaaactgaatgtgcttgaccaataaaggatgaagcactgtacactttaatactttcttggtgaaccgaatatattgtttatatcatttgttatattcgtgacagtcacaagtcacaactttgtaatgttcccaaacctgaaagagttactgtttaccaaagtttcttatttatttattgatcaacaagttttttaatttaattagtacctacctgtgatcagtttccacttcttgctcaatcaaatggctccaagaaataaagcaataatcaaatagtaattaggaattaacaaggtatttttttttcctagttagctatgataagttattgtacaagatgacacatcaatttgtgattttacccaatgtacgtggaccaaccagacaaggacacgtggatcaagcaatttacaatatttgctaagtctttatgacgtaaggcagcgtccaggacgtagctcccggagaaggcatatggaatcccatatgctcccggaagctcgagtaacgccaaggcatctccgcgaggtgtcaggtttctcctgagcaatcaagtcgcattaaatgccgcatgggaggaagcgt

SEQ ID NO: 381943 - DNA, 2362 bp, Cannabis indica
aatgttgatacattataaattgtattggaagattttatagttatctcagtctggcattgtgctgacaacttgtactctgatacagttcgatctctttttctctttttgctctttttcccctttcccaattgttgatattttgtttctcgttattgtgtctgattaaaaacggttgttggtgaatagtgaaattaggaagtaccagaagagcactgagctcttgatccggaaattgccattccagcgccttgttcgggaaattgctcaggacttcaaggtatgcagctttctttgctgagttatttatcagttcagtttgaagttgttattgggtggtgttgtttcaggcttaaactaatattgtatttgttgaacggtgtgttgtagactgatttgaggtttcagagccacgctgttcttgccgtacaggaggctgcagaagcttacttggtgggtttgttcgaggacaccaatctgtgtgccatccatgccaagagagtgacgatcatgcctaaggacattcaattggctcgtcgtatccgcggtgagcgtgcatagaattggtgctagttcctgtaggattttataatagtttttaggggaagtacctacatgtttggggatatctgttactgtacagattttatggaatagttaaatcgttttggtttacgatacatatttggatcattttgattttgattacaggatagttgaatactatattcttttgttgttttggaaccattagtggcccaattatattgtttcaaacagttggatgtcgttttctttgctctttcatgtgcttttcttattgggtttctctttagtaacttcttcggctcaattaatccaattaggtcagcgtttcgtttggttttttaatgttctttccgagtaaattcatatcgattaaactgaggagataatcttgctgagagcacatttggtttggatgtagctttcaaacttaaagactaatacaaattagggtggttcgtaataatattttttctcagttaaaaaatataataaaacaaacaatgactttttttatctacgacaacgaaatgaattaacaaattcaaacaaaatttatatgtttaattttatcttaaattgtatataaaaaaatgatatataataatagagtatatatttaatttattaaattttaaaatatatttttattatatttattaaattttatcagctgcacagtagaatcaaatttctattatttaacataattttttgtggtagttcaatgatatatactgttcttgactacaaagttgaggattttcttgtaagttattgtagtcagtggctcaatatttgtctactttgtgaagtagtcaactgcaattataacatttcattttgtatactttttttttttcttaggaagttgaccaatggggtcgattccttaaacaataaagggctaaggagattgcatcagtatgagcttgttttgtgaagttcttgagatctttgaaaatctttggcacttggcacaattgctagagtagtctccatgacttctccttgagaaaaagaatacactacaaccaaagaatcctgaggatggatagtttttttagaagattgagccttaataacatcctcatggcccttgactgaaggtgctggctttttggatccagcattagaaggttgcacgacattctccttaactctgccagccttggcaatctctctagtaccatctaatttcttggcaatagtgcccaagaagtcatctaataaacccatctagagtgtgtgaattctctacaaaatacaacccaaatgttaaaggtacagaagaataaaatgaaaaataatgcacaagtactatttatcttagtatactgggggttccccctaataaattaaaaaaaaatcttccctttctaaaaagcttccatattggaagaaacttggatacttcatttcactaaagatttccaaattaacattatgtgttggcagaatgaagtgatttgggatcctaactatttcatccactctatatatatacctaatacctgggtacttatggcgatctaaatgtaaaacataacggtcaaatttgccttggttatacaaaaaaattcgtaaaccgctcaaaccaaataatccactcaaaccaaactgaaaaaaccgataaaaattgcaaatcgaaataattcgaaaaaattacaaaccgcctaatctgttaattgggcgggttgaacataggtccaacctgcccaattaaattgaataacccgaccaacccgactttagatttttttttactttttagtttttatttatatataaaatatataataatataaagttatatact

SEQ ID NO: 381944 - DNA, 1262 bp, Cannabis indica
tttgtttttttttcactttatttaatatatttattttttgatataaaatttatatttctttctatgaaaatatattttttttattagtgcctatttatatattaaattttttttgcctccttaatatttggagctcactccgccactatatatataatttaattgattacgtaattaactattgactaaataaatccaaccaatatataatattatatatatgtcaatttgcaaaagctcatattaataaaatgcattgcttgttttgttttgacttgaacgtcatgtttataatgttgaaatgtggatgtggagaatatgcataaagagctgaatatacattattggtccaaacaccactttgcaagattctaatacgattactgaatctttgttttttttgtttttaataaaagtgggttatatccaggtaatacctaagaacagataatgctgcactatctgtaaattaaattaattaaatcaaatgaaacaaattaatgaggttatattaatcatatatatttatatatgtaaagacaaccagcattggcttccaaaatgtggctagctagagacggcagggaggtgatctatctcatttcctttgtaaatctgagctctctctctttatttaaatgtatatattgatttaaatatttattagctggagtgaaatgaagtacaggaaaaaaaaattacatgatagtctcttagaatttagagataaaatgaataagattttatcttaaaattaattgataatggaagaaataattcattcatcttatatatcacaatttattttcatacattaatacataattaatcaaaaaaaaaaatatagttagttaaggaggtttagtataaatgataaattaatagtaatggatatataaaaaaatatagttgaaatatcgtttaaatcaataatcctttgaattaattaaattttcagggataatgcttatagtactggtgctgtcatgtgttgtactcaatccgattgttttagttaaatatttgcaatatatataaataatcgcagaaagtcagcgcatttacaaaatatatacgtataacacatatatgtattatcaaaactatttgtacggaaacatagagacccacaacgtcaccaatcattaattaaaataatcagatacatatccttcggcaaacaataggggataagtctgagtaatatcttttttttctctattaattaaaaagaatgtttttatttttacactttaatatat

SEQ ID NO: 381945 - DNA, 2462 bp, Cannabis indica
ttggatcatatatagtttcaaatatcatttctgcacatttgatgctgtaataagccatatataaatttcaaagttaatttattggttttacatgttttatgttcatccatctaattgaaaagataaaattgcttgattttttattctgatattccaaccaaatatgattttttggaaggtgaagatggtttcgaattcgagtaagaacaacactaaaactataaggaattacataaagatagagaataagttttgggggaaaactcaaaatattaacctcctttcaaaagactaatgtagtaagataatacttattttagatctgatattgataaattttctttatataatttgtactcttaattaccaaactatgaataatcaagtttaatattgtaacattctacctttgtttctctaatttgtactgaaaacttgaccaaaaagactcaaccatcaattctcattccatcataataaagtttaacattctatcttaagtattcaacaactaataaaaatcactaatcaaaaggaaaaaaacaatagtttgatacaatcataatcttaattagcatgattaatcaaagatcaagtttgttccatatattttgaatcccaatacctattgtttccttagcaaaactcaatttccttctctctttatggctaataacaggcaatgaaagagcttccatcttgaagcttacatccctcaatttgatctcaaagaaacttctgaggtgagttctcatacataagtacacctcatctgtcaacaccataggcaagtcgggacaacgaagagcgacttcaaggcgcaaaacttctttgaggatcattcgaaagacctcgaattctatgccaacatcattctttggtacttcgttcacaatgaaactctgcttgttctttctaattgttttttctactaagtgaatcacacataagaatgccttgatcacaatggaatcattaccatttttctcaacatttaagagttttatcatagccttgaaataatcaagattgttcattaggtttatcctatcacccaaaaccgtcaccacaaaaagaaaatcactgataacataagagatatgtgtgccaagatcaatcacaactttcttcatttcctcaaatgtagtctttctttgagattgattaagttgttgcatccactcaatcaaactcttttcgccttttcttctccccttttcggtttctttactccaaattgtcatgaactcttgcaaatctttcaagtaatccttgaaacaacgatgaccaagatatggaatgttgtacttgaagtatttgtcctgaaattcatcggcgcgtttgctaagacactcggcttgattcgtcatgtctaggaatttgagtttgaattcctgatgatcatcgtcttcattgttattccccaaaagggctgatgcagcagcaagcaaagacctatattcatttgctattgccaaaaagtattgagaatcttctgagttttctagttcttctaacttcttggaaatgttttttgtgacatatctccatgccgagtccattgcatgagtattatctttcatttctgccatgcatgcatgccactttcaacttctttaatttcttttgtaattctttctggtgagagagagagagactgactttttagagtcaaatgtcgtgttatgtataatgtatgtacatatgtaaatctttctgagtcttactgttaagagcatgtggttagattagtcatttcaggaatatgatttgtgcaaaaaaaaaaaaaaggaatgaatcagtatgatattgtgtcatcaattctttccttttgaggtatgaatatgaaaataggaatagaaatagaataaaataaattttaaaatatgaaaaaattgataaaaatattattatgttttttctcataatgtattagaatggtcttttcttttattttaaaatgaaatagtcattccaccaaaatggtggaaaggtcattctattggaatgacattccaatactttaatatataaccaaacaaaagaatggaatgaaaattgtttcatttccattcaatttcatttcattacctccaaccaaacgccacctaaattaaacctcaattctattcaacaataaacattatcaaaggggccttggaatttggatcctgcgccatctaaaattttggatggtttatgcacaaacaacaggaatttcgattagtgtagaaatcaactcagatttttaaaaatgctatttggcctaaatgactttagatcttttctaatatattaaattggataaatactattttgaactctgtattttgcaaaagttatcaattgaactctctattatgttaaatgacaaaataaaccatgtattttctaaaatagtacaaataggacattgaattgattttttatcaaaatagaatttaattataatccgatctaaa

SEQ ID NO: 381946 - DNA, 1306 bp, Cannabis indica
aaaaaaaaaaaaagacaggtaatattgacatattgttgttaacgtgttaactctcacaaacggcaccctagttctggggtgcaaactttattaaaataaaattaactaaaaatgatgtgtcatcattattggttcaaaatttgtactggagatctcgaataaaaataaatcaaatctaaaattgtgactaatcaaaaattcaaacaatgtagatctaaataatttaagtagactagagtgagtagtagtagtaggtatccaatttccctggagatgaaaatatatatcaaaatgacttacatgatagtgtagttttaccattttcgttctggaatcaactttgactttagcacaaaagtaattaaatgactttcacaaaagggaacaaattacatgatagtttctattacctattgtagagtaataattgtgacaatattaatgatcactatttaattagttattttaatttttttattaattaccaaattattctaacaataaatgtgagagaaagtttaatggaatgtctcaattatatattgattttttttttacataaatacctaaatttgatcaaatatttcatttatattgctacaattaaatttttacatttttactttcttaatttttttatactattcaaactttaaaatattacaaaaatattatctgcattttttaacacctctctttctctcatctccttcaacttttctctttcatagatcttcacctcctcacatagtgttgacgccagctcctctgttgctatcgctgttgccagcctcctccgatcagattgttgtcgttgtcgtttacctttgtcgtcgccagccccaatctatcatagacctctatttcgagttcctaaacaaccgtccatctattattcaagtcattttagtagtgttaatcctcttcttttactatcattgatatgtttgttttaagtttgtaagttattaattctttttttttttcttagttacataaatgacatgtttcgatctaaatatatataaattaggtaatataactgctctttacacagttaatttaattttttttagtattataacaaaaaaataactatttatttatataataaatagttagttacaaaaatataataaatgttatgaaatattatttacggatgtccaaatcaacaaattgattatcaccattaatgtttggttgtattttcgtttattacattgatttagttttccattcttttagtaatatttttgtataaatagaggttcaccccattagaataaacaactgaaaaattctc

SEQ ID NO: 381947 - DNA, 3283 bp, Cannabis indica
agagagagagagcatgagagagagacctcgggatcaaggtggtagagacgaacaagatcatcaagtgtggggatcagctgagcataagctgatgctggcgtcacagagctagagaggaattccacatactgaagaagtgtcccgtgacatctatcaaactgttcactaaccatcttaatgtaaggtgcatcagcgtttattacaaccctgcagaaagtaataaaatcatcacattaacgataaaaatacaaagagaagtaggaaagttaaacgtaaaggaaacactagtgaagaagaagaaaaagaagagagagagagagaagagagtaaattttaaaaaaaaaaaaattataattctaaaaaaaaaattataattctgtaattattcagagtcaaatttgaaacaataaactttagaacctaaattacttgtaccaagaactgagaacaaaaaaaaaaacaaaaaaatgcaaaacagtcctaacaacacagtactttgaaaaataaatgatttcaagaaaccaactaactcagctgttttaggtttcatcagaatatgtgagaaatgttaggataatattccagttctatttgtttaacaaattacgtaacaaatacttacaaagagagcgatgctgagcaatgagcaacaaaaggggtactgccagctttggttcatcctttggaagtagcgagtctcgtagcctgttagtggatttgatcaatgcctgacaagatagttacttgttaatttaaatgccttcacacaaaaaattacaaataactatttactacttaagcaaaaagatctaccaaaactctttaaacctatataagctacataccacacagtacattataggggaccaggactactaggacccgactatctaaaaaaatggtaaaaaaaaaattaagggcaattaaataacacagacaatctgaaatagttatgagcacaactaagagaaaagaattaaaagaattgattctagaaacagaaaaatgggaaacaaataaaatcctaaattaaattacaataataaataatcaaaactgatctaggaaattgctaaacatggtaaccacctataagactactactgtcttagcactggtgtcatttctcaatccactcttatgtgtagcttagtaaagaaacgaggtcttgagcagcaatctttcttatctccctagctagtggcctaatcagacatgctcaataacattacaatgtaataaacaaaatagaccttattatttcgtgttgcaccaaaagaggtggcctggtatcggagagtctcactccctgccatggaatccagctgctcttcagtcaggttctctgtgtactggacatttgccatctgctgaataagctcctgatatgtaataaaaacaaaaaacaatttagcatcaatatactctatgattcagaaatcaaataacctttaacacataacccacctgcagaagaacaagctcaatccctaccccctttttcagctgattcacaagatactggaaaaggcccctcagttccatggacggatacttcttacacctgatgaaattgtgtgttagatgctgaaggtgtaaagctaccagtaataataacaataaaaggctataaaaacgaaataagacaaaagaggaacatttttatcaaagtgagattaacagctacacatgaaccaatggcacaactattacagtgatcaataaggacaaaaagtaaaagaaataacataacaatgactgtaatttgagcatcaatggaatgtaataaatagctgtccaaggccaagtgtatttcaaagagacactaaacaccactgttgacacacacgaaaggaattgaaatgacaaagtcctccaactcactgacacagaactatgaagcacatcacattgcagtaaggaacaaggtacacattgatgttgtcagcatattggcacatattctaaaaattaaacctcttttctctttatgcttaccaagtatctcaaaattacttaatgtggccaatgaaacccacataaggacatgcaactttagtttcaagagtctgggatgaaagcatctagagacaaatactcaccatttcaaagcaaataacaacattaatagtttcaaaaaaaaatgaaaagtaccagcatcagccataatcttcacttttggaatagattttacaatacttgtacatggtgaaggactttttcctactaaaatacaaaacataactaacaaaaaaaaaaaaactggaaacataaatgtaacactaaaagtacaatcaattgcaattgtccaacaacaaaacctcccatagaaaagccctagaaaccttgacaacttaggaagacgaagcacgtaaaagcaatgcagccataagcttctgttgtgagaataagtttcacatcaatacccttttgtgcctccgacaattgaggtgtagggcatccaactatcctggactgtaccttctagtatcaaaactgactacatcaggacccatggactgtacaagcatgaaagaaccataatctcttggacaacccataaactgagctcaaacgaaaatatatctcgtgaagatagaaaatcaaatgagcggtccctcatttttaagagaagcatctgtctatgaagaagcctcttttttatgggtcaatctatgaatacatgatacataaacatagactgaaccataaacatgtcctggaactcgtcaaagttacatgtagaggacgagctaaggaagaacacaaacaaaaaaggcaccaactagaataaatcttttgacatttctgtgaaacacaggaaaaagttcttcaaacttcaaacctcacttaatcctaagctccacagtgtcaaggaccttcaattcataatctacacaaagcatcaagttgcagagatgctcaacaaggcaagtcaactctggtgagaactaagtattatgagccatcctacaaacttctaattgcatgatacccattattcaacaactccatatcttgaataattcacaaaatccacgttatataagcaatagcccaccgaaaattatatgcttgcttctcacaacatttttcactacaagtatccaacttttattctttacaaatgtatgacaaatttttaccgctttctcaaaagctggaacctcgttcacaacagatatggacccttttgagttctataaaaagattcaaggacctctaatatatttcacctctgatttcatcaaaccagaccagctttccatctcaagaatctgag

SEQ ID NO: 381948 - DNA, 1966 bp, Cannabis indica
atttttgtttttatcgacattttctaaattcagggtatatttaccggagcctgtgggatttcactggaccatggtgttgcggctgtgggatacggtacagaagatggtacagattactggattgtgagaaactcttggggcagaagctggggtgaggcaggctacgtcaggatggagcgtaatcttaaaggcacttccacaggcaagtgtggaatcgcaatggaggcctcttatcccatcaagaaagggcaaaaccctcccaatcctggcccctctcctccatctcccattaagcctccggcagtctgtgacaattactattcctgtcctgagagcaacacatgttgctgtcttttccagtggggcaattactgcttttcatggggttgctgcccgcttgagggtgccacctgttgcgatgaccattacagctgctgcccaaatgaatatcccgtctgtgacgtcaatgcaggcacttgcttgatggtaagagccaaccaaattaatccatgactcattcgtagctagtttttattagacttattgttggtctatctgaacatagcacaccaaaaaggggtgtttttaatcatttatatttttatatacattttatgcaacagagcaaggacaatcctctgggagtgaaggcactgaagcgcacacgtgcgaaacctcattgggctttcggaaataatggcataaagagcagcgcttaaagcaagggtaaacaatgcgtcagaagcttggcttataagaaattacagtacgcttagtgttcttgtcttggcatactctcatttcaatcccatcaccaatgtcaatatgtagattgatggaatataatataaaatatgactctgtaaatagcgctctattttatgctgcatttggacgacaggcttatattgtcagcttcgatgtactctgtaaaagtataattgtagctacaagtttaaagaagctccaaaaatattttataatatttttattacatttttctcctgtctttgaattgttaatattttatcattttcaaaatattattttaatcaatgaaaatgtttaaaaataatgaattgctattagacactgtagtgtctattagtaatattctttcaaacttattacattacattataagttaacgtgtaattgtaatataaatatgtgagataaaatagataaagcttttggtaaaatattttaagtattaaattagagtagagaagctaatgtgagtgctcctatttatttatttatttattttttgtagtttttaattattatagctcacttattattgtgagtgatccagtctccctttccactttattactaacatctagacccaacaatacttatacactctcacacgtgtcatcaattctcactattaccctattacttcatgtcctaacataagtcccatgtgtaagggtttatttatatttttagtaagtggtatgtcttttccaaggcactaagtaaaataattttaaaatttgatgtataaggtttgttaataaaatttttggcatatttagattgacaaaaatattttataatttgtatataagatttcagctgaggtatattatatatttttcgtttatatcttttatttatttatttcattaaaagtaaattaagtgtcaaacttctttaaaataaaaaaattagacacaactgatacgttttaatgatgaaatcaattctttatctttcccgtcattttttatatggtattcaaatcttaaattaatttcctaaatgatttgattagatcttgtgtgaagaaaatcaaaataagatttttctttactataaaaggaaagtcgcacatattgcttacgattctgtaggtacaaattcagaaataagtgaagaaaatcgaaataagactttccttttctacaaagaaaagttacacctgttgtgttttatgccctaaataaaactcttt

SEQ ID NO: 381949 - DNA, 2118 bp, Cannabis indica
ctttttctttaaaaattatttttttcttttcttttctttcctcataatcgtttcctattttttttcttttttcctaaaaaataaaagaataaataaaaaccttatttccctcagaaacccccaaacccaagcttttccctttcctctgtctatcccacctctttctctttgttcactgtcacacatgcacggctaggccacaatagccatcctccggtcgaagatgattgaaacggaccacacaggtttgctcgcaacctttggaaaacccttacctcgactccctctcgtcgtcactctccgttgtgcatggatgaagataacttcaaccaccgtgagtccaaacaagtgccatagatggatttgcagaattctgaagaccccagatccatacctcctgaaagtccctcactgttctcttgtcgtcaaaagggatcgacggagctgcgagttttgagtctaatctgggtacctccgtcttaacgagccaaacagatggtagtaaaaggttctcatcgtcaaaaatttccaaatcccatagcttttttctcgatttttcttttcttttctggcgtccatccccgtagatggagtcctccattaaaatggacgtgctccactgccggccttggctcagtcgaacaaagttctagacattgtgagtctccattctctttccatttaatttttttttttttttttgaacttgggaattttttgtgttcaaggttagatgaaggagcacgttgtagtttcgatgaaggatcgaggtggagtttgaggtaggtggagcttcaatggaggaatggtggtctgtaaatagaagaaaaaaaacaatataaatgaaaaagaaagaagagaaagaagaaaaaaaaaaaaagagagagaaattgttttttttaatttttttgtttttttaaatatttatttacgtgaactaataaaattgtgccacctgtacaatgtgtacacgtagacattctaccatgatagttaacagagatgttaaacggttaacagaatatggatttagggaattttactattaaaattttagaattggtagctagttgtaaaacctgaccacttaagaagattatagtgcaaattattttataatatattggtgtgtgttgtttttttttttttttttttttttttttagaaaggatatgttggtgtgtgtttaggatagaagatggctgatataatgaacgtgatagaaacataaaatataaataaataaaaacgacaagagaaatgaaagtgagaccagctttaaccttcccaaatcccaacacatgatacgtttttttttttgttggtaaaaaggggatggatcctagtcaacctacgtgttacataggactccctacgaatttgggaagcagtaatacttagttggccagcacagtaagtacattacaatttattcatatacttattactaacactaactaaacataacatagagttaatacgattagttaaccaaattttataaaaattattatatttaaatatatgatatttgatatttaattataataaattaacattaaatatactaatagttagcagtagacactaatctcttttaacattattatgcacgcatgacttagatattagaagtagactactgtatgtacatataacatccaatgtatctaaatatctaacagtactaataatgatatgtgggtgtgttttcttgtttaactttattaatgtgtattgttttaataattaatgtaactggtaaaaaaagtattacatgattgtgaaagacatagctgtggattgttgtttgtttctaaaagtaagtagctatagggtagagccggcctaggtaggtcataggtgtttgggtatagggagagagttcagcggagtaatttctcagatgctacattcattttttgtcagttcttgttcccacggctaacggtttaacaaagttttcatagatatttaatcatcgaaaagatattaggcattactagttgttaagaatcacggggttctatctcaaaaccaattggcaatgggaggagtagcccattcctcttatatattctattatttttccacacattggcaatgtgggactctcta

SEQ ID NO: 381950 - DNA, 1390 bp, Cannabis indica
atatgtgtgaactgtgaagtctttgaatatgtaaaaccatgtccacgtgtttcacattttttattttttatttttaaataaaatcgtagtattgtatataccaatattataatactacattgaattgttcaaaacaaaatctatatattataatagatttgttagacaaaaaaaaaaattatagacatttccttttatacgtcaactttatgttgtttatctatttagttttaagaataaatattatgaaattatatttcctcaaaatattgaccaatatcacaagatctaagagtttgacctaaattaagagctaattagtgtcataaacttaaacacagcattaaaaatacaagatgatcaatacaagtatatatatatagatcacttgaatctttttctcttaaaatacctctcactaataaaataattagtatttatggactttataactaggttcttggtagttgatatatagtacgttattgccaactaactgttgtcgaatgttacataaaattcctttggaattcacatgaagagatttataattaagaaaaacgtagtttattaatttggtgaggtagccataactataaccaccaactatattgaaaattgagatctccgtttctaataatatctccacttaatgattaaggatatgatcgagtgttatatatatgtgtgtgtttttattatatattattatcgataattacacatataataaatcctttcacgaaaaagtagtacaatatatgattaaacataataaggttgttcgagttgtgaaattgaaggaaagtatatttaattctaaagtataaccattgaaacgattgggttataatctggctgttaaatccatcgatatctctaatcaatatttgttagttataacttattacagtgtatctttttttaatgattaattaatatagtttgaactgccctattatatatataggtagttgaaatgaggtttatagtaaaattgactgtattttttattttttatttttaatatacatgcatataaataatctcttgaaagagacaaaaataatagataaggaagcaggggccggggcaagaaatggatggtctatttattagcaccaacatttaaaacaatctcaacaaacatttgttggattccactgaaaaatagtcttagctgacgtgaaatgtgtgccaagttaatttaagtgaaatataaaacttgttaatttgctgatcaatatataaattataaatataaaaaaaatctttaatatttcttatataatactttggatactttaattaaatatagtatacaatttttaacgttgttcatgatatatctttatatattaaaagtgtctatctaacggcatttcttggt

SEQ ID NO: 381951 - DNA, 2430 bp, Cannabis indica
taaattagtctttaaattttattcttttaacaaattagtccttaaacttttattttttttaaagaaaaatataaagtcctcaatcttaaatgatagtattttatttatttagtcttttatgaattttaaatatttttatattaatatacgttatcaatttaaaacaaatacatattgttttatttatgtatacttttttaatcaaagatatattttgaatattacaaaattatatatacatgtgaatcaatattttttttaatgaacaacacttataacaaaatatttctgctaccaaatgatttatctacacttcaagcaaatattcattctcatcaaatagttgatgtgcatgcaccaaaaaaaattacatataagtgaataaaagtttttcaattctctaactattttttctaccattagaggaagatcatttcttaaatatataaaagaatttaatataaaatttatttatatatgtagtaagatattattttgtagccaaaataataaatatttttttataaactaccaagtaaattatattataaaaattatttttaacttttatttgttgactggagaattttataactgactcaaagtctaataaacagtaattagtcaccaataaatagttagaaataataaataaatagaaagaacaccaaaaattatagaggttcagcctcttagatattgataataacctacttctcctttagttgtattgatattgagataatgtcgtgcagattactaaggaagacaaaatgacttataagctacaactctcaagatgcttacagagaataatgttcacaaaggtgctcttagagtcgcgataataattttcggccccttccctatgtgaattcactaactatttataggagaaagattgttacaattaattccttaaagttagcaacaaatagtaaatatctctatattttagagtgcagttacaatctgtttgaaactcctatatttttgggctgaagagtcaaactcgtatttacaggattctattgtagatattcttagagtttgttgaggaagaaaattgaagcccggacttaatgagatctatttccctggccggtgtgttgacaactcggctagtttgagacttgcttttttgaagagatgcaatcttgaagggtatgttgatattctctctcaatggctatcatattggtgatctggctagatactttataaaaggtaatatgcaataaaataatgatattagccttatgtgggaacttcccggaacgctcctgctcaaaagtcccatgttatgccaagtgtcagctaaatgagaccgcatgtgattgtcacatcatgtgggtaaaacttaggataatatttttccccatgtcctcgtgcgaacacctatccggatggagacttttggtattttcccaaatgttgatacacgtgtgagtcccacgtgatcgactctacctatcttgtgcagggttgacgggtctattggattttatgccctaaataaaactcatttcaatataatcagatttactaattaataaaagatcagaaatctttttatgttgcatggtttacataatttatttcatgattatatgcttaatgtataaattttattaagtccaaaacatatatttattcatgattatagtgctgtcaacacagtagaatataatcatgattgtatttttaaaaatttaagtctcatgatttgtcactacactagatttagactgacatgataatcaacgataaggtatacttacaccgtggataagtgttatgtcctttctagaatattggcaaagtatactagtatcagatgtattgagtatacattagattttaccaatattgatcttagataagatatcataaacttaccgttatatctttctaagtaaacatcactggttgatcttaagtctatagatcttaatcctgatatggttaggttcgatcttagttgtattatttatgctcttcaatttattcgttaaagtcgaccaattggatcttctcgtgacatacagattaaggacatggtagttcaattgagtgggagcgctaatcatagatatagaatctatagcttctataagtatttagaagtaaaacgatgatttctttcgagcttggcttgatagagataaataattgagatctcatttcagttatattagtttactgaaatatcatttataggtagctaagtattttaaggataaaatacattgaagggtagaatggtaaaatctatccctattcgatgtagatcatctataaaggattttaaagtatttggattgtaacaatggatagtcataatgtatctatatcttggtacatatagagcgttctatataattgagagtgcaattttgaatttatagtggcgcaaggaggaattaataa

SEQ ID NO: 381952 - DNA, 1506 bp, Cannabis indica
tttattttgaatagcatgcatctgtttcaggttttagtcccaaccccagatctcgtattatatttctttttactgctatataatgaactattggctttgcgcgtaagggttgttgagtttcattactgattgatgaaagaactgcctgttttctagtctggatgattgttacttttctttacacttgctttggaagctaataagatgttcttactgacgttatttgcgtcatgtatttaaattacagattcaaaagcaaatagaagacttgtctacgtctggtttggacaccacattacttgatgatgaagcttttaatgtagaagcagctcaagataaatgcattttgaggctcattgcctcctgctgcaatggtcagcctcttttcctgtgtgtaaagttagatcctgtacagaatagccatctgattagttgcatttgttttcttatgatggttatttcaggtgataagcttgagcgggctactgaacttgttaagcttttgttgcttgagaagtcggtgaggggtgcaattaagctggttactgttttgaagctaccaaatctggctgaacggttcaacagcatattggaggttagtagctgacttcaaatgagggccattaatgctaaaagcagaacaaactagatcgaaaattctacattgttgttatctctttttcttatgattcctcgttgcattgttgtaacaggagaggttgattaatgaaagtaaagggaccatgcctaacatcttccctagctcaactcgccgtgtgtccgccaaagacgttgcattttcaaagacttcattttcttctgaaagaagtaaccctctggaatctgattgtctgttatcacccccaaaattatcagctccactattcacaaagaaagcaaaattacaaggatccagagctgaagaggggaaaccagaagcaaacccaagctgtaaagttggatgatactggaaagggaaagaaaatagaagaggtgaaaactgcggcaaaaggaagtcctattaataatagtacaggagaattgaaaaaggctggggaattggaacaagtacagcctacacgtccatttaacccctttgcaaaatcaataaacattcaagagaagaaggctcctgaagtagatcaagtacaatcaaatcgtccatccaatccattctttaagtcttctgttaagtaacttttctaatttaatgattgtaaagatcttgtcattttgaaatgtcattaatgtattagaaactattgacgagttactcttgtaattaggtattgactagaggtaaacacgaaagtttctttcttcttaggcattcgctcaatgtggggttggttcccatcaatttttttttttctcacaaatataaaaatcatggttggtggtagaattgaaatgagagaaaaataggggctaattaagaacgtaatagggcgttcttgattaaaaaagaaatttttactttttgataacgtcaagaacgtaataggg

SEQ ID NO: 381953 - DNA, 4069 bp, Cannabis indica
tatcgggaggcccatctggatagatctctggatcgtgaacaagcaatgcagagaggccattttcgagcttgataactctgtacaaccggctatcgttgggagactttatgacaatatcgtcagaggagaaggtacagcgacctgtagccattgttgtacggcggggaagagaggtacagagaagagtacttgtctttggagaagtatgagttcgtcgagtgctaaggtaatgaaatttgattattcttttcttcgaggtttgtttgcagaagagtgaagacgacgcttttagcggctttagaagtttggtgaaaacgacgtgtcgtttaatcgtttgtgcccaattaaacgacatgtcgtttccagcacggtgagacgtaaagaaagaagaaagataagaaaagagagacctgttggtctgagtctgagagtgagccatggatgtttcacggtggattctggagtatctcattcgaagccctgacaatgatagattacccacgagagccctctcggttttgcccattcccaaccacgacttgcgttggaagaagattctgctccttcggaccattgagtgcgacgtttcagacgctttggtcaccgaatccattctccaaaatctggaattagtggaggcgttggactccaggcaagaagaaggcgcggccaccgccattgtggagtctatgaaagctgcttattgtgctgtggctttggagtgtacggtgaagtttttggtgagcggtggtggaaagcctggtgagaaatatttgaacgcaattgaccggatttggagagggagagtttgtcaattggagaggtctgggaagaagagtaatttgttaacggtggatttgaagaggtgttgggatgaggttgagaaggcggtttgggacgatggtgtatgtaagaagcttttgggtatgaatactcggaatgaggctgtgagattggttttggagtatttgaaagaggcttgggcgttaatgggtccttcgtttgtggagtgggcagcaaaattgagcacctacgagagaggtctggcgcgttcgggagcggtggagggttcagagaatgaacacgaagtgtatagagtggtcgaaatgcgtgaaccggtggcttcgaagttggccaatcctggtggagggttgagtgttagcggtatgcttgaattggcaagtgagctcagggcccgggaagatgtgatggaaccgggtaatgatcaggtttgcgataaagatgtggattttgctgttactttccatgattctagaccttccacggttgttaaaggtaccatttttctcatttttatcttcaaagagatatggatttgcatgcttgtagagaaacttacaaacaagtgtctgaagaaatgtttgagagaaatcctttgaatgaagataaaattgcttagctatagaaaaaactgagagtagactgagcttccatacattttgagcttttgtattcgtacaactttctcatggaatatacaacgctcttttaactgaaaacctataacaacatagcagacatttccacaaatttaggcaactgtcaaactaacatagcagattccaaaactgaaacagataaactccacttcagcgggatgtttaattttgaccttgttttggtcttctgttgtttcttacaaatctttctatgatagaagctgcatgtgtggagtggaggctttaatgtttttatctttcttgcaaattgttaggatttattcttctatgcttgagattttgtatatcaaatgtaggttttgttttgcaattgtttatggttacattacagaaattcagagggaaaaggtggtgaccagaaacaagcaagttgttttcaataaaaggcgtagaggaccagtcaggattagtgaagttgaggatttagacacaaatgaatccgaaaattgtaactctatcccaacccctgaagtcaatagagtacaagaaacacttaaatctagtactcaggaattacgagcgctcgtgacagacccacttcctgaagcattacaagtggctgaaggtgtagcttcagacttggcaacaaagaatgtgagccatgagcaccctgtagaaagccagaaagaaaccgaagcagatgcagcaacaaatgcatctgttgaacaaagcaccagacatgttcggtctagtgatgctaatcttgataagccatcctgtagtcatcaggataatggtactcaacccagcttgatggctcgcaatagtactgcccacacatacgaggtacttctttcaactcattgtttactatagtgcatactggaaatatggttcaaaccaactaataatgtagtgaatgtgacataaaatcctcttcagattgctttattttgcacaaaaatcttgtttataattttcagtttatcccctcttacagtatattgttttagttgatttatatgtgtcttaagttagaatgaataataccaagcagataacttctatcacgggttatgcgcatgtcaatctctgattgaagtgtatcttaattagtcccccctgttgactctcatatgatggatggtaacagttatgaacagaatgttatgtgctaaatggatctaacaaaaatttgtgttgatgtttctgttgaatttagcttcccttcctttttcacttgtttgttcatatgaacgcaagatcaggtttccttcacaaatttcatataatctcttaaaaccttgtgtcttcttcttgtttgcagtgggatgattcgattgatgatgaccctgatacatcggtcaaaaggagcaaacttcacctacctagcccgaagataaaggttgtttctccactgaagaagtatgcacctacaaaaattttaaagagaagaaaagttaagaggtggtcactgctggaggaagacactctaagggatggcgtgaataagttagtcctttttagatctttcgtatgcattagtataccttttaactgctgcttgttgatacttgtggaaatgtctttccagcctttaccaattttctgcaccaaatttctttgtgaattcataattcatcaaattaaaagcaaaatgtaggttcttccatcaaatttaagtaagaagtaggatgcaatatgttgttttgtatgttaagaatcccaatctttataattgatgttttctcatgaaggtacggtaggggaaattggaaacttatccttaatagctacagtgatatatttgaagagagaacagaggtaaacttgtgaacttgtatattttggtttgtgtgttatatattcctaactaatcaaaggtttgaggattttgtataggtggatttgaaggacaaatggagaaatatgactcgataatgacactactgagggacatggaaacagaggcatatctactgtctaacctccttttcactcatttaatctaatataatatggcaatggtattgacacccctgaacaagccaagtttgatatgttgctttagtagaggcttctcttggatagttagttactttcttatatgattgtaccatgttcaccctatatagatagatagcacagtatatgtagttgtattttattctgcaggtctactttttttaggttcaacttacatttcagcagcagcagccttatacaatgcaatagggttaaatggaagttgattgttacttggactctctcttcaattaatcattgatttaagattttttatttttagtgcagattttgtgtgcttatattttactctaaataaaagtctaaaagttaaattatgtattatttttttctagaaaagattagagaccaatttcatctccaatttagggcttctttcacttgtttttgcactatattttaatttactgtgaattagtaattacatagaaaaaaaaattaattattaaaaatgataatttggtaattgcatacattctattatcatggatattatgagaattttgtaaatatctaattatttaattattatataattatttggacccattgtctatttttttaaaaaaaaaaaaaataatcaaatcatagcacaatctcat

SEQ ID NO: 381954 - DNA, 2803 bp, Cannabis indica
gagaagctattgtacactattttttatttgagtaccttgaagatgatcttctagttgtgatcctaaacacggtactaaactaatgggtcattaaatttatttttctatttccttttacttttttgttgattgcaaaacaaattattaagagaaggttgtttcgcaaagtgacattaagaaagagttaatgttcacaaattaatttggtatccatactaaaagaattgcttttgatctcaggtctctgattcgggaagcattgatgctagcactcatggtttctccgatgaggcgattcccaaagcaaaggatgtggttaggattgatgtagtgggaggcttcgctatacagaaggttacatccgaaagaagttactttcggtaagttgtggttgtttggttggcgcccttcgaatgcctcatgtaaaatgaattatcaaagtggtaagacataaatgtttctgaactttgttgaactctgcaggacaatagctagtatggatataaagctggatttcgtcccaccatctcttattaattttatctcaaggcagctcattggcaatggtttcagactttatcaaaaggtttatcttttgttccacaagatatgctaagaattagatttataatatgcacagatgcactcagactaaattatgtgaaaaactgcaggcagtggcttcgatgtttacaggtgatgacgaattcaacaaagccttgaaggatccactgtacactagaatacgtgaaactctttgctccactaataaattaaatggatctttgaaagaagaaactgtagatgtagtagtagtcgaagaagaagaactcaagagcgaagcagcagatctctctgaagtaaaagccacgagtaatttggattactcgaaggtaatagatcaaaacagtaattgcaatagccacatagttgaattgcctgagcaagttgctggtagtacagcctcttgtgagattgtggagatcaagagcgaagacagcaagaattttgacaataaaatattagttgagcaaatgacagaaacatcccatgttaaccgcaagcgaaatattattattagctcagatgtggaacaagctcttggaacattggagaaagttatttctatggttaaagaatacggatttaataccaaaaccccttcttggttcaccagcgaaaggtctcccgaagaaaacaatccagatgaggactcaaaatctgaaggagaagatacaggagtgtgttcaaatgttgcagttactgttgagtctggaaaagaaaccaccgaaaggacatcgtcccaagagtccgttggaaatggccctgccattcaaaactccaggtgagaatttttgttgttgaagttcagtatgtatgtcatatgtaacacaaaccatagatttagtacctaaaatcctttttccatgtgtttctttggcttttaggcgaggaggatcgaactcattttcaaaggaggttggccataacagaatagcaccggcttccccagagcataaaatctcaattccttgtgatgatagttacaccaccaatcaggttgttcttagttctgccaaaaccgagccaccagtgataccgattatgaaccataatatggctacagaaaataataagcatcctagcagcgatacgaacggcatctataaaagcagtccgaacaaagtaaagaagcgtaagaagcaaagaagttctaggctttgttgcattggctagagtccttaggagatgaggcagagttgaacaatagaaatctgattttgaagtatggtggtgtagatgaagcctgacatggctaatacatgacacaaaagagtgaatttgtaacatcttaatttatttatgaaaataaactttataatatagaaagtattgttggcatacagataagtttaatgttcttagatttgcttgaatacttgttaaaatatgctgtaaagagattattttttatatcttttacaataagagatagctggggagattcgaatttgggacttgttaaatccttctctattcaccaacttgaattcttctcaaaagggtttgtaagcaagtataaatttgtggtttgaataataataataataataataataataataataataataatattgagaggccattttctgtgatgataaaattctatttttccaaatcaatttttaatagctggcaaaagtggtgaatcttatcttggaatttagaatttgctagtccattttatttaggtgcacgttttatttgatttattattgtgtggcattttgatagtgaaagggagttctatacaaagtattagctataaataaagtttggtaatggcatattattcctccaaaaagtaaagatttttgtttggatgatactttcatgatattcccctatcgaatagaaggatctcttactttcaatttgtactagatacgatgcttatgtctttttcatgccttttgggtaaagaaaagaatgctaggggtttgtgcttgtcatgtataaggttcattttctcaacattattaaagaagagtttgagtaatggttgcatggatgttatttagagatgctagactatgaggggctttataacacatgatgggtggttgttggattctctatttctgttatattaagtaactataaaacaaaaccgtgtttcgataattaagttatttataatttttgtctcctgaactatggcgtatgtgttaggattcatgtcttgaaaaatctatgagggcattcctaattattaataaagagttgaacattttaatat

SEQ ID NO: 381955 - DNA, 4124 bp, Cannabis indica
actaacaagtaaaaaattatttttatataaaccataattattcttagatgcatatattctcttgagagtggctataaacctgcaacaacacgataaagaagatgcatgagttagcatgtaatcaaattctaaaagtttcagaagaaaacaataactaaaatagttttttgcttttgaagaacactaaaattagttagggatgactgaaaaaaatcagcgaagacaggtcctgcccctaatgggagagacatcatggcggggatggggaatcaccaaaaaccaaaacaggaaggaaagatgatcgctgccctaactagttttttcttgtgtaattgcagctacggaattgagattttcactttaaatagaatctcaaatatttttgttaaaatatgtgtttttagtgtaaaatttggtgtaataggttggacatgaaatagtaagttgatgtgaaagataaaccaaaatgaagttaaagttgcttcaaattagagtaaagttaagtccaatcaaaagtattttgaagccttacttgatcaaagtcagcaactgcaccaaaagaaagtctaaactgaggctgaactggttacgtaatctgctctccgcgaaaagccttttctgctctggtttgaaggtgatgatgctgaagcagaattatgcacctcctccctttgtcgctctgatgtgtcattttgcgaagccaagtactcgagagctacaacaatgtcactaatgtgaggacgataagttggctgctcttggagacacattgctgtaatagcaattgcatgatgcaaacaacgaacacggaatcgcccttgcagcaatggatcgacaagtagagcaaactttgtccggtctttaaaaaaagggcgagactgtattttccgccataaaaaaataaaataaacaataaattagtactggaatctaaagtatctactgagaaaaatgatgattactgactcgaagagaatagttaaccaacccaagaaacaaggttttgttctccatgtctctttgtgatgtctatcgcctttcgtccagtaatgagctccaacaagactacaccaaagctataaatatcagatttcagagtcaatttgccgctcatggcatactctggtgcacagtatccataagtgcccatcactctggtggaaacatgagtattgtcaccaacagggccgagtttggcaagaccaaagtcagagagctttgggttaaagtcattgtctagcaagatatttgctgatttcaagtcacgatagataaccggtgggttcgctttgcaatggagatattcaataccacgtgctgcaccaacagcaattttaattcgagtttcccaactcagtggcttcttttcagcgtcgagatctgaccaagtaaaaaaagttaaataaagctttcacagaaaagagctaacctaccattacagtaacttcataaacaatgtcacctatcattctactcttaacaaaaaattcgggtcaatgccgaaatgggaaagaaaaataaaaagacgggcggcgtgtctgacccttaacacatgcagaataattgaaacaaaccaatacatcccacgtcatctaagttattatgactgaatatgttactacctcctcaggtaagcatacagaaaaccagggaattatgcgccttggaaaacagaacgatgcaagcaaaataaattcaaacttgtttgatataacatgtgagtacctttactccgcccaaagaaaaccattaagatcttaaaactcatgcaaatcttccctcaatgtgattagtttacaccagcttacttttcaaagaaatttaccatacatgaagttggtgagatttaccaaaaagatggtcttccaaactacccatcggcatgtactcgtacaccaatagcctttgatctccatcagtgcagtagccaattaaggtaacgagattagaatggtgtagcaggcttaacattagaacctcaacaataaattcctgaaacccctggaggccgtcatgattaagttgcttaatggcaacgacctgcttatcataaaacataaataaataaataataagacatcgcacatattggaattcaacttatagaattgtctaatattatcatgtaattagagaggatattaaaaataatatttgataatccaaaaatggataacttagttcaattgaaaaacatggatcatgttaaactatcaaatcccttatgtatatcgatggtaaggaaaaacaaaataattataacttttatataaaatttatcttctcataatttcttggtcgcaaatgatcaacacatctatgctttcatgctttttatgttatatttctgatcaaatcatattcacttcccaaattttatttaccaaatgacaataatggattgagttatttttattgacacaacccttttttggaatagtaaacattagaaaatcttattagtacatacacacgcgcacacagtttagttaatataaattataatcacacttcacaaactacaatgtactttactgaagagaatcgaatctttaaaaattactcttatctacactacagaaaccaaagattaaataaaagatagaaacaatccaattacaaatgttgggaaaaccccagttattattcctatatatacatatacctggtttgtttccaatcggcctttgaaaactctaccaaatcctccttcaccgatcaaattcacctctctaaaattcctagtggccgcagcaagttccttgaacgtgaagctacgcgccgcacatttattcgggctaccggtatcctttcgacctgcaaacaaaatcaatccataattttattttttcaattttcaaaattttgtaagattatgcttaaaaattgtaccgaaatcaacagaatttgattttcttcttccactaattgaaactcatcgcatcatttaaacacagaaagcagctacattcagcaaattatactataaaatatccaaaagggtgagagatttgaaaattaaaaaagaacaaacctgaagatcgagtaaaattatcaatctcaaccctgctagaatcgtttcggtggcgagtaaagcaagaaaagcaactcattttccaaaattcatagagaaatgaaccctaaatctccaattccattgaattagaagaagccaaaagccctacccaaccccaaaccaaaccacttcgcagtctcaaaaactctcacttccgaagaccaaaaccaaaaaaaaattaacataaataacgcgtacagttattacgctatatttagaaagaaaaagaaaaattgcaattttgagagaaactgattcaacgccatagttagcggtgaaatggtattatagctaagctacctggtttttatttttatttctttttcttttaataaaagaaaataaattgagtactttataataaatacaaaataaataaatgagggctacttagcatttctttaactttaacatgtaccattcaaaaaatttggaaattgttaaatttaataattttatttaattttagaaaaaaaatttaaaatgaataaaaaattaaaatttaagaagtatgatttgaccggcatcaaaatctaaagagtatgatttagtacacgaacaattatcaaattagtaaaattaaataaaattagacaaaaattcttaaatctaacaatcttatgatttgatatatgttaaaatttaaaatgcaaaaatgttaattaactataaataaattagtatctagcaccttactagttgtcgtatctttattgatataattaaatatcaattatcgcaaactaattagcagacgtcacgtataaaaattgttggacaatactagtgtttaataagaatgctcgagtttttattatgtgagtatacacactcgttctctctctaaagggttcgtttggaagtaactgtgtaattactaaggtggtaattacacaatgtagtaattacactatattttaaaatgcaatgtatgtttggatatgaggtggtaattagtattacatatgaattcctaatatcttgtttggcaaaatagttagtaattacatgagaaaataatattttttagtagctaatgtttaatatg

SEQ ID NO: 381956 - DNA, 2809 bp, Cannabis indica
gggtcgcaatctctataaaatgagaactttcagacaggtgagctctttggaatttatctatataattatttatggaggtggggatggtaaccacgtgctgttaagattctctgtttgtccacattttagcgttggagtgacgaagcattgcggctgaatgtacttgctgaaaagcataaacgaggtgcagctgctaggcttgagagagctatgaagagaacaaagaatgggattgcaaacaaaggtgaggtggggagggaattcttcacgtgttgaacatgagagaaataagtaaaaaaaaaaggattgcttctatttgtttatgttgctggtattggttttgtttgttgattgcttcatttgatggcgtgattaggtactaaagatcagaaaaaaatcccctctgcaggaccgtcacgaaagagaaaggccagcgaaacaatgaagagaaaggataactttgatagtcgtgggaaaactccacttggagaatctagaaattataataatagtcgtcaacatcatgattcaacttttagatcatctgaacattttagggtatatcagaaattctcacgtccatttacaagtaattttccgaatttccaatcacatgcagatcctccatgggttaatgatcattctcagataagatctcattacaggagtgcacctgaccccttttctaggcatgcttggagctccaatccttatgttactatgcctggaccacagtttgggcattttgaccacacttttaatactaatcatgcttctcaaaatcctggatactactttgaatctagaaattggagtgggcaatggaggtaagttttttttactttctttcttactgtttttgtagacctgcaagctgctatatacaaaagtctacactcatttcctcaagtgatcatatcctacaaaggtcttggttgtccagctgtaattcctaaagtgtacttgtttatctcacacagaccaaaactaacaattataccttatattgcttgaagcaaacatttggctgtaaatgtctgagcttgtggaattatcttcttgtctagtttgtaaagcagaggttcacagacagttattggtgtggtaatttttagtatcgaaacttaaaataggattgaagttgaattgaatgaatcaaatgaaatttgtgcagtgggggcaaagggcatttgcttgagagtctcttgatgcaatgcaaaccatacaatggaacgacaaaacaagcatctttagaaatatttattcctgtttgaggcatgacaacattgggaccaaagggtccggctgggctggccttgtcattggcctttcaatcatatgctatggaaagtagattctagatatgaaccaaacttattgactcaaaaagtagtttcaaagtaactagaaagtagtaggacttaaaatcaacttgacttctcaactagatattgaactatttaaaccaaaagcatattattgcatgtgttgtgttctgtgacttggttggttccacattgaattgaatcacactaaaattcctggttttaaccgtcatagtaaaagtttcattactcagtgaagaatttactcaacatttttctttttgattattaggatgaaagaaaggctgcttttatcaacttttgagatgggatgggacatgtataaatgtttccctcttttccatatgggaaaaaaacaagggagtgaatatggattttatagatgggacttatgtgtgaatcaaatacacaatccaacccaactcaaacaccatagcctggggctaaattcagctgtgacattcaactagtcactagtgtcaggattcaccagttttagaccccgtatcaaatgacggctcttcctaattaaataggcagcctttcttgactgacacctccaccggaccaccctcttaaattaacttgtgtcattttccacccaaattaattgtgcttgattttttactctttcaacttgcacgttcattttatcgttgtggaacttttttgggcaatttttcaatttttttttccaaataaaatggagaggttaatcagagcacagatttttgtgtgtcctaaattggaacacgaagtccttattctatccatgaaattctgtccctataagtctacctccttttctgctggtgggtcatcccttttttacacgaaacaaaataatgtaacatcattactgacccatttcgacattttcatttcctttaatcatatatattaataccgtcaacccaacaacaaatcaacaataaaagaaaagaaaagaaagaaaaaaaataaatacatctataattcattaataacactgttcttcttgtaaaccaatatcgaaaccaaaccaacgtagaacaaacttaagaagacaacaacaatgaaagtaaacacaaaacaaaacagtaataatagttgattgaatacccaacgtcaagtggaaaataatcatttgggatgatgtggtattggccctctcagtgtatggctgctcgtatatatgtgatgattatggtattggccagttgagaaaagaggggcaaataataatctcgatggtgatggtgatagtggtgtttttggaatgaaactgtgcatgtaataataattgagaacgtaatagtagtagtagtagtagtagtatactgaaaccgttattaaaaataatgatgggcaagtaaataatgacccaacattttttttaattgaatatatatatatatgagagagagagagagacacacacagagagagagagagagagacagacagagacagagagagagaga

SEQ ID NO: 381957 - DNA, 2074 bp, Cannabis indica
tatatatatatatatatatatatatatacataaacaaaaagggaaaaaaataaaaattataacaaattcataggaaaaaaacacaagaaattgtaataatattatttttttttcttttgtaagtggactatttattataatgataagaacttaaaaatttcggataatttaagaatatactaaaattaaaatttaactagcttattaacatattattttaatcttgattttaatatcctaattaaattgctcataattaattttatgaaaatttgtgacaattcataattattttatgaaaattttatgaaagttagaacttacgaaccgaaaatactaaaaataactctataaaacccaaaagaagttgttaccttgtttggtaacggaatttaatggttaataaaaatatattttcataaaaaaaacgatataaaccgaaattattaaatactagtgcttactgtccatggttggaggctgctgaaactgtaaaaaatcatcagcatcagaaacagttttgtatattcttgcattgacatttttgatggtttgaattaagcttttttcagcattagaagggattttaatgccttcatcatagagaacatcaatggcagtgaagtatgggaaattttcatcaattaagacttgtctgagtatgggaatcactgcatgtattactgagtatacagtcttcaaactaaaattactttgcttcacttctgcaaattcttcatctcttgggacataaaaatcactaatccttgactcagataatggatctgcatgttaattattaattataattaattcattaattattgtaaaattaattatacatttagtacaagctacatatatttagaatcattttaaaattatatattattaattgttgataagattcttcggaattttttaaattaaaataaagaatattgacggcttaaatatttacggttttaattttccaaaaaaaaaaaaataatgttcattttatgagaaaattaaaaaagaaaaaaaaagttaataatacaagcaaaacaatataaggtaacttgttatatatttttagctattttttttcattatttttaattttcttcatttttttcatgaataaacttttttcaaaaaatatcatatttttgcacatattaaaactcaatgtataatttctttattatttaatcaatttacaaaatgtggaatcatatatggcctaaaaagtattatctaataaaaataaatggtacaaaataatattatcttaaatttttttttaaaaaaacaatactttagaatatatatgtatatgtacgagtaaaatgtatgtttttatctcaaaactaattgacaatgaactttatattaataatatataagaatatgacatgtatatataataatttaccagtttcagttggaggccgtccagttctacaacgcctaggataagggaattcttttgatccgccaagaacaggtctttttaggtcatcattgttgtccggttgtccgagatcattatacacatcataatcataaactctttcattcttcttcctctctccttttccatctcctctcaaattttccaatgcaatttttctcaattcttttatcccacttggtgtttgtgatggtaggtaacactgtaagtaatacatattatttaaatattaattaatttatttcatgtatacagagtacagagacagagctagacttgaaatttaaagggccaaaaaattaaaattatggcgggccgaaattcgtggagagatgtttttattaggattatcgaaaaaatattcacaagcttttcactacaagaaaagagatttttgggaacaacacctacaaggcggacttaaatcaacacattggatggtttaaactgtcattcctaaaggttgaacaaatttatttgtattttaaggacaataagtcgtttctataattatctctaaaatatctaatgtgacagtcagtagtcccgtgatccgtaaggagaaacaccgggtaagctttgcaatcccacaccgcctggggaaggtcaagtgggagt

SEQ ID NO: 381958 - DNA, 2636 bp, Cannabis indica
gtgactctaatagccaaattgttacattcctactgttagagagcataaaatatgaaaaacataataacgcatattagacatatattatacacctaaaatttaataaaatttctaaaattgagaaattataattcaaatgcctatttatttaaaatagggcccacatacctaataaacatatgcaatcatataatacaatttattaatgctaattgtctactatttctatattctaatatgtggtcattacaatgtcagtaatatgatttttagatattctaatgctctcaaaaataaatccctgagaatcatctcaaggcctccaaaatggtctccaattaccataagttttgactagaactttttcttctcaataaaatttggcggttcataaacccaaagataaattttagggcttatgtccaaggtcagaataaacaatgctagtaatctaatttttagatattctaatgcccaaaaaaataaatctatatttgtaagctaaaatgatacccctacacatcccatcgtaggattaacagtatcaaaagtgtacattttataaggtatgtacgagttgagtagcttccacttttaattattaaaatacatgaaatttggagagcacgaacgaatcaggacatttaattccaaaactataaaggtctgtgccaacccctctatagtttcaagctacacctctcatggctcatgtggaagagatacaacatactcctccacaggggtaacaacactagctggttttccaacaaagtaaccttgatccttgataaatattttctctattctcgggatgataacgtcacttaatagagccttggtcttccaatccatgagtctaggtgacttccccaaggatatcatcttgtcaacttgttgggatcctccccccaaatgctcagaatgataatcatcgttcactttagcactttcaaacagttcttcaaaagaggttttggtatttttccgtataattaggatattctaatccacccacgggtccaaccttaattgagaagtctctgactacccccttgtgttgcctgagatggaattttggtttatccctaagggagtaaggtgtgaaatccagcttatgtttatttaatagcatggtgcactcgtcaacttcagaagatggttggaccccaatagcaataaaacaagcttttctgttattatttccaagagcccctatgtattttaattccttaacatattcatctttggcctagaaatttttttagagggccttgtcttcatctaagtgatcaaaaatatcctagctcgtaagagagatactagggtcacgacccacatacaaaataggcccgccacccacaatagctttagagtttccattggaattaattaataacataaatgggcccactttggatatagtgtgggagagttatgctcaacccattagcgttacttattaggataatcagcttaggcctacttgtaaacctttccaaatttaaacttactaaaggagctaattcatggatagcaccaagccttgatccgcaaatttttccttctctctcttctgcaacgatgagaataacaaattttgtcccgacctatctcccatagaaaccaaaaatttgggcacccacacagaccaacttacaccccttctttttggtaaaaatctccttattagagccttaccatcccttggaccatgggctttagaaacctgagggccatcagtcaacttctacacaagatatgacaccgtcgaaaaaaccaacagatgttctaaggtagtgactaaggtagacattggagcacgagtatgagtaaatcagggtggattttacatcgacaaacaattgtgaaactttgaggaggttgaaattcaaggcccaaagagtgggaatgagaagttatggccattatcaatcacatttagaatattttgaaagcattctcgtaaaatgtggccaaacttaccacaatggaaacacatatcctctagcttctcacatttgaactatatctaaatgtttcctttattttcaacctaaagaaagcaccctgagaataagggtttagaacatgcgatgtccaccatcactctaagccatttagaaaacacaagcagtttattgtctttgtaatcaatgtcaaccaccaatctcaccagtgaccctataatcctagcattaactgtggaaaagaattcttggagtaagttatggatctgaatccaaattgtgtagtcgtaaagtagagttcgttaatattcaattcagagacccaatccctagaattaattgctcaccattaatgtatcaaggtctattcatgaaaacccattctttgtctttaactttggcaaggccaaactggaaaatattcttgctaagcgcaggtgtagcgttcccgcttcaagcctctattgggcccttatgcccaaggaatgatgactcttatacacgagtacatcactctggttgcttcctggaaggacgactgaccttacaaactaacacaagtatttttagtgtgctttgtcctcactcgcatgcttcgtcggaaaaacttcccaggaggtcatccatcctaaaattatcccaagtcaagcacgcttaactgtagag

SEQ ID NO: 381959 - DNA, 2474 bp, Cannabis indica
tttaccaaacgacacctagtttacataacattatttttgtagagaatgaaaataaaaactcactgcaagacaagatcacaaaccataaaaatggctttttattttattttttttcaattttatttattaaatggaaaaaagacaacgaaagagtaggaattgacatttttcgtggtagttgtaaacttacttagacgggaaatctaaaacggtaaaaacggtaaagtgaaaggaacaataacgattgcggccttttcgtaatatttatcctctctaacactttccgtacaatccatataaaaatatttatttatgaacatcttgaaatatagacagagagagatatacattcaaatcaatctcaattctttttttgttttgtgtatgtcatatgttaatcatagcttgtgttgagagctaatacaatattattaatagcttgtgaattgagttcccataaacaagagcacactcaatctctttgcttttctccacaacagagggatttcccttaaatacaagacttttcttggcttcaagaatatactaacccctttctgtaagtctcctcttctttctttatatatattttccctcttttaaatgacctttttcttatctgggttctgttttcttttgttcctttttttatctgggtacttttcttttgctggttcttgatcctttttattctttttcgtatgccaaaatcaaattgtcacgtttgagatattttctttattgggtttccttcaaaattttatctttggtatttccactttcaatcataaacctttttgttgtttcataaaggagaaaatcttctttcctctccaaaatagaaaattaaatctcctttaatactatttcatcctttttattagtaccctttatttattttaattggttgacatatgacatgtacttcattatcattaatactttcatgcacttaaaattatcattaggtaactatctttcccttattgtattattccatatcaaatagttctatcatatacaaaatgaataatcagctatagatattggctcaacaggttttgacagctgaattagagaaagggagttttgagtttatattggtgtgaagatatgggagatcattttgtattgttggtagatcgattactcactgaatcaacattagaagctgcaattgagagcagaaaccgatcaatccaagcagccaagtctgcggcaaccgatgattcttctaagaaagtggactttggagacatatcatctccaagaaaattagtagaatgcaaaatatgccatgatgaagatagagattcaaacatggagacaccctgctcttgttctggcagcttgaaggtttgttaagctttttatattttatttatatatttacataaatatacatgtgtgtgtgtttgtgtttataatgtttggctagctaattttatcatttctacatctgggttctttttcaaaatgtgattatcatatatttttaatgagttttagaaaaacaattttgatttgccagttttgttgtgtaatgtttttcttaatgaaagaaccagtcagtcaaccaaaatcaaacaatgaattaatgtagaaaaaggaaaaatgtaccttcaatcatgactagagcctgtcaaacatggctgcaaatattaatataagcttaagttaataaattaatgggaatgaaaactcttctgctgtgggactacataaattatccatgtcactagttaatcgtccttttatgaaattttctagtgtttaattttcgctacagtttcactcgtgattctccaaatgagttaaaagccaaagtaaagaaagcatatcatatgtccattgacctattaaaatcactctcacatcccaaaatcaattattcaactacttttagcatccaacagcttatttattactcttctcactgtttgttggtccaaccaattaccaatttttcattctctaaataatgcattctttgaatctactagtagttttctctagatagatatggacacaggacattaaaccaagacaatggaccttggaccacaaactcaaaaaatttaacagggcttttgttgaatgaaataacaccacttacattaaaatggaagtaaattcaaattcaatgctattttacagtcaacttggcgcattgtaatctatgctgtaacgttaatttctcaattacccaattatctgaaaacatagagtacttgaaagcttaattcaactgtccatttcatattatatttctaatgatatttaactttacaagtaaagagttgtatgtgtttgcaataatgcctgagacgtatatgtgttccttgaatcatgcagtacgctcataggagttgtgtacagagatggtgcaacgagaagggtgacacaatttgcgagatatgccatcaggtgacctgtttttgtagattggaattcttttttgctttaaaataaaa

SEQ ID NO: 381960 - DNA, 2044 bp, Cannabis indica
aattttcctactactgctaggtgcagaagcctctgaattccactgcacatgggtgtgccaggattttaatcaagtacctagtatttagtaaagttttgatttttatacttgagaaacacaatagcctaaataaagcattcatttttaaaaagaaatctaggttatggaaaatattctagttatggcttaatcatactctaaagttttgggttacatgtatctaactagatttatgcagattaagttgattatatacgaaaaacaaatatattgctggcttcatttttaaatatttgttttttaagaaaaattatttattttattttcttttgttggggctatacccactaggtgtgggcatgttttgcattaattgtgtcggaaaagaaattttgtcttcactaagaatacatgatgggactgaatcctagatacaaagtatatttattaaccccatttcctccataaaaattatagacttataatatctagaaaaacattttcataattcatactatagggtaagagttgtacatatgtgactatttatgtgtgaatttttgtttactgctgcgatggtttattaagtgaccaccccataattgtatagtttttgttcaacataataataatagcctcctgtggcttttatttgtatattaaaaataaaaagctccacaacaaaatctgttatttcttgcacaaattgttatatatgatgattgctcagtcagtttgtagagcatattattatgaaatgtgaagttatatatatattgtgtctttatctgaataagatggcctaattattggaattcttttaagtgacacatttcaagaagtaacctgattgaagatcattgcacttttgaaaataaataattattataaagaatatttttttataaaaataaaaaatttatgttttccactaagagagacaaacccttttaagagggccaaaccaaaactgtgttatcattttcttggggttactatcagaatactagtactgtcacctgctttacaagcatgtaagagctgtcctataaggcgattttcccttctttcttctctattttcgttttctgggaaaatagggccatctaacatgtgcacttctttctctatatattaagtccaaaacgatttgttcatatatgtgtgtgtttgtgttacagcttcacatataaatatatttgaagatacagaaatatattttcatgatgacacgaagaaataataagattgcaaagaagacaaactcagctccaataatttgacccccaaattttgtcaacaccagaacccaaaacttcgatatggaaattaaaatttaaagcagccaatcaccttatccgaactttgcatggcctttattttctctcacgaattatatggcaatccctttagccacaacctcccaaagctagggcaatccctttaatcttctctcttttagataaggtatggaaaagattaaaaatattataaataaaagtactcttcatatatatatgtatccacaaattttgatgaacttatcaaggatatatatatagatatatatatatatatattcactacatatgacactatatgaaaaaatgggtcaacgtcaagaagagaaaagttattactgcctaactagctagataaatagatagctagaagctagtatatgaacaaatttcgaataagttcttcaaatgtgttaataacgacatcaaaacattacaaaaggtttcccttttaactgtgatgatatacattcctccatatttggagcttggaaaagcttaaatattcgaataagaaaataataatataattaatgggtagaaaaattatactataagataaatcgtaacatgggcacattaagaatacataggcaggtatttgcctaagggtaagttatcatctcgtcggtaagaagacaacaacttattgatagaatcatagaaaaaattgttggatgtttatattgaatatattgaccaatatatatatatatatattttaacaagataaatagttcaat

SEQ ID NO: 381961 - DNA, 900 bp, Cannabis indica
aaaaaggactttacaacatttatgaaagaatttattaattagggatttttattttatttaagtttctcctttaatgatgaagattcttataacactgattttgctcagtgaaagatgtttcggcgtgacttaaatttgaaatgggtatgagctaaattatcaaattgttttattagtatgtctccgtagttttatgttattaatgtaaatgatattcttttatttagatatactgtatttattttatttgtgagggtgaagatattatatatattatatatataatatcctaggtaagtgtatgtgtatctcattttcatatgccttgaattcggtagagaatttttacaaactagttttaaatgatttccaaaggataggacttactaagtccaatttaaattcaaggtatgatatggtttgaagttaaatattatgttttaatttgtaatgcttggctaaaattcttttataacagcttatctacgccaagttccccatcccatagtgttatgcattttataactctctaccgctccattaaggtatttaataagactatgtaagttctaaatagcaagcattttacaaatttttttcttgagtttacatcactctgtttttaatttaattttctttttcaaatgtttgactatatggatgttatttcatggctagagtagtttaggactttatttacataattaaagacttaagtgacaatacgattataacaggtcaattggttggtctattatgaacccttctacttgtattaattatttaatagtgtgatattaattcctattgatcttttgatctgtttcattgtaattcccattctcatgttaattctttcgcatcactcatgaaaaaccaagtttttacaaatgtcaataa

SEQ ID NO: 381962 - DNA, 1435 bp, Cannabis indica
atatatatatatataaacttcaaaccaacagcgttgtgggactggagcagctttcgtatctcgaagatcaagccattgacatcccgacaacccccatgcaccttctcaattaaattaatggcttgaagacagtcggactccaccgtaaatcgcatcagtcctctctggataccagctgaaataccatctaaaatggcttcaagttcaaccgtaagtggagtgacggcaccagaccgtggtgttacagtagcaaaaatactctgaccattctcattcctagtcactagccctcttcaatattttcccctcttttgtgaaaccacaacatccacattaatggtaagccaaccatcagcgggcttttgccaccaccgcctgcttttatcctgcttgtttgtactccccttgctattaccttcttggtaatctcttaagaaattgttactccattccaatatcatctgtaggttgacaaccaccatgattgacattgtttcgaatgaaccacatgtaccaacagatcactaagaataaattaaaagtttcctatgaccacacattgaacaaattttgaagaaagacaatgttatcattcacatcatacttcttaatatctgaccataactcgcatctcttccaaactctaacacccggagaacaaccccacaacatatgacccatatcttcattcttacctgaagaacagcatcgacacagaggactgaaagccaccttatgctgagaaagaacagcataagtcagaagccaagaatgacataccttccaaacaaaatgcttgacctttgggggaactttcaaacgccacatctcagtccaccatctttctgaatccactacattagaatggtgaagcttttcccttaatgcagcagcaactcggtatccgcttttgactgaatattcaccattatgactatagtgccacaaaatagtatcttccatctcccaatctccactaggaatactcagaatcagatctgcatcaactgaattaaacataccacggataaagtttatattccaagtaccatctgaattctttagatccaccacccgcatttgatcaggcataactagtttatcataaacctgaaaggtgactgacctaggtaaaaaagggtcctcaagcaccctaactttctctccctggccaattctccagcaatagcccttctgtatgatcttcttcccccacaccaagctacgccagacaaaggatgctttagacccacatttcgcatccaatacatccatcacgaacgtaactagcctttaaaactcgactacacaaagaattcgggaatcgaataatcgaatactaaattaatacttaaaactatgtatcatgctaacaaaattatatataccactattaaaatatgtatacatactaaaaaatttatatataatcatt

SEQ ID NO: 381963 - DNA, 2352 bp, Cannabis indica
ttcttagaaataaaatatatgtgatgagagagctctgtatatataaaaagcaaaaaaaaaaaaaaaaaagtggactcaaaatcctccaacgaaccttttcaaaaaaagattaaaaaaaaaaaatcctttgattgaatttatatttttttgcatgttgtgggggagttttgtggtaggtagtttaatttttcatatatagtttcaaaattttgatgatggtgttagttgcattcaataaatcttcaaattgaataaaaattagagattcaaaattattgccatttcttattttattccaaagtgtttaaaaagctacgtggcagtttgttatgtttttcgttttaattatttttagcactttctaactttttctttcaagtttctttacttttcttcttcttcaatcgcttcttctaacatgataactgtctttcttagtataattctagaaaaaaaaatttatgttctttcaagctttaacccctttgatggttcatcctcactagatgatactttgtttgcccttgtcctttcctctagagaaataaattccaagacctttagaattaagatgagggacttttgaaaagagaaatatcaagtaactataactcacagctgtattgggttatttaccactatctttggatgtttaaggggtaaaagaaaagttcttttgctggaactttcgtactttcagaatcaccatattgtattaggcacatcatctaaaatatgtatgtagaatccttgcatttctctcatttttgggtaaagctccatcgactttcctttctcagtaaatctagagccatggcaatttgggtcggcaatatggttggcaagtatcttgaagttgatgaggctcactgagtgagggttggagccttttcttaaggtttcaagtaatgattgatgtgtcaaaaccgttatcaagaggcacaatggccaagcttagagatactcgtgatgagttctggttggagtttcgttacgagaggctcctggagttttggtttgagtgtagtactatttgctatccttttgataactataaaatttttcttaaaaaaagtctacaatggtatagaacccactctcaattatggaccaactatggttggggctccattccctactttgtgctatgatcagtataggactgatttccataatggaagtgtttggcctctcatgacacgcttagccataaagtctttcactattgctattccacaccttgctataagacctttacccccataacctttgacagatggggaatcctcctctgctcctgttatgcagtcaccataccagtccgcttatggtatattcatcaacatgcttctatagtatttaacgtgaatggttctattttaggccctcttgataaagttctagagatgccttttccttcatattttccaacaccaatggcatcttcagacttggtctcatcacacaacttgtttgcaacatatcttccaaatgccacaactactatggagtttagttccacacatacattgtctacctctttaaccattccttttattactcaagcaactatagttatgttatcctgaatcctgtccagatgatgtgacatttttctttaggtgacacgtatcatgtgataagaattgacatattctaagtcaatcctttcttcctttacctcaatttcttttgttattttagggatattattctattgatatcttgtacataattttctgattttattctccttaattaattacttgtacaaaataacttccttgtaccactattcatttgctgtaaaatactcaatgaaacacatatcaaatatacctttttttacatggtatcagagctaccattcgatcctacttccactgccatattccttcacttgttcaacttccatggcttaccctacccattctccttctcaaatacccaacaccaccgaccctaccaaaccatatacctccctcaccatctataatgccattagactgactgccacaaactacctatcttggaaactccaaatagcaacattaatcctctgcttcctactcgttgacttccaggctagccaacatcgccatcctttaaaatttataggccaaaacctgctaccaagccactcaaaaattaaaatattttaagtattttaaatttaaattaatttttttttatataatatatctatataatttttatttttaaatatatataaatattataaaattaataaagaatattctgttaagagcatctccaagcacacactaaatttggtgttacactatcgccaaatttagcgtcaaaaaaatatttttactccaaccacaacac

SEQ ID NO: 381964 - DNA, 2329 bp, Cannabis indica
tattacaaaggccatcactttgagctgtcttcgacttaaatttttgtgtctcccataagaagacgctaaaagtctttttgtgtttatctaggtaagacacctaaagagtacttctaatatttttaaaatgaaatgtttttaatgtcttgccaaataagtaattaaattcctttttttggttgttataactcatcatacttatgttatgtactgtactatattctaatattatccgattgtaatttgtaacacgatctaaaaaaaattactccttttatattttccacttcgtatatagtatggctaatatttcatggttctgaatgaaacacgtttagttcatcctaaacaagtgttttttcatgtgctatccaaaatagattcttcttgttttaagatgttttggagtcaatataaagtacccaattcccagttctaatgaagaaagtcaacatcccagatataataataagcttaatatatacattaattgtaagtttcaacttgagggaacaaaacaaaaacaaagttttttttaatttcattttttcttcaaataatttgcagactgtattacatcataattataacactggtttattattaattatcatttatggaaataagcagtttggaaactcttttgcttaattgggaatcagatccacaagatttgagggagttgtgaagagtaacgactagtcattttcttgatgtacatctcaaaacaaaaaataccctttccatattattcccaatattattgagcacagtggttaataattatgtatttagtagttttttgtaataattattaaattaaaataataaatgtatgatacctcctctagatggtgttgggtggcactatgtaatgtttttttaacatttctctaaagcatatgcaacagtttaattatttgtctaagaatatatcagaataaaccacccaaaaataatgttcaattataacttcatatatagattcttgagtttaattccattactggtactatatatcttatatataattattccaataatgtgcatatataatataagtgtcctcatactgatgagaactatatactttaaagctaagtcttttcaacaagttatgttctgtcatctgtgttatagttcttggaattgattggtctatatcactatgtctataatgctaagctgaatagcatatatatatatgtataaatatatatatttgcttggatctttatcaacaacatactttatttgatgctatgtatattataagataagactgtgacatgatttgtcttgatgacttttttaatatgcacatatattagtctttccttaagctagagaagtagttaaatgagtttaaatacaaatacaaatactaaagaagattagttttactttaagttgaatgattaagacatgtgttggtgtttttcataaaaagcaattgagttgagctgatcacattggtttaatttgtctgtttattaattctcacttttcttttggtcctgttctttattgtaatggacactattaataagacaatacaatcttcaagatatctgactcatcaatgcatcactaccaattattttaattcccatgaagcttctgaaccacatctgctgtgtgctttcatcacactagctagctaacatacctttaattatatcaaagaaagagagagagatatgttgggttattaattatatgttttcttttcttttaaataatatattatagtatttaaaacttaaataaataaatattagaacagcaagattctgatttctgagaataagcacaagttggttctaaatgcacttctcctactgtacatttacatatcccactacatctacataagcaaccacaaaagatccttttgttacatgtacacacccacaagaagagatccttttatttggaaagaaaacataaatgatggacaacggtgtctaatactactataagatgtcatattgttatcggtaaaaaagtaataattattaaattttacatgttttgatttattgttggccccgctcttccaccttgactcttacattataatgatattgtctgttttaggctaagttcttacggttttgtttttgaatactttcctaaaaggcccatactaatagagaaggtgaaatacttatatctaacaacttttgtatattcttttaatgtgcaacttgggttaataccccaacaattaatatttattattgaatatgtcaactattttatttcatagtgcttcaaaatattattgatattgaatactattggtatttaataacaattagatact

SEQ ID NO: 381965 - DNA, 1015 bp, Cannabis indica
tatccattgtttcttatcataagtgaccttttagatcttgtcataacgataattcttctgtccgtgattttctctgcagttttaaggtttgtctgatcttactgagctagctagcttaagccatgcctgagcgtgctctgacccgtgtccacagcctccgagagaggttggatgagactctctctgctcacagaaacgaaattgtagctcttctttccaggtacttagttgtgttatgacccttgttgttattgtaaaagctcaataaatggaaccattaaaagaattatggatgatgttgtaggatcgaggccaaaggaaagggattccttcagccccaccagatcattgctgagtttgaagccatcccagaagtgaacaggaagaaacttttggatggagcttttggtgaagttctgagagccactcaggtaaaacttgttggatctttattactggaatcaagtttttttcttttttggttcttttgagtaaaagtttgaaacttttgtcaacccttttggtttctcaggaagccatatgcttacctccatgggttgctcttgctgtgcgcccaaggcctggtgtgtgggaatacattagagtgaacgtccatgctcttgttattgaagagttgcaggtttctgagtacttgcatttcaaggaagagcttgttgatggaaggtatgattttatcttcttttgatctaaaaaaggtttttccttttgatttgttatcctcttaatttataaaggttttttttcttttactgtgttcagcgccaatggcaactttgtgcttgaattggactttgagccattcaatgcctctttccctcgtccaactctttccaagtccattggaaatggtgtggagtttctcaatcgccacctttctgcaaaacttttccatgacaaggagagcatgcatcctcttctcgagttcctccgagttcactgctacaagggaaaggtaatacaaaatttctataaattgctgaagaaaatctatgaa

SEQ ID NO: 381966 - DNA, 1022 bp, Cannabis indica
gtcactgctactttccttctattctctttggcaacattcttcgaacagttccccactacaaatggtgtggctccttccaaaatctgggcttcttgagcataggaaacaggaacgttgtagagttcttgatcctgaaggtctttggataaatctgtggtcaatttttttagcttcccatatcctacatctccgtaatcttctacaattctgcatttccccctattaccatcatcattcctcctctgagtctcctcattatccatgtctcctgccttcgaattatagttcttggatgtggatattgatcccctttgtattagctgctgttcctggccttgcttgatgtctctgttcaccgtccctttcaaactcccgcttcgtgcatcttccaagatatttagagaaggagaagaggaagcagtagtagttcttccagtacttattggttattgttgcagagtgtcgtcaacaagtttgtttttccccactccttgtccatctccttgtatcctctctcgggcctcatttccaacctttaacaattttccatatgcacccgtgtcctcctttccttcctcttgaatcatagttgcgttttgatggcaatctttgtaactatgcccaattttcccgcacttaaaacacatgaacggtagttcttcgtacttgaaacttatccatttcttggtgcctttatagggaaggggaaagcctgggcaaactggtttatttaaggacatccatattctgaatctgaaaaacccgtctgcaaccatcttggaaacgtcggaattttgcaccgtaatcacctcccctgccttggccgccattcgaactgtgttgttgatagtcaataaatcgatcggaacatcccatgctcgaccccatattggaaagctggttaagtcatgtttccaagattcatttggaattctccattttccccaagattagccacccccattagataaataccatggcattttagataatattctgctttgaattgactcagatgcaaa

SEQ ID NO: 381967 - DNA, 2605 bp, Cannabis indica
tatatttttaataattatataaaagctactaatagaatgctaaaaaaaattcatcaagaaaaaaagtgtattacttaaaaaaaatcaaattcaatatgagtttaagttcacactcaaagtcatatcctgcccgtgccggcgccggcgccggcccggcaaagaaccaccgttgtgtatcaaaatcttgatagccacaatcaaattatggataatgttgggtgcaatgtcattgaggatggaagccatgtttctcctcccatttgatcccaccgtctccgtcgtcgtctccaccaccgctgtcgtccccgacttctcaaccaccgccatcaaagttcaagatttgaacgtcgggtttcaaactcataacgtaaacccgaaaaccatgtttttcgaagacattcatctcgcggtcaccgacaaccgcggtggccggaatctcacggtggcggccggcgatttggtgcctgagtttgagagcaagagtaaggaattcaatacgatgtcgtttagtcacagcaacatgacgttgcctattagtcattgggatttagaaaacgacaacactaccgttgtcgtttttggggtttcggaattgtagtttgagtttcgcggaaaggttagttactacgattttctcgtttggccgaataaagctagttttgaaacggtttgtgaaagggtaaaagtggaatttgagaagtcgatgaataaaacggcgtcgtttggggagtttggtataagctcatgcaagcctattcgttcgtggaatggaattcaatttatgatgtttctattcggcctgattattcatagtttttttattcttgtttcgtatttaatttcctcactttttgatcttaaatttttttaaatgagatttattgtgttcctattgttatttatttaggttcttattagttatttttgttaagacccacataatttaggttttcaataaaaatttctcttttaaaattacaatttgttttattaatatggaaaaatattatattttactctaaataagagcgaaaaaaatgaaagaaaaatataaaaaaaaattaagtggataattatcttatatatactgtttttctttcttaaaaattttcttgcacttatatactttaaaagctataaaaataaaaattctccaaaaaaaatgataactctgaaattaattgggctttaagtaataacaaaattattgggcatatttcaaaatatatattttaaaaaattactaaaaaaatttatgtacatttttaaaatgaatattttttatttttaagcactgaattggataggcttagcactaaatacactcaatgacaaattaaaccaagaactaagaaatctcaacataggacaacatctcacaatctaggagatcttaaaatatacaaattaggaagaaatagaaatattattacattgttattagattacgtttattttagtttaataactactataaaatttgttaaccataaaatgtgatatgataatgataataaacacccaccaatgttaattttgtaatcaaattaacatcttaactctcttgtatgagcaatgtcgcgttgcgatactctctaaaagctattatattaaactatatggaactcgatatttagttggaccaatagcgatactgacacataaaaggatgctaggcaccagtagtaccgtttagcatttctcctcttgtatatatgagctagcactacaacattaatcatcattggcagatgagtctaccgttaatgccacgctgctattggttagtattagtggcggactaagatttgccactaataattattaatagcggcgggtattagcagcgagactctgcctctaatacttatgttaaaattaatattaatcactattaacgatagatattagtagcgagtttatcactactaattaattttttttttaatatctaacaattttattttatttcatggcattaaaataaatttaaattaataaaaataatattattagcgacgagatctattaatgctttactgctagctaatagtattataattaattatttatatattattaatactattattagtaacagagttcgttgttaatgttttgttgctaataaaatttaaatcaaaataagcactaattttttcgctaataatatatatttttttaaattttgcacgttattagtagcgaactatgttgtccgtcgctaataattccactgtgccttattgctgtagtggctaaaacctacaaatctttatattatatattctaagttatgccaagttgtatatgattaatttgttctttattttaaataaatcaaaattatgaatataaagtaacttggtgattggattagatcaaaactacaaatttagttaggtataaattctaatatataacacttttatccgaccacttgcatctcaattctcaacatttgaatattttaatttatttattttttcctccaaaagaatataaaatagaggataactattagatataagcaggcccggccctgggcataggcgagctaggcctgtgcctagggcccacccagcccagggcccaaatttttttt

SEQ ID NO: 381968 - DNA, 2436 bp, Cannabis indica
atatgataatgaagaatttgaagattaatattaaaaaaagaaagaaaaaaaaacactttattaaaattgataaattaattataagccacaccaccacgtagattgactgacttagtagtagtactgatcaatcaatattattacttaataataataaatagtacaaacaaattaacaaacttagtctaattacgatgacattttcttctgcttcgttgtgatcatccgatgattcggctggaaagactttgtctcacttaggttgtattgtttggtgggaaagattgaaaacataacaatatataagaatgagaataacaatagagtaaaataaaatttaaagatgcataaagaaaattattaaatttaaaatttttcttattttattttaatatgaaattgtcaatctactaaaatagtggaaaatatttcaatagtactatacaaccaaacaaaaggattaatgaagtaaaaattaattgattcatttttattttattacttctaactaattttgtaaatataggttaaatttttttgacaatacgtgagtttgaaaagcatgagtacgacccgatatgaaaaaaatatgacactagatatatataacatgtatgatgttgtaaattggcacaatacgacatgataaataatcaaaaaacacgacacgtaaacatgaattgactaattaatttgatggcatgaaacttgaaagtacgacacgttaaaaagcttgataatttcataataattaatattataaattatgaaaatgatagtaaatattttaattttaaaaattataattattttttatatgattatgtaaaattattgtaaaaaattatataaaaataattaaagttaataaaaacacatataatttattagttagctcaataatcgtaataaaataacagtatgaaaatgagaagcatgtctatttgaaaaattaaaaaacagattaatctgaacaaagtataatacaaattctagcaaaatataaatatattaagcatatacaaagctgtgtcaacctatactctataagatacaagtacaataaattatggactgaattaacacgtcacgtaattattttcagctctagcctcaactaaaggtaatcttaatttaggcataatatttagagaattgttaaaaaatactattagtgtctagcaccctcctcaatataatacaactattggtgaatttgggttttgccgaggctcttggagtgaaagaggttcttagttgatcaataaagaactcaaacttctttaacattacggttgagacggatagccttgtcacgatccaagttcttcagagttgtattgaggagtgcaaggtcttctttctactttgaacaatgttaattttcgttttgttaaacgatctgtcaatcgtgttgttcatgcttttgctcgagcctcatggttatatgttgatcgtagttattcgggtacttctattccgagtaacatccttgatgtaattatacaagaaatactttaataaaatacgtcttttattaaaaaaaaaaaagtaatcgggtcctatataatttaagaatataatttttagaaaatatctctaattaatcgtgagacgccacctaccacgtactaatacctaataacaatgctctaaataattagttattcaccaaaaccataatataacaccattataatctatatataaagtataaataaactttcaaactagacttgacttgacttctcatcaacaaaatatatatttacttatttactatagatatattaggtcttcctcatgaccatacttatcacgacaacccatataataaacaactcacaccccatcacacacgttattattactaataaacttttcctgcaagtttgtattttcccaatatatatatgtaccccatttttatatattatagaaaaatcataccttcaaaatgaaaaaattataatcgttttaatttttatttatatatttaagtctttattttgctaatgttgtttattttatattaattgtctgcaaacactcctacattacaactatctaaaatatcaatgatcacaattatgtatacataatttataggaaaagacatttaattaattggttaaaattgagtaatgttcgtacgtacaatacaaatttgaaaagctaatagaacaattatgcatctctccaaaagatacatataaatacatgccagctaatctaaatcaagaaaaaaaaaagcactcaataaacatagaatttgtatacaattgtttgttaatttgaccatctattttattaaaagatattacaatcaaacaataattaatacttattactgaattatcaataacaatagataacataaaaataacactatgaaccatttgatcgagacaccattcaacacatgaggaagcatca

SEQ ID NO: 381969 - DNA, 4851 bp, Cannabis indica
ctcagcatcattctttgagctgaatttttcacaaatatacagttgcacttttgcagctttctcttctgatcctagctaagatcattcattacatcccacattagtaaaagttaaacgtacgtaggaaacacgacgcactacaagaaatgtcactttatcagcacagtagcatgctactgtcctggtaaaagtaacttttaccagcgcatttcgcaactgcattggcaaagaggtcaaagttttaccagcgtatatttgcagtggctaaaaatctaatttttaccagcgcatttacgcgttggaaaaagtcatttttgctagcactttttattttatgctggcaaaagttctaataccaacattgatttactaacctccttttgccaacacatcacaagtaaattctattttaccagcccaataccaatttttattgccagcacaaaaatgtgctggcaaaagtgacatttcttgtagtgacattagagaaggattatactccaattaactttagttaagttttaagttgaaactccgaactctctagaagcttttcctcatttttcattgttactaatttagccacaccttattgaaatagcaatattcatataataagctagcactaactaatgattataaatatatatataaacaagccaatcttcatgattaattgtctgtaaaggcataagtatattataaatttggaggaatttaacttattacgtgtttgatccatcaatatataatatcagttagaactttagttaggtgggaacgaataatagttattaaaaaactctctatctcaggataatataaatatatatatatatatagtaatttattagtaattattctatttttattattgggcattgctattaagcattaaggtatccaaacaccatacaaagatatggagcgttataagtgtttacaattaatagtttcttatgtcatgtattaaatcaaaatacctaaaacctaatattaaattgtactaacaacaactcttataataatgtttagcatactaaggctaaggtcccattagtatttcactttcttattatatatagtttaaacgagcatgattttcttacagcttaagtagagaataattaaacttgaatgatctttccacgaatctcccaacctgtacgccaagcctaatgcaataaaaaatatgatatctttaaagatgttcaatatttctcttaatactatagtaatatggaggaccaaaccataaggagtcgactcttgaccatggtcgtccaccaataatatatttatatccacatatattacttttacgtagttaatatgaatgttgagctggctaagggactaaaaagaaaagttaattagctatagtgtgatagttggacatcaataatgcatatttttcagtaatataaacaacttatctatatatatatagcaattccttttttataaacaatgaaaaagaaaaaaacgtgtatatatattatatatgtatgaatattttaatgccggctggcccatatggatatatggcatccaaagtatgtttggcttataaataggagagattacatgcactcaaatatatctcttctttgctataatatttctattaatttcgtttattattattctcattatttgtctacttcttcaataggagtaagttttctttctattttttttttcgctttgtatcatgggacgataatgtgtatatatatcactaattattattttgcttagtagctatttattctggtgtatatatatacgtacaatataaatttatgaatgcggttcattatatatacatttgcatgtgtttattagtttattatatatatatatatatgttgttacattttatcttttctataattatatataacccaataataataacaacaataatcccttgatgaatttgcagaaaacaattatatatatacatagattgtacgtgagaaacaaatataatggcggaagaacagttttctgaattggccaactatgaatgcagcgtcaagaagaatctagtgatcaccaggtaataattaattcttatctatactagctatatatatatgtatgtaaatataggtaacttcttaattagatgtattgtggacaatgtcccacatggaataaatggtagagaattgagccatatataagaacatggactactccactcattgccaattggttttgagatggaatcccatgattctcaacatggtattactattttctactgtttaaattttatttttgaacctacaaattatttcgtatgtctccaatatgtacaagattgctactataatttatattgaacctacaaattatttcgtatgtctccaatatgtacaagattgctactataatttataaatattgtcacataaaaattgagttataacttctctattaatagaagatactcccatacattacctctacttaaaacttttcctatgatataggttttgttttcttttgaacaatacattatatagtaatataacaattattgtataattataaatttattaattgaatagtgagaaggccaaaagggaaagtgaaagcgaaagtgaaagtgaagaagatgaaacctttggaaaagtgtgtcctgggcaagatctcaatgattgctttgatcccgttcagaaaattgtccatggatttaagcactttctctctaataaatttcagtaaggattaataaatatatacaacatattaaattgattatatatgtataattaatattaagatcattaaacgtttcaataataataatatattaaaataaaaatatgtgcctaattactttattttatgggatgaatttacagcaagtatccatgcatgtttaatgaacttaaagaaactcaacatccaaaggtatgtaaatatacccctaattaattatttttttgtgttaatatttgtgatctatatttgattgatcttataaatttttgatcaaatgaacagtttttggtgtttgcatgctcggattctcgagttagtccttcccatattttaaattttcaaccaggagaagctttcatggcccgcaatattggcaacttaattccaagttttaacaaagtaatttatttaataattaattattattagttattcatattttgaattatctaatcttaatgggttaattattaatttattatatttttaattaatctttgttattattattataatttcctagttgaaaggctctggagttggatcaattattgaatatgcagtagaagagcttaaggtagagaatattttagtgattgggcatagtcattgtggtggtgtaaagaggcttatgtctcatcctgaagatggttcagctcccttgtaagaatgaaacttttataattatttttactgttaatggtttattattatatatttatagtcatgtctatacttatcatagtgatttaactaattggtttgattattaaattatagcaacttcattgatgattgggttagcatagctcaagctgccaaggataaagtcatagttgaacacaagaatttgtcatttgaagaacaatgtgaaatatgtgctgaggtaataattatatctaattaattagcctatatatagtaatgatacataaatattcttagtaatagtaccctaatatattactattaaataattaattggatatgcaggaagcagtaaatgtgtctctaaagaatctacattcttatccatttgttcaaaggggagttgaagagaaaaagataacacttagaggtggatactatgattttgtagctggatctttcaagctatgggaacttgagtagtatcaagtattataatttcaaaccaaaaatttaacaccctttcaaaaataaaaagaaaactcaaatttaatattgcttttttcaaaatgttcaactttcataatgcacgtgtttaattgtttgttatatgatatttatattttgttgtttgcttcttatatatgtggacaaataaatacaagtgtgttttccatttcataatgtaatttattatccgacaagaaataagagaatcttttatgcttcatgtttttttaatttattattattttgtcaatttattttttattttttaatatatccttcccaataaaatccatgcagttttgatctaaatatataaaaaaaaatgtactcatcagtcataacatttttaataattttttatgaatggtgtacatcagtatttatataaattgacagactaaaacagaaaataacaaagtataacaaagcttttgtaacatgacctgtagtgatggtatttgccaagtggcaactagttctatgggctttattcttttgtagaaagcaatgtgttgagcaatttcataatcgtagtaaataactagcaatttttcatgttttaacaacctttaaatttaaaataaattactaaataaacgcttaaagaaatatatgaaatgttatcattgaaacgtacaaacagttgtagtaaaatctatatggcagcttaaaaatttactatttcatgtaagaattttttttttgattctcattttattgtttatgattcaatataaaatgaaataaccttttggaaccactcaacaatttaataaaataataataacataagtaattaatataagggtaaatatcattttggatcctgtattttacaaaagttactaattagaccctcagttttgttgaatgacaaaatagatcctatattttctaaaatggtaaaaataggaccctaaacttaatttttcacaattttattttttaatataa

SEQ ID NO: 381970 - DNA, 851 bp, Cannabis indica
caacaacaacgtaattctcaagcctttaattagtgaagtgggttttagtttactaagccatgaataaaaagattagttaatcttaatgcaaatatttttaaacttctcttttttgagaataaagagacataattatttctccatttacttttttgttccgtcttttgcagtcatattaagtcctttttctttgattccacagccgtttattaggactgaacttaggagttggaagagtttaatgtcaccaaatcttttctggtaaaaaagggattaaattcctggtatgtatttatttctgtataagtttttttattattttttgttagaggaatggtttaatagtttgaataggccagtgtgtacggctgctaaagctgcgaaaggaggatgcagcaccgtttgcatttcttgtgttactgttggaggggcccatttggtgttcagatgaacggcccatatgcgatgcgacttgacacgtcccaaagtacctactgcatatgattctatcagaaaaagctttgaaacacagcaaaagttatggccccaaaccacgtggctgatcacattcttattacttctcttaccgataccttgttcaatttgaaaactaactccatctcatttattacatattacacacaatgaagataaactgtatttttttttttaaatattgggagaggagaatagagcatctccaacccatatattaaatttagtgctataatattattaaatttagatgtccaaattttttttttttttttgaacagaaagccttcattcatcaaacataattacaaggaaatggcaagtcatgcctcacggcatgtcgagcacaagggggt

SEQ ID NO: 381971 - DNA, 795 bp, Cannabis indica
tttttttttttttggtttgctttagcagcttagctattgttggctttgtatgaataagtattaagtagtaaattgtatttatttttgtgtgtaatagaagaacaaatttcatattttaaaacaatacagttatatttattgtgagttgtctacatattacaaattttaacattatttaatgtctgtttttattgaaaatatgagtgggcgtttaatatatatattgacacgtgttaacttattctgttttaataggatttaacgaactggtaatgatgaaataataaatgtaatattaaatatttaatctgctagaaaaaaatatatgttatacaagtatatgcaatctaaaatattaattatttatatgcaaataccctcggttatatattaggtatttagtgatagaagtaacgaaaatattatttaaagtatttaatctataaaaaatatatataattgtatgaaataaaaaaaatataaaatatatatattgcaaatattcttatatttaaaaatcaaaactttcaacactaagccctctctcctctccttttttgataattaataacataaatgcaaaagagaattgaaatggctactaattaaaagataagtgatcataatacagagttaattatgtataaattaatgggaaatttacacccactactgattttttccattttatttcatttatactgtgccacgctggaaacaacatttatactgtttttttttttggcagtttactgccttgaaactttagccgtgtaaggggctggtcattgccac

SEQ ID NO: 381972 - DNA, 2376 bp, Cannabis indica
aaaaacctctttaatttggattctgcatgaaagaacccaattaagtccaaacaaaagggccaaggtctccgcttgtaatagagagatacttcctgaaaacataacaaaccagaaaacaccacaatgaaaaactatgagtagaagttaaagacaaaactaccacaagagacgcttgatatttagatttactgattataggaaaattacataattaaattgttactatttagcaaattttttacacatttacatttaatttatttttttttacatttttatagtgttcataaaaataatacaaaataacaagaaaattatataaaaataacatcaaaaaataatatacatatcacaaaaaaattaataacataataacaagtataaaacataaaaatacatcaaaagattgtattttatataaataaaattttaaaaaaatcgtaaaaaatatttaaaattatgtgcaattgtatttttttattttatgttttttttttttaaaataatctcttaattatatatattcattatgtgcagatacattggctgagaaaaggagtggaagattttatgtaccaagggatgagtgcttctcagagataaaacaattaacattttcagcaaaaacattatactcagtattacatgcattgtcaccttccttggccaatgtcatggctgataaagaccttggatttccttacctcacagccattgatgccctttttagcaaaggagttgatttgcctaccattggcactgaaggctttcttcggaaagtcatgccacgtgttgtcaagactatggactctggcaaagacgtcttgcgtttcgagccacctgaaactattaacagtacgtactaattaattaaattcaataaattaataaaatataaaaaatacgtcgtacatttactactacaaaattagtttttcccaacggttaataagggggccaattatgaaaaccgttggataaggtaagggaagatttttcccaacggtactgaagcaaagaaaccgttagaaaaaactaatgccagcagtggaaccgtcttttaaagttcagtatctttatgacacccacaaagacaacggttttaggaaccgttgggaaatagtataaaagacagttataaactattgagaaaaactaattttatagtagtgattaaaaattgttttcgggtttttgaagctccaaaaacatttttgtaactatataagttaccagtgaatttcagtttctaagtttaaaaagttcttttaacataagtctatttttctcaagaaaagttttataagaagctaaaattttcttattaattaattatatttttttaataaataattagatgtgaacttggtattaattgtttaattatggctttttcaggggataagctcttttggtttagggatgaagagtttgctaggcaaaccctagctgggctcaacccttgcagcatccgattgatcacagtacgtaattaatttatttatgtatcgaaaatattaaatagtgattaaaataagtaatgacaaatataaactattttaagttctaatttaataaatatttatacattaaaaaaaatacaatttatttatgtattaaaaatactgagtaaaattgtgcatgattattatgcaggaatggccaattaagagcaaacttgaccctgtgatttatggtccacaagaatcatcaatcactgaagagatgataaatcaagaaattggaggcatcatgaaagttgatgaggtaaattaattattaattataagaatatcatcatcattataataatatatatgtatgtatgagaaatgttaaaatgtatcatcagatcagtctcatattgttattagtataattaagtattattagatacgtacttttatgaaatactttttgcaaatggcaagatgctaacttttaaatagtactaaacatattatggttaaaaaattgtaatgcactattttttttgttattataaatacaggccataaaacagaagaagttgtttatattagactaccatgatttgttattaccatttgttcaccaagttagagagcttaaaggaacaactttatatggatcaaggacagtctttttcctaaacccagatggaactttgaggccattagccatcgagttaactcggccaccacatttggattcgcctcgttggaaccaagttttctcaccttgttggcattcaacgggagtttggctatggagactagctaaagttcatgtccttgcccatgattctggctatcatcaacttgtttgtcattggtatgcatatatgatctttaaattatttatgcattttaaattttattctatttcattcttatt

SEQ ID NO: 381973 - DNA, 961 bp, Cannabis indica
ttggttaaaattacttatacacatatatatataatttagtgtgtgtacatacataccagctcaagcaattttggagtttctataattagaatatagaagtagtatagttaagagtagtagaatagtgagtgtatggtaaggtacatgagaattcatctcaaaaccaattgacataatgagaggagtagcccgtgcatatttaatttcatcacattattaatgtagaactctctaacatgactaaagtaattttaggtatttcgaacgataaaattggacattttattaaaaaaaaattatcaattaaaaattcactaaatttagttttaaaataaatattacataaattctaaaatagataagttaaaaatcatatgtattaagatcacaaaattttattagattttttttaagtatatatttattcttatgacatataataaaatgatgataattaaagagtaagggcattttatataagagtcttatataatagcccaaactatgcactaattattactcttattaaaaattcccaaaaaaagtaaataattaaaacatcataaagtatagtatcatatgcatgcatggtgcacgaaaacaacagactctaaattgaattagcctcaagtggttctctaaattgaagatataaggatgtcatgatgtcccatcatgaacctggaaaggaaagatcatgtaatgaaatgtatacggtacctaccatcatccaatatataatattgtcagtgttattaaatattgaatcacatataattaatacaataattatttagaaatatagttatttagttacaagacgatacttttggaaagtactaagcattattggtgcccaataataatgctcataattaagcatagagtattgttaaacctaacaccacctaaaagtgacgtcttaaaattgtagtatatttgaatccacccaaacttctgg

SEQ ID NO: 381974 - DNA, 2591 bp, Cannabis indica
ttttttttttagatctgttgcatgttttctcatacttgccaagggacttgaacttttgggaacacagtagtaatattggttggaaagagtaagcattatgatattttattagagaaagagagagatatggtaatgactctagatggattgataattatttctgttgtgtgtttaaattacaggaaccaaagggcaagacctattattattgattcaggtttgtaccactcaaagaaatctggtatcttttgggctaaagagaagaggtctgtgcctgcttctttcaagttatacatgggtaatgcctctttcttcttgctttacactttcattcaactccaagtattttttaagtttacttggctttttggcaaaccctaccttaatgaaaagaaattgcagaggaaaagggtttggtgataatgagaatgaatctagcataaagtatattccttcctagttttcactgattatgtataccctgattgtttaaggaaacacacataagtgaataaatgtaaaacgcctttgttttcattccttttgtcaaacatggccttgaagtagtttacttagatattggatatatttagtcttactttatatttatttgaactgggaaacatctaaccctacaataattgagtactcagaactataccaattggtacccaagatagctttcaacagactttgtaggaggaaatcacctaattatttgagctatcccatattgagtacactccttttatttttagttcttcaaaatgttcgcaactttctttattagtagtgttttatttatttatttatttattttgggttctcccttctcaattatgagtcttgaaactacttcagcctatctcaaaatccttgttaattgctcctatgtaagagctccaacacatacatttttggaactatataggcctataattgttcaccagcacataaaataagtctgagcaccctccctgcataaggcccatctgtctcccactctttattaagaaagttataccaggtctgttgcttgcttattgtatagctactagtcccactacttttttgagttctatacagcctggtttagtcttattcctattttatcatactttttatatctggattagtttcccaaccttcaatatttgagaaacaaaaatttacagtaattgtcatatagatttccaccttttgatgcttattgggtagcattagcatatcatgataaatacaaccaattcatcatataccaccctttgatgcttttatggtggatttgaaatgaacttacatagcatcatcagaattggttgatggatctttaacacaaaagaaaatatgggccttacaggatcttcatgggtgatgctaacaagaccattccttgaattctgtgtttggggatgggacaaccttccccggactctacttatgtactacacaaactttctgtcttcaaccgaggggtacttccacacagtggtctgtaaccacaaggattttcagaacacaactgtgaatcatgacttgcattatacaaggtgggataatcctccgaagcaacatcctatgtctttgacagtcgagcatttcaatgacatggtcgaaagtggtgcgccttttgctggaacttttgccaaggatgattcggttcttgacaaaatagacaaggagcttttgaggagatcaagtaaccagtttactcctggtggttggtgtttggggaaatctggttcgcataaagatccttgtttagttcatggtggggaaaacccaaatgttgtcaaaccaactctaaattcaaagaggctagaaaaactcttactcaaacttcttcatcctgaaaatttcaggcttaagcaatgtaaatgaatcttttttttttccccttttcacatcaatttaatttattcattttgtaaaattttcaaccctcaatgtgggttatagacttacagtcatagtgttttttttttcgaaaattattatcatagagatgaatgtactccaagtagtcaattttttttttttttttttaaaattcaatgtttattgtccaaatacaaagataaatgcacgtgtaatataagaatagtaatttgggttatttttgctggtcgggtcagatcctggcccaacaggctgactggtccatatgattcgggttgttatcgggcttctgtttcgactcggcccgacacattttgttttggatcgggtcctactcgactcggtttcaaatatcaagatatatatatagggaagttgccggcccattcttcctcatgacatgaggaacttatttaaaccaattaaaagtaaaggaaataaaatgcacataaattatagggcattttacaaaaatactggatttggggtaatacttttcaattttactgccacacagcagaattaacatttatactgtccttccccttttttttttcttttatactgtcaataccaaaacaaaagtatgaggcctccatctttgacaatcacagacataaccaccacaacaacaccaagacaaccggaaaataaccattaattccgacaagattgaacaaaaacagtaaaat

SEQ ID NO: 381975 - DNA, 4332 bp, Cannabis indica
atcagagtgaaagttcttggtgactgccagtgactacgacaatggaatcaaaagtggttggattggattcgacatagtctaagctgaagttgatggacgcagcactggacagattggaaacagcaactacaaaagctgatgaggaaacttctctgagaagggagagatatttaaggaggaaatcatctagtaaactgggagacagtgtaaatcgaattttcaaggaagtctcaggattggcaactcaaagaaaggaacaaagctttgaattggcattggcggttccctaaagagaagcaatctatctctacagcataaaattataaaaagcaaataaaggttggaagaaaatggttgggatacaaagttggggaagagaatgtcttcaagaatccgttggaaggacacttggaagggtgttgcttctctttataacaagttctgcagttggtaaactttaaagttgataatggtaaaaacatttgcttttagtaagatacctggcttggtcgattttcttttgaagaggcactccctatcctagcaagattgtcgaagaggagaaacgattgtattactgctttttacattgaagagggatagaaaggaaattggaacctacatctagtgagacagttgaattattgagagatcttagaattaattgattaattcatagaatctgaaattataccagctttggaggacagggaatttggttgagggatttgtcataaatattttcatgtgttacatcttttatttggcttctgtgtttgcagaaacacaatgtccatgcctcttttcaagaaaggagaccctactttgtgctaactccagggaagagatgtgtatcatgtgctagaagaatgggggaaacagcaatcacctttttgcacggtgttttttttctctttgtttgtggtacagattccttaaggaattaaatattcagtggtgcatccctaacatttttagaggcctatttaattaccactgtatttgttataaaaaagccaagaaactgttatggagattgaggatagtctctactttggtggcaaatatgactggaaattaataaaagaatcttccaagaaattggagataatgcagatcagttgggacagaactaacattggctggcaacatggctttctaatgttaggaattttgaaaatgcttcgttgtctaactcaagtagagattgtatcaatttatgtaattctagttatggaggtttcgtttcccgtagggtctttttccttgcaatttcgcaattcattaatacgagctggggttttttcttatgacaaagtacatgatcaggttttgtttccacaagactaataataataaaaaaatatcatgattttgacatcatagtagtagttgatctcgtataggcatctagatagtttccgtagttcaaatataataaattgctaagaatacctcgtctccttttctaattcgttggccagcatttatcatcacctcaagcatgcgatctttaaaacgccaatggaaaaaacaatttggctggaatgaatggtttagcatatctgaaataaaacaaatatgtatataaaaaacataaaacaagtatatgtatataaaaacagagggattatgcaatgaaaggaacgagagagagagagagagaacgaaagggaaataggagtatcaatccacaaaagagattaaagaacaaaaaaaagaaattaagtcaaaaaattaatagaaacaggaaatctttaaatgtttgccaaaagtcgccctaacataaaatgtaaacacttatgagatgggaaatagctgttccggttaaagaatagtaatgattactgaacttcaactaatacattttataaaaatcatagatcattgaaacttggaaattgtaaactccagaatatgtcgactcaaagaaaaaaaaatctcttatgcaaaactcacaccaaagtatctggttttgcttttgtatctcaactcaccaagataatatatcccagccactgctgaagaagcaatgcaagaacctaagtggagggcagcaacttatgaagaattttaggctcaagagaggaatgtgacttgggagattactaaccttccacctgggaaacacagtaggtgcacatggatttttttcagttatacacaaagcacatggaagagtggggcaatacaaagctcggatagttctaaaggattcactcactcacacaccacttgcaaaattaacaatgtcaggtcttcttatctattttcgtgaacctagattggctcttattttcaacttaatatgaagagaatgctttcttgaatggagatcttgaagaagtatacatagatattcctctcgactttgaaataaatctaatgttagtaaggcatgaaaactcgggaaaccttggtatgacctaaaaagtctccatgtgcttggtttgagaaattcactcaaatactcaagaatgataaatatcattagtgccaatctgataacacatagtttgtttagaacacttgagatactttcctggcatggcgacgactaggtcaagtaaaggaattctaatttcaataaggaaatatgttctagattgtcttcaaaagactgctatgcttgggtgtaatcaagactgataaatataatcagtgccaatctgattacacgtagtttgtgaagagcacttgagatactttcctagcgtggcgacgactaggtcaagtaaaggaattctaatttcaataaggaataatgttctagattgtcttcaaagaatgctaaacttgggtgtaagcaagacatgaaaacttgggaaatcttggtatgacctgaaacagtctccacgtgcttggtttgagaaattcactcaaatactcatgaatgataaatatcattgtagaaaatagtgaataaattgtatattttgttcaatataatagtatgtatttatatacaaaattagagtagaataaataaaaaactaaataaattagagagactaaatatgacactaactaaatacaattaatatagttaatatattctaacactccccctcaagctggagcataaatattaatcatgtccagtatgttacaaaaataatcaactcgcacctcattcaaaacctatttcttaatttttctccaatcttcacatatcctgtggagatcaagtcttgttgaattttttcacgaacaaaatgacaatcaatctcaatgtatttagttcactcatggaacacagaatttaaggcaatatgaagagtagcttgattatcacaccacaattttgctggaactgaagttttaaactcgaattcaatcaaaaactcataagtccaactatctcacatacaaattgtgtcatagctctatattttgattctgcactggatctagacattttgcttcttactcttccaagagagcagattgcccccaacaaatacactaacttgaattggatcgtctatctcccttggagcctgcccaatctgcatcaaagaaacactcaatctgagtgtgtccattatccttgtaaacaatacctcatgctcctttcaagtaacacaaaatttgctataatgctgcctaatgatgaattgttggagaagacataaactaactaacaacactaacagagaatgcaatatatggacgagtcacaattagataattcaactttccaaccaatttgcgttatttctcaagatcttcaaatggttctccatcatgtgtaagatgcacagttggaatcattgaagtactacaaggttttgctcccaatttttctgtctcagttaacaaatcaagtacatacgtcttttgagatagaaaataacttgtttactccgagtaacttcaactcccaagaaatagttgagcacccctaaatacttagtgtgaaactaagtatgaatgaaaaacttgagggatgagatacctccagtatcatttccaataataacgatgtcatccacttacacaactaacaaaatgataccaacaattgatcttttatagaaaacaaaatgatctaacttacttttcaacaaaccaaatttctctacagcctaactaaatttactaaaccaagcacaaggactttgtttcaatccatataaagatttgcaaagacgacaaattcgcgcctccccctgagcaacaaacccagaaggttgcttcagcaaaccagatttctcaacagcctaactaaatttactaaactaagcacgaggactttgtttcaatccacataaagatttgcaaagacgacaaattcgcggctccccctgagcaacaaacccaggaggttgc

SEQ ID NO: 381976 - DNA, 5246 bp, Cannabis indica
cttgttgatgtttactcactacattgtttgtgaacattaggtttatcaagcacaggagaaagaagcggcaatgattgcgaggaagacgtatgctctactggatgcagatgacgaagatgatgatgacaatcgtggtgctgctagtggagttgtttctgttgattctgctaatgaaagaggagcaacattccgtaacaaaaggtttaggaagaaggctgatgttcaagatgacgatgacgatgctgaggttgagtttttcagatttgtcagatatgctcattattttttgtagctcgttgcaaatgatgtttggtctaaaatgatacttctcttttgactgaatggtgtgatgtccaggacatagcacagagggaaaatcagagactagttaaaagacgagcaaactcagatgaagacgatgattccgaggtattttgttattcatatgtgtggtcacttgaggctggctcaagtggttaggtgtttgagtgtgtttgggagcaggaggggttcagtccctgttatatataaatataaatataaatttgcaggctcttgtagaaacattggtatcctatctttcttgcatcatagttttcactatagtaattttagaatttctaattagtactggactaggcagtgtatatctgatttaatctatggatacaatgtttcagtgatagttgagatttgcacctggtggtcttcatttcatggctactcgtgcttagtacctctcattaatgttatgattccatgatgttacataccagtctttttgaaatgttatgaaaacatttgacatcttgttttctgcatctttctactaattctactggtaaagtaaatagatgttgtttttctgttgtaattttttctattatgctaagttaggtatgtatttataatgtcatgcagtcagaagaaatgttacgtgatcagaaagagagagagaaactagagagaaatctaaaagaacgagatgcagcagccacccgcaaggtatgtaacttcggatttctcattcaagctgttgatatcagaaatattgaattgctgacgctcatttttgctttagcctaagcttagatgttttaaatttgcttctcataaaaatatttctttgataaatgttgatggtaaatcaatgttagttgctttaacaataaatggtggttctatggcctgtgctgggctttactatttcaagtaataaatttactatttcatttccgtcactatttctagtgagattgaaatcagaatgttgtcttgatctaagttgctaatttttgttttttccctccctctttttgatggaaacagctaacggagccaaagttatcaaaaaaggatgaaggtaagaaataatagggagttttgcataattgttgctgcatgcattttaagacttgtccatctgtatttcagggcataaatggcagtgtgtttacaactaaattgcattttgttatacacacactcatatgtattcataatatatttggcttaagttggctaatcatgatgtctgttatgtttcacagaggaggctattcgaaggtctaatgctttggaggaagatgatcttgatactttaaggtttgttattgtacatccagttttttttttatttttttatttttttttattttactgaattatagttttatttaacttgcttatttatttttatgagctattttacaggtaccttgtgatttaacttgttttgttttgttattttattttttatgatttattgtactagttattttaactaaatatttcataatgctttcttgatttctcgccctcattccagaaaattttcaagacaagaatatttgaagaaaagagaacaaaagaaactagaggaaatcaggtatggaaatattgcaagtttcagatgcaaatatgtttctcttatgaattcctcttgttaattgattgcattggcttattccaatttcgtgtttgtgcatcagagattatatagaagatgagcagtatctatttgacaatgtgaaggtgactgaagtagaaagtcgtgaatttaggtaatttattttatttcctttaactatccattgtaaccaagcatatgaatggttttccttctgcttggtacatgtaaagacctgtgaaatgtttgtggcatctgctcatgagcctttgctcaattcattcatttgtttatttttctttgtaaatttatacatgcatacaacacgtacacaagcattgaaggtgacctcattatagctttatcggcttaatttttccataggtataagaaggaaatatatgagcttgtgaagaagcagtcagagacaattgatgatataaacgaggtaattaagaactttttcaagccatggtagacatcctctagtaatttgttcattttttatactgtatttttttaggccattttcttagactgacccctggttatgtattgaaaacctcacttgtggcagaggaataccttgttaaacattcaaaacaaggaaaataatgacatagaagaaatctagccttagagtctaatacatcagtgtttcactccctactcaagtctagaaaagataaattctcacaatgtttggatcttagacccactatactgtccaaaatttgattctcccaaagaacctgcgccgaactttcaattcctttgaatattctgctatttctttcaatcatattgcccaaatcatagccatattgcaatcctccagagtataacccttcgtttgcctcccactggttcggtcatcaaagcttgagacaccaatcgacgcaagacccaaactagctcaaattccttgtacaaggaagaccagattttttgagtgtaattacattccatgaataaatgttcaatggattcacaggttctaactgatctgccatctctggtatcagtgctaaaactccagtcattatggagtccctgatcgtcaaatggatcagaaaggcttttccagccaaaaccactggggtaatgaccttgtttctttctaaaaccagtggggtttcggtgctttccatgttccaaagggccatggaacccccttgtatgcatataaatgtttctcagaaagaggagagagtatttttttttttttaaaattacaatgtttatgtacttattcagttgattgtagttctcatgtagttgatctttcagtgtcttcattttcttttttgaagtctaattttgtaatgggctagttttgattcatgttttcttcatattgataaatttatgcccatcacattttcagctgtttatgcccttatctatatttatgctcctaatagctcagaagatcataaacttactcttctagatttcctctatgaaaaacagtacaggatgccagatgcctatgatgatcaggatggtggcgttaaccaggaaaaaagattttctgttgctgtgcaacgctataggtcagcattctagcagcaatgcatggagatgtttacattgtcacattttttcccttcgcatgtgtaatttgaaccgcaactatgataagctcacatactgaaaaccttttgtatgacttttattgatatttacaatatgcttgtcaggcatattagtttataatcaagaaatgcatttatgtataatgtgaaccatttcttcttttttgtgtatagagacccaactgctggggacaaaatgaacccttttgcagaacaggaagcctgggaagaacatcaaattggtgaaatattgctgaagttttaagattcttctattataagctggctccaattatgattttagttatttattttgagttcattattgtaggcaaggcaacattgaaatttggttcaaaaaacaaaaaacaaacgactgatgactatcagtaagtttattctcttagttttgcttcttttcattttgaggaaaacaaaattattgtagatgcatgtgattgaaatttgaagctacctttgtttatgctagcatgttctgtatgtaataattcataatatttaacttttaggtttgtgtttgaggaccagattgattttatcaaggcctcagtgatggatggcgatgaggtataaatttgataagtttctgttgggttatttgctttgaactgattttctttaacacgttaggggttttagtttcatacttgtttgctgaggccaatgtcttattcatttgtcacttttttgtgcagtttactgttgaacatgatgatttacatgagaagtcaatggcacaatcagccttcgagaagctgcaggtagaattttttagtggcactctacaaatacttaatgttgtgatttgtcttcttccttttcaaagactcagttaagttatttactttgcttaggaagaaatatcatgaagaaaatgtgtaaatttcttgatattagataatttaggtatgaaataactcgagaattatgttacattaaaagatatttatttcagttgcagatgctatggaacactatgatccatgttctttgtctttctttagtttcactactagtactttatttattgctctgccactggatagttgtatctgaaatttgaatggcagagtagaagattatattttaaattgtataatgctacctgttttctcattcaggaggagaggaaaactttgcccatgtatcaatatcatgatcagttgctccaagctattaatgatcatcaggttttctttcaattttattctgaatatgatcttgttttaatatgcttgaaaccttgactatgagcaaatttcttgattttgtcctttgcaaacatcattcaaccctgaaatttgaataattttttgagaaacttatctatgaaggtataattatcctcttatgttatagaataattggcttgtaggttctagtcattgttggtgaaaccggctcaggaaagaccacacaaatacctcaatatcttcatgaagctggatacacaaaacgtggaaaggtttagttttcttacgttatagtgttatgttttcttaaataacttcagttttaatgactacatttagggtctgtttggcacaacttttggaaaagttaaaactgttttttaaaaaaagtgtgataaaaaggtgtttggcaagcggttaaaaaacaacttattataaaatttatggaaaagctacagctaaaagctaaagctggtacaactaaacttttaaaaaaagttattttaattaaaagactaataaatt

SEQ ID NO: 381977 - DNA, 1390 bp, Cannabis indica
gatttgccgatggagcaatatttatgccataactaaatatattattatacatagatttatatatctaatgatgaggatgcaccggtacctatattaaatattaaagcaatattatccaattagatcataattgcaagcctttttaattaattaaggtacttgctgaaagcaacaaacaaattaaacaaaatggtcgactcacttccaaatatattaattctaaacttctgattttctttggatgaggagattgcaaattaagatcttaaacaataggcaattgaaaaagagacattaattccatttaatattctatatagagatatcaattaagtgctaaatgtataataagattctcatatatatgcattaaatagtttaatataaaaagaagtgatatatttagcattaattaatgcatcgatctcatttgcgaaaacgactgcaaattgattctctttactttaagtacattttagtacgagaaatgctaaaggacactactggtgcctagcaccctcctacgtgtcaatatcgctattggtgcaattaagtagtatcgggtcccatatagtttaatataataatttttatggagtatcgctaactaattgcaagtcgacacatctagaaggtgctaggcaccactggtgcccaatagcaatgctcttttagtactatcatatatctactactataccaatttagttagtaagaataattaaggggaagttttaggtagaacatttttttttatatatatataaacatagtaagaacaggatatattatcaattataattgatcatgtttgtaagtttaattgtaatttattaagccttaaattactatttcattcaacataatatttgaaactcaagccaaaccgttattgcttgctataacaattaacaacacagtcactaacaatccaggctcatcacataatccttcagccaacgtggcctcacgcgctccatcttgttacgctccaatctctcctgatatcttcttcttcagcttgtaatcccctctttggtagctgagtaagtttatctcatccaattgggcaatctctctttcccaagtagacattccctcttgtattactttggagtccaatttaattgggcctgtcacttgggccttgtttaatgggattatttcacaaatacacaaaaacaacaaaaacattacaaaaatacaattttacggaattttaaatatttttacaattttttttgattttatttacagaaaatacggtctttttatgttgtactcttgttaatttgttgttgattttttaatatatgtatgttattttttgttgttgttttgattgttatttagatgttatttttttgttatttttatgttgttttcttgt

SEQ ID NO: 381978 - DNA, 1427 bp, Cannabis indica
ggttattcataggagagatatattatttaatgcatctttgtttagagttagaaacagtgttttggccttactgattgctcttgtactgttttggagtttaaccattcttgtagagatgagtgagaaggttaaccagttaggagacatgtctacctgacgttgattgatggctttgtaaattggcaaaatacatgaaattaagtggggccagcatgtttctgtatatttgtgaaagaatataaatatatatatatatatatatatatatatatattaaaaaagaaaaggaaatgtctgtttgagtgggaaatgcatgaccagccactaaataaaatgactggtctattatcacttatcacattacctttatcttttggtgtatttttgcctaattgtgatgcacgagtagaaaatacacatatatttataatattttgtcactcatctcattatttgaaagttgaaatagtacaatattacgataggttttttattttctttcttgaactattgtctattagaattttggcccttgaatttttgaatgtagcaaaatatttttctgaaccatcggaactaatattggtaagtttaatgctgaaagaacttatcaataaaaacactatcacagaactcaaagaaaacaatgaatttctaaaggcttgcaaaagttgcaagacttggaatgaaaagcttcatttttaggcagattattacagagtagttaggagttgaaaacagaaacgtttaactaattaattactgtttctaacataatgttcgttacaaagatcctaactaagacctatgattatgaactaatagatgtatcaaatgctaatattcaactttggctaattttagctagttaaatgaattatcatatatgcttatgatctgtaactgcatgagcaaatcgttcagaaaattaactggatacatcataagcaaattttttatagttgctatactttgggagaattttttcatgcaaaaaagtaagaatctataaggcaagaaaaaaaattatttgccattaccaatattattttaggcaattctagtttatattgttatgtgagataatttagagtaaaaattattttagatgttgcgttttgcagaagttaataatttaataatattttttgttaaatgacaatttaaactctatgagactgtttgattatgttttcagtttttagacatgtgttttcaaaagtgtgaatagaaaataattttttgttggcacaagttttttaaaactaattttagatttttttctcactaaaaaaatcaatattctacaccataccatgacatgaagccatcttaccctggacccgactcaaacttggacccttgttgcgaaaattattaattactacgcaagtgcacgcaatcaagtagtatactcacgcaagtga

SEQ ID NO: 381979 - DNA, 2591 bp, Cannabis indica
aaaaaaaaaataataaataacgggagccaaatgaagctccccttatcattatcttggaaggatgcttttctagcaatgcaaaataatcacacgtgtccttatccgtgtggcttatcggataacttattacagcccaacatcacttcaggcttcatgccaataataaataaaaaaaagtgtaaggttatgcaaattttataatattaaattacaacatatgccttttcaaaaaaaaaaaaattacaaacataacgtaagattcacgtctcattcaaatatttaatattttctcttgtagttaattgcattaattaacaacgtcaaccgacgcaaaaactcttattttattagtaaataaagactaagtgaaatataactttcaataattcaggatgacaaatcaatatcccttttttttttttttgaggtacaatatttcaaaagttatataggagtagtgatagaaatttaactcatagggatggtatacttgcctcgattgaggcaaaaattactcgccttaatgggtaacggggcaagggtggagtgccattttatatgcctgaagtgggttcggggtgggattgagggtgatactacccaccccatattcgacccatatatatagtttccaaactttttatataattttcttctaattattacgcttcctagaagaaagatcaaagagtacattgaagggacttctcgaataggaaaggcaacatttggagtcgactatccaaaatttccttctaagaggaacaactagccatctgaataattcctttccggaggaaggctagcttccctgaagactccttccaggtgggcacgatatacatttgggaatgcccttttggatgacatctatcatatcacgagacttcttccggatggtcaagttagacttccaagaaagccctttcagaagacatctaacttttcataaccaggacaacttttggagatctttttatttgaaaaaactataccacataaactaaataaataagaaaaagaaaaaggtaaaaggaaacccttaggttgagtttggttggaagtaataaaataaaagtaaataaaaaatgtggaatatagggcctagggttttctctctaggaattgtggttttgctttattgcgaacctgattccctgtgctccctcttcagccacgactcactgacattttcttgggcttgggtgtggtcatggtcggaggggttgtgccattcgagatggtctttgaaggtatttttttcttcattgtgtttccaaatctagagggtcgctctttggtttagtttctctcttcattcgtgttctagtggcttctatgatggtgagatggtcgtttgtctcactaggttttgcttgagtgttgcagatgtgttggtttaattgtcagagatctccttttgtctggtgggttattctaaatttggctgcagtggtggtgggatggaggtgatggtgggtcggttgatggggaggggttatggtttgttagcctcttgactgggtcgagttggtgcagggtgggtgttggagggtcgttagagttacgatcaaaggggttgggaccagttctgaattggtttgggtatatggtagtgaagatttgaagattagatccattgatctatggtctcttatgtgtatttttttattttatgcaattatttttatttgttttttttattttgattatggtcttaataatgatgttgctacaccacctgttagattaatgaagttagctattattctcagggaagttgtttgtgaatcttattaagttttcgatatgtttcatcaacttactcaagttgcttttgcgaggtagccatagactctcttctggggtgtcaaatccgaaaggttgtcaaaattttattggttccgtaccctatgatattctactctctggtgtggatcgtattgtgtgcagttggtcgtatgtcaattatcatttatttgggattgaataacgggtttgttattgcccaacttttgttgggagatatttggctaatagccatggataggtattgttcatcagattttcatttggtttggaaatttagtttacttcatactcattggatgctcgttggtggcttattagacctttaattagagttgttagaattttttttcatttttatttaaacggcagatgattttgttcaagtgttattttgatgtaatggacattgttcgatttacctataaataaaaatttgcgtgattattcacttttttctttttatatattatatatatatatatattgtataattatatggtgtaatctttttttttttcacattttttatatatctgtaacatttatataacaaatctttttagtttttatgttatttaacaatccattgtaatattttgatgtattcgattaatgcgtaaaataacaactcgacaactattttaactagaatttcgatggcatcatctagaaaatcaacgataacaatattgaataggacttgtggttggactataatcattaaccacatatatatatatactagtaaaaagttacgtgcgatgcacgtatactaaatt

SEQ ID NO: 381980 - DNA, 2751 bp, Cannabis indica
gattttaaaaatctctttttacatgttttaagcattgttttgttttatgtatgtgattttcagggtgggaaaaacttctctgatgaaccagtatcttttacataagaataataataataacaaaggaagttgtcttttaagtctggttggattccttcactatttattttcgttttggaagatattaattcatcttctttggttagttaatgaattctattaacaacatgtcaatataagcaggaaatatgatctaaaagggagttgttacttccacttgcatttgtagaatgttatgttggtaataataatattgcccagaaagtataaagttgcgttttggaatataggtaggagacttaagacttttctggtatagaaagtgacaaagggatgagatttggtgattttgatggctattgtttaataattgaaaggctatgattataaaaagtatatttccgcttgatgccaatattgattagttgtttatgattataaaaatattttctccagtttgatgaacttttagtccataaaataaaactcatctgaagtgttttttttttttttttggatccaaatccacttcttgtcttgttttgtcaattgataataaaaataaaatttaaaagggccatctgaatcaggtgtcattcagaaaatatatctctgtcaatcaagttgatcttaactactttattagatatgtatataagaagttcagtcaacaatataaacctacaattggtgctgatttcatgacaaaggagttacagcttgatgacaagttggtgaccttgcaagtgagtgaatattactacatttgtatactaaaaacattgcatgatgtttttctttgttcacttcatttgtgttttctcttgtaactgtcagatttgggacacagcaggacaggaaaggtttcaaagcctcggttctgcgttttatagaggagcagattgttgtgttcttgtatttgatataaatattcttaggacatttgagacattgcacaactggcatgatgaatttcttaaacaggtctgttaagatatgtgaagatgtgaagttgtatttactatataaaagaaatttctctgctagtttggttcataaatttatactggtcttgtttctaacacttcattactgattttcaggccgatccaacacgccctgaaatctttccttttgtgttagttggaaacaaggtggacttggatggtggacatagccgaatggtacacatgagatttttctagtcctttttctagtattgaactgataaaatctaaattttcattgacataatgatgattgatgagcaggtgtctgaaaagaaagctagggaatggtgtgcttcaaagggtaacataccatactttgagacgtcggccaaggaggattacaatcttgatgacgtgtttctttgtgctgcgaaaatttctctagacaatgaacaagaacaagacatgtaagccaatttttacaaacaagtgcaactttttctttttctacatcagttctactatccaaagatcatattttttgttgacaaattagaatttttacaccctgaactttaacatgtaccaaatcatgtctcttgaacttttttgaccgttaaaaattctttctgaacacaatctcaatagttcaggggaaattttaaccgtcttcaaagtttaggcggtatgatttagtacatgtcaaagttgggggtaaaaattctaattagtcttttttgtttttattgcctcaaaaacataggagatgaacacaaatttgtactattttttattattattattttctcttttctaaattgttatagttcaacttggtgtacttctttctaaccagcttttctacctctatctaatgttgcagttactgccaaggtatctcagaaaccatctcagatgtagaacaaagcagaggttgttcatgctaaataatacgctgactaataagtaataactggatctatctatccatctaatttggactatttctttgtaaatttgttgtgatttattcattctttcctggatgggactaagttcttgattacttcttttaactacaatccgtcgaatagacgataagtttgattttccctacatggaaagcaaggtgatgatccagtttgtggaaaacaccaaccatgttcaaagactcaataagccataaaattgtattcccttgcatggataatgctatgcagatttggatttgtgcttcttcttttcttttccttttctaatttttttctctattattccttttgatttcattttatgaaatgtctttaatgtatgagtatgcctctatagaatactggtaaacagatccaaagatccaaatccagtacaataaaattaataagaattgttttttttttcccttttgaataaatatgtattttgtcttctgaactttgttactaggaagatcgtgttaaatatttcccttaattttaaacgttagtaatttatgaggcacatgttatcgtatcttcaagatttcattaaacacattaatgtggcattacatcatggatacattttattttactgtacatgttttgtttttgaaagccattttactatacatgttgatgtgtccaacaccatatcattgattatgtggcaaaaataattgaaaagaaaaaaaatagatattaatgaaatcagaaacaaataaaaatgaaactaaacacctaattattataaaaataaaaaaaaa

SEQ ID NO: 381981 - DNA, 2323 bp, Cannabis indica
actaagtgtttaggcttactctcttgaatgaggataccgcttggttctcccttggattattgttaatcaaaatagactgatgaaaatagtatgaagggatggtatgaagacaccccgagtgaccaaacacctggtggcgcaggggtatgctgccaccaaatatttggtggcgacgagggtttggcttttggttccttttgaccttatgtattttcttggaacagattatcaagatttgttgaagggacaaaagagtgtgttgtctaacatgcttaacccatgaccaagatcctttgaggtcccctcaccttggtggggcagggatggtggccctaggctagtggcgcaagggtctattaccaccagccttgcgccactaggtattgtcaccaaggtgagggagctattgcatgttctcatctttgtttcctttgggacttgtcatttctgacattccataaaaagttaggatatttagatagagaatgaagagacagtgtctaagatcctcgggaggccgtccctaaaattttctcctctcacattggtggtgtagggatggtggccctaggctagtggcgtatgggttcgctgcaacctaccttgcatcaccaggtgtggccaccatggtgggcagtcatttgatcaaacacttgttatttgaggcattttctgtccatctaaaataggcccatacactcatttacacccctaaaagtacccccaaaacacccatgtttgcaatcctccaagcactgatgttttcactcttttagacacattcccgtatgtcttcaagactcttcccacatgtcttgcaaagctggtggcacatgtcttgcgccaccatctggtctgtgtttgtaaataattcgtcagtaagtattttgaccataacgttctcaatatgacttagaattggacaattcaagatattttggaaagttgagaacgagatctacaacttttatgtttatgacccgatgtaattctaaatgtaacattgtctaaatccactaacaagttctaactaatcacccaatctttccaacattactcgtgttcatcgaactccactagaaatactttaaatgattccaaacacatgattggactcttaaaaccctcgtaaagtggtgtcttcttggtttgggactactccaattgggataactttgaaattacaccttgtgaaatttcggtcttaacatcctttttcttatccattgcttcacttttaaaagggaaaatggttgcttgctcatttcttaaaggtcctaaggatgaacatttgggctcaaaattgggcgtacttggtacacctattcgatcctaacgtgaactcagtacacctatgcaatactctaaacatttaagaaaatagggttcgagtgccacccaaatgagatttaggtgggtatcaaatttccatttttcaaatatcaaatatccggtgacaccaacccagtacataacgttttttaatacatacatataacataactaacataacctaagcccaaaccacaagactagctgccactcgtaccctctcctcctcctccttcttcatcatctttttattcttcatctacccctctccctacaatttcttcttcttcatgtactcctcccattgtaactttttcattcttcttcttcgtgtatctatctccttgtccttgcaacaacttattctttttaaagttatatataaaattatatatatactacatatgtatactcatacaatatattctatgtacaatatatatatatgtgtgtaaaatatttaaaccttgatttgatttatttatttatttaaaaaatatttttgggttccacacccaatacactatctcaaatggtacccaaaactcaaacccagtacctaaaacagtcgggattggtaagcattttcctacaccccaaactcgaacctaaaaaatccaaacctagtgcaccgacccgaatgtgcatccttagtagagtcacatggtgtcttttaccatcatttttgtctcaaacaagcaaggtctatatatttatataaatatatatatatatatatatgtttctgccaaatcttctattttgtaaataggtattcacaaattatccaatccaatccacaccatctaatccattcaaattagtaaagttgcagatcaaatatttattcatatacatccgtaactgatccaatctaatccacatatgtaatatttaaacaataataaatatatattgatatttaaagtaaaaaatattagtaatttaaaaaatcaatacatagtacatatattttcaaattttaatatat

SEQ ID NO: 381982 - DNA, 2532 bp, Cannabis indica
cttaacaagaaaatcaagtacatgagtcttcttgttaaataaaaggcaaaaacttttgtcttcagtacctagtttaataagataacagtcagaaattccagtcgtgggcttttgggtccaccccatgtactatttgcagcaataatgaaaatttgaagggaattacaattttttttttaattgcagtttatttaacttggatgctatagtccaaaaaaaagttgatgcataaagtacactgcaaaagattaaagcagtagtgtacaatttacctccatacatatgtatactatattttatattttatatgtgaggtgtcttcaatacagatcttaaaacctctggcaggggcgctaggcccgggcgctaggcccgcgcctagcgtctactaattttaggagcctttaataatttttaaaaatattatttatttttataataagaattttaaatttttttttttaccaataacttatttcaactcaaaaccaatcctcgcccaccctaaataattgataattacttactgtacctaaagaaggcacagtccaagatttaagaagctaattattgtcttaataaaaaagatataataagattgtgtgtgtatgaatcctcttaaataggttgtgatgtgtcatcactcatcaatgttcttatattgcccaacagttatgattacaacaagcagcttagttggtattgacctttcaaatattctgttgactggtcaacttgcaagtctcttaattaatcaagtgattaataatttgggtttggagttcgacaagccttaatactttgatattgtttgtttcgttgttgttatctttcatgtagacacacacaccaaaaaaatataaacaaaaaaaaattgacactaaaccaaaatcaaagagggacatattagtcttcctcacaaattctaagaatcatcttaaaggctttatgtgaccaaataccaaattaactaaaggccatttccatttgcctgctctttcatcctaaaaaattgatgattaatgataaatttctaatttatgtgagatgtttttatttcttatttgtttttgaaagacgtgagatattaaattttggacattgttatagcaccgatgactttaatatttgtacaaatttttaaattttaaacattgctattaagtatcagtggtgcctaacaccttctcgacatatcgcgttgcgattagctagcgatacttcctaaaaactattatattaaattatataagacccgatatttaattggaccaataacaatattaacacataagaggatgttagacatcactagtaccttttaacatttctcaacatttctcttacattttctatcttgctcatcataaccaaatttcgcttattgatatagaatcagtcgtactgtacacaaattaaatttataaagcttactgaaaatagtaaatttagatgacatatatcattttttaactcacattttaggcaaaatatcaaatcccttagcattattattagttctccagaaatatttacacacaaaatatactttattaatgaatacgtctcatcttagttaaatgtggttggttgaaaaatattattacttaataaagtataatattttggtgcatatattattactcattattattcatttttaattttccatccaaatcactattgggctaagccatagttttacatcatggtgtattttatagcacctagatcatatttttaatttattctttaaatatctcattaatttttttccctttattttcccttttttttgacaaaactaaataattttattccaaactgagcaatatagaataacaaactatagcaaacgctacaactcacaacctcacttgccttttacaacatctaaaaatatttatcaccaattttagaattcctacaagtaacacccatcacccatcacacatcacactgtacttaaccattttcctaatctccctactgatgtaatcaatagagtaacaagctaactcaaacgaacaccaattcctataatttcagataaagtacaatattgcaatatgaactacattcaaaatttaatgtttcagatcaaataatatttgtgatcacaattatagaagaaatttgtgtttaggcactattaaagaattccaaataactttgtgataattgatctgatttttgaccatactgttattatataaccagttagtcttaaaccggccagttgtacttgctttaagaatcttagttctcaaaaatttcttcctcaaatgacataatttgcgccaataccaactagaatctggtttaagatcataagtctagaagctcactgatttcagatagatgttatctattcatttaacctagagaaggtcttgctttgttgaaatcgcccaaatatacttagcaagaatagactggttccacttgactccacttttaaagccaaggcctttgtaagccttcagaaggcaaattgaaacaccctaactaacataggcgtattacgtgatt

SEQ ID NO: 381983 - DNA, 4240 bp, Cannabis indica
atatagtttatttaaaataatatttaatttctattttattataaatcatgtgttaaatgtatattaaatcaattaatatatattttaaataatatatataaaattataaatgtattttaaagtatataactataattagattaacataatgataattggatcagtttagtcggttatccattagatcggatgtccgatccgattagatttttaaaatttacatccgatttaatccaattatgattggatgttcgattctattaaattagttgaaattgaattgatcagatataatagaatttgatgattttgtgcacacctctaatttttgttataatatattattatttaatattaaaaaattatataatttaattcttatatatatttttttaaaaaaataatatataataaatatatttttataatttttattagttaatttattatatttaattattttattaaaagttttaagatgtttttgcattttagccctacaaacaacctcagttgcttgcttaccggccctgtctaatacttgaaattagagcccaactctgaactcttttcaggctatttcttcttttagtttcaattaattacaaaaccacccgccatagccgaaaacttgtatgaatcgtctgactcacctgggcatccgcttcaactctctccactcggacaccctattcgccaccttctccaccgtcgctctctgtcatccccgtcctcctactctaaaccgcgtcaccttttcgcctctctcgcaattatcaacccttcgcaaattctcaaatccaccttcctccatatccgtcgaacgtcctcgatctgacctcatacggtcgtcgatggattcacagtcaccggaaattgatgcgccggagggcgaggactttgtccgcatcgaaggcgctactgctgaggatttatcggaaagcattgttcgcgttgatgaacccagggagaacgtagctctaacgagctcccccccggctccaattgaggataattcggagcaaagaaatgttcttcccgaagagctatcgaggagtgtggtggtgctccagtgtgaatcttcggcagagggtggcgtttgcgatgtgtacctggtcggaactgcgcacgtttcaatggtaatctgttgaataacaaaaattgaatttttaaaaaagggaagaaatctatgtaggcaatttgttatctttgcgaattttaagatttaattgggcaataacggatgtgaatttgatggcttggggttgattctttgtgtcgttgcaggaatcttgcagagaggtagaagctgttatcagttatttgaaaccagaagtgagtactttaccgtttcttgatgatttgattattcggcatgattatgagaattttcatgtttgtgtctttgattgtaggttgtcttcttggagctgtgctcgagcagggtggcggtgcttacccctcagaatttgaaggtctgtcttcatcgtttttgttttgtacgaaatatcagttctttttggagttttgttcgtgtaaacttttccaatgaaagaatggtgttgtttattgctttaaatcgtgtataggcacgatcttctttccaagattactttgaaaactggatgtgttcaaatgactttttaaaatgaaacctgcttgctttgtaatgtttaggctgacttatgtttcctcaatagactatagttctgccactattttgttctacgtagcttattttgcacactgtaaatttttgatcttcaaattgcatatattctcacttcatttatccagataccaacaatgggagaaatggtagatttgtggaagaaaaatcacaacctttttggaatactatacagttggtttctcgccaaggtatgcctccacatctcaattagagttttagtttatctatttgatatatatgcgattattagatatttagaatactattaataatttcatgcataataattctcttctttgatttctgaaggttgctaataagttggaagttttccctggtactgagtttcgtgtggcatatgaagaagctatgaagtatggtggtagggtgatacttggtgatcgtccagtgcaggtatacatttttcctaacctaccctgtggctaccatattattctgctgaagtaacattaacataccatgtggctgccatattatttctgctgaagtaacatttagagagacgtggcctactttataagtatctatacgtgacatcttcatattcaaattacttttaccatccttttgattgagggaacttaagagttccatcatgcatgaaagctttataggatttcaaactagcagagtgcgagatttattaatgtagatagtactgtttgatttgctaccccaatcaagatattgtaattccttgtgagttttagagttaagaccaggtgtactcttagcgtcttagacatttaagtcggtcataataattttatttcccttgaaaatgaccatgttccccctcccttcctttttgatgatagctcatatccaatcatttcttttgtttcttatcctcattctgtcaacattttatgtgatcacaaagagactgttagtaatggcttgatatttgccaagcagattacactacgaaggacatggtggaaaatgccacgttggcataagattaagctgatctatgctatgctttttcaagcagtctttttaccaagttctgatgaacttaataaaatggtgagcttagatttcctgtcaatttatctttgaatctaaggattttattctgagtactttttttttttttagtttaaaaactagacttgtatcttattttgcttacatatggatgcttctaattttgtcttgcttaccttcagctaaaagaaatggatgatgttgacatgctgactcttgtcattcaagagatgagtaaggcgtttcccactctgatggagactcttgtacatgagagagaccagttagtattctctttctttccattaatattcaacaagaaccttttgctgcattctttgacaatgttgacaacctaatttatccatacatcaaatacaccaggggtagacatccacctgtctgtgtttgctttaaggatatctaatggatcttcttttcttgtgtctgctgtggtgccacagtctaaagtgaaagacaatttacatataaaacattaagagagttctttactcattatactaccttatttatgaaaagacgtgtagcatttattcttggatcatattctagaactacttatgttttattcatttgttaaatggttgcttatttcaggtacatgtcgttaaaattactaggaattgccagagagcgcagctcagtagtagcagttgttggaaaggggcacctgcaaggaattaaaaagcattggcagcagcctgttgtggtaagtgatcccttcatcttcctagttagctcatcagtcatcattgtcacaatatattgaaacctttcatgtataaaatacatggtcatgtcatccattattggtcagaaactagaaagtagaaatagtagacagattcatctctttctcagacgccatctaacatagttggtatctgtttgtaactttgagacgtgttgtgttgtgttcactttacgttgcactgatcaattgtctgtccccatttcgcagttgaaggatcttatggaacttcccacgaaaaaggaaactgcttcaggtggacgggtacttaaaacttttggttgtgcagttgttggggcagccattatatcgggcatctatcttgcatgcaagaaatgaataccgagtctctttgtgcaagaagaggttttctcaattccaaatacatgtgaattcttttaattggttacaaatgtgcgtaagagaagatgcttttgaccggggtagagaaacttaaaccataagaacttagcgtagaaatgtaattgcttccaagttccctacattcttttatattctggaattgttgttacttccttccgaaaaatgtaattgatgaatgaaaaaaaaaacaatagttttcctgtttatatatgatttaggatatacaagttactggtatttgaattactacgtactattctttttctaaaaaagaaaaatatctactaccattggaactagccttaacactacttagatgatatcttagaaagtgttatatgattgatgttttttagtgttatcatattttattttta

SEQ ID NO: 381984 - DNA, 2373 bp, Cannabis indica
ccatatactcttgaatccaatagagtggcagaacaaataaattatcctttaaaggagataatgaatgacatattattaagttctagattaccacaaaacatgtggggtgaagctattttgtgaactaattatcttttgtataagattccccaaaagaaagagcaaaagataccatatgaattatggaaaggtagacaacctctatacaaatacttaaaagtctaggggtgtttgctaaggtgattgcaccattgccaaagagaatgaaaataggtccaaaaacagtacgattgtattttcatatcctatgcaaaaaatagcaaagcatatggatttgttgtacatgagtctaaaaaccaaaacattacctaagaatacgataatagaattaaaggactgcatcattctttgaacatgtatttccttgcaaagataatgtggttaagccaaacgaacatctaaaatgatgaatgattgaaggtactttaatgattgggcaaaattttctaatttatattatagaagcagaacctcaagcatataaagaagttagcgagctctactgaaggtacctttcggaaggaaaccataaggagtgaaatcgattccatcttgcaaaatcatacttaagaactgattgacctttctcctggatgtaaatctttaggttctgagtggattttcaaaagaaaaatgaaaatagatggaataattgataagtacaacgtccgattgataataaaaagttagaaacaataagaaggccatgactaatttgatacttattctttggtgacgatactaaattctatcaggatgattttggcaattgttgcattgtgaaatctagaagtccttccaatggatgaaaatactttctttctaaatcgagatctttatgaagaaatatacatggaaaaacctaagggttttgtagtttcaggaaaagaataaaaatttgcaaacttgttaagtcaatgtaaggacttaaggaagcaccaaagtaatggcatgaaaaaattgtgtcatgatgacaaatgagtttggcaaatgtgtgtatatcaaaactacaaacaagggatacatcattctatgtttgtatgtagatgacatactcattgttagaagcaatcaaggaatggttaaatctaccaaaataatgttaaactcaagttttgacatgaaggttatgggactagcagatgtaattttagggataaaaattataaggacactaaatggacttaatttgagtcagtcacactatgtggacaagacacttgaaaaattcggtaaagatgattctagaatttccagaacaccaatcgatacaagtcaacatctatcctagaacaatggtgaaagtgtgtcacaagtagaatatgctagagtcataggaagtctaatgtacttgatgagttgtactcgaccattgcctatattattactttaagtcaattcataagtaatacaagtgttgaacactagatagcaattgcaagggtaaggtacttacgatatactcgtaactatgggctaaactacaccacagatctatctatgctttaaggatacactaatgcaagcttgatatctgatattcataactcaaaaggtactagtggatatgtcttcactctaggtgatgcagtggtttcatgaaaatcttcgaaacaaactataatcactagatctaaaattgaattcgagtttgttgctctggataagtgtagagaagaggtagaatggctcgtaatttgctggaagatattctagattgacctatacatgtgcctgaaatatgtatatattgtgataatcaagaaaaaattagaagagcaaagaaagttctacatgacaataagtcaagacatatatgtcgacgacataatatcattagacaattgatctcaactggagttatctcagttgactatgtgaagttaaatgataatattgtggatcatctaacgaaagggttaaattaaatcaagttaaaaagacatcagaaggaatgggacttaagccgagaagaaattaaggtagatatatagaaaaatccaacctagttgacgggagatcccaagatctagattcaatgcaacaacctaattatataaaccttctaaaatcacagtgagggactaaccctacccatattgttgatgaacagtgatttttgttgtggaaaaaggataagcattaagcttttaatgacccttatacgtgaaaagtccgaacggagcaatgcgggatttttcttaattaagcaatcacatatgtgacagagaagtgggaccactttgaaggagaattgtgggggcaagattcgctaaaacctctcgcaaaactaggcagatgttcatggccaaa

SEQ ID NO: 381985 - DNA, 2392 bp, Cannabis indica
aataattacttatattatcacttaaaaaaataaacaatcatgcacaaagcacaaatatgagaaaaatagtaacataagtttcctctcatataaaaacaaagagaaatcttcattgaggaaaataaaatgaaaaaaaggaaaagtgaaaatgagataaatttatatagagattaattagagagaagagttccttaaaaaaaattagagaggaaggaagagagagaccgagagagtggtgttatgatgcggaccgtggtccgtggtatactggtattaactaaataaataaaaaaaaaattatttttttttttttggaggaaataagaaataaaaaaatatatattgataggtagcagtttaatatttttagtttcccctccactcctaacgtcaaatctctgcaaaaatttccagtaaacaacaaacaaaccctaataaacttgtcacctccaatcgaacccctaacaaaaccctaccctaactcacacgttggggtttctaggttttagctttattcatttcgtttctcgattgaatttctaatttttacttaggaattcagcacgtctctgtaattcattcatttgcatattggacacttttgtttgttttttccccttgggttggatttcaggatagggttgacatttgaattggtgttgtgggtttgttgtttctgacgaacaagagagaaactgtgtagagagagcttgagagagagagatagagagagccatggaaggcataccgcacccaatacctcgaactgtggaggaagtcttcagcgatttcaaaggcagacgctcaggcttgattaaagccctaactaatggtttcttttccatctttctttatatgttttctctctgctctatctatctttccttttctccctttctcttatattgggtatgtatcaattatactgtttcttgttataattttatctttttcaaattttatttttctatgcagatgtcgaaaagttttaccagcagtgcgatcccggtgggttagctcttttccttcaaatgttgtttggagagttgtatttgtttccaatttcgccaaaattttttatattttcctaatttagtttttgtatggtgctactggtgggtatagacaacaatgggtgaattaactttgtcaccctttttactaccgatagtaattgagattttttttttggaagtcattttagtcttcatacatggtggttttccacaaaactatttgcaagttggtttgtttgtagctgtgaaattgatagagtattttggcttagtaatttgttgagttaatagaatgataggagaaatagtttgcttgcttgtttcctgggtcctatactttgtagatgagccacacgaggttgtaggaaacctactctggttattatgtctagttttgctttggctctcttcttttttttttttttctctctgtgtaattgacttgtttggtctgtttataatactacttttagtaggaaaattgtcgcttttaattttttatttgaaactaaaaatgaattttgttattcattctattttctaattctaactgcactattgaatgtgaatcacgtaagattgagctactgccatcatctttacaacacttattctatattctaattctaaccgcactcttgaatgttcatctgctttctttagtgttaactttggagtctttcgacacaacacaccatgcagtcttaaattttagaacaagtaacagaataacaatatagattactgaatattcaatatatttttctaacacccattctcagttttggtagctcggtacttcttttacgattttgagataattgtatataaagagaagtgttctgtcttttatttgtatctaaatgtttgatggtttgaactttgaggtctatttgaatgttatggtgaaagcaattaactgagattctgtttccttcaaagatatgttaaataatatttttaagttagattttattggatgttggtacttgtacactttcatgttaaaatttatctgttgatgatttagacgggaaaaaattatgtcatcgttacttattacatttgttctcctacgcgtttgagttgaaaagacattcaaagtagcgttaaacttgactttcctagttttgatatttctaatgattgtgctctacagagaaggaaaatttgtgtttgtatggacttccaaatgagacatgggaagtcaacctacctgttgaagaggtgcctcctgagcttcctgaaccggccctaggtataaactttgcgagggatgggatgcaagagaaggactggttgtcattggttgcagttcacagcgactcatggttgcttgctgttgcgttttattttggtgcccgctttggttttgg

SEQ ID NO: 381986 - DNA, 1069 bp, Cannabis indica
tttaacggccaaaaaaattcaatgagtatgatttggtagatgtcgaagttcgggagaaaaaaatctgccaaaaatctatatttgtggatatgtttatgggaaaattattcatagactttgagtattttcatagacttagagagattctgatacgtacattattggtacgtacatagattcctgtccctatcgttgatccgaaatatcatacttcgttggcccccactccaattatgtatattggggacgtggaagagtactaacgtttcatttcttcacaaatgaaataaacactaaaagaaaattattattccacgtgatatagtcatccagggttatgtatatttttttgatgaaaccgtacgtactacgtgcgtgtataatttctttgtatattcggatcacgagtgtgcctagacgttcatgttcggttaacttttaatttataatttttatttttgttttttcttttatattaacgaaaaatatcttctagaaacaagtttagatctaatgaataccaaaattagctttgaccttttgttgatatgatcatgaggccagctccgctgctaaaggacataaacttattaggttccacagctgtacgcataaattgatattattaggaagattagattgagacaaaagaaaaagaaacgcatacgagtatgactttgtgccacgtcgtcacaagccactttgccaattcctttctgtacgttttacaccacgtacggatatttgttatgcttaaattaaataagccttatatagttacacacaacatatattcacaagaaaaatgactctgcatataattaataatttattgctagtaactttgtttatatctgagttgtacaccacacatgttaacacttttcatgtctttgaaaattaccaggtggcaagtgttaggagatgatgatgggatacaatatggccctttccctgtacccaaacaaggcttgcctatgaaagtaactccaaagatgatcaataagaagaagaatgtgacctgaaccaaaacaagccaccaagggtcctcaacgtacgaatttttttt

SEQ ID NO: 381987 - DNA, 2052 bp, Cannabis indica
tggattcgggttcattcatttaaggattaaataagttttgaaatgaacatatggctaattgctagtgacatcctataactttccaccgagtgatgaatcatgatgcataattgaactaactaggtaccttgttgtcaaaaccagaagtaataatctcctcctcaacagcagcaaaacatttgatttgagagttttccttcctctgtaactttccactatatccagtgcctggaatccattttactattagaccatcataactactggacagtataacttttggattgtttttcagaacagataatgaagtaatgttcttcatgtgcccagatagacacagaggggctttatcgatatcagttgctgagaatatgctaattgttcctccgagtgaaacaacaacgaggtgatcgttctgccataggcacccaactagcatgtcatctacaccacctgagccaggacaagttaatgttcttttcacttttccatttccatcctcagatacatcccataccttagcagatttatcagcagatgcagtcaaaacctgaaaaaacaataaggagattacatgaaatccatcagaaaaataggggaagaaagataaacagcttctataataaaaggaaaagaaaagaaacaaacacaactaataaagcaatagattccacataacaaattgaaaacatacttcattttcatgaaaaataagtcttaaattccatcacccacccttatgtatcaagtttataaggatatacaaaactcgctaggaagagctttcctattaaacatgagatacataattaataataacaataaaaaagaaacaaatatatagtgatcaagtactagagagcttcaatgtaaacctgccaaactttctccataataatttagtcatacaactttctagcatttaaagagtttattttattataaaattttcaccaaattctctaatttcatacgtttatgttgcaagtttcagtagtaaaaagctttgacacttttcgtaaagaattttggagtacacgagacactgtgattcttcaactgtgttaaatccaacactgtgcttacctgtttcccatcaggactccagctaacagcataaatgcttcctttatgtccatcttccgaggagagctctccaattttctctccggtctttccatcaaagagaatacctttcttgtcagagctcacactaatgaacttgctcccatctggagaatacctcaaacaattgacaaaattcgaatgatctctgcaaccaatagggaaaagacttcattttagtagccagtttagtgataaagaaacaaacacgggtataaagaatttattatcacaatccaaacagtcacttggaatgggggaaaaattattggaccagatttgcagatatgagctgcggctgatctgatctcaacccagcctatgtatagggcctgtacacacagatcattataccgcaggctttgatcagaactcataccagcttaatatgaaaatgatgataaaatttagttcatgcttcaaaaaaaaaaaagccttaaatcttgttcaaactcatgaccaacacagtgaatggagttgagagcaaatataattagaaaactgcagaataggatagacatcaagtttgtcagcctgacatgaaaccattacaacaccgaagcttatgagatttcatgactgaacattaagccagaagtttgctgtactaacctgttagattgcttaaatttgaatggcggtccttcataaaagttaaccaaaaagtcctctccacatgtggcaatacggaatggccgtgttggcttaaatgcacagctcagaactctccttgaatggccatcaaactcacccacatttgttcctgaatcccacctattcaaaaacattataaattgccacaattattcttgacctctagacaaagacaaaaatgtacatcagttatgagaaaagcacataacaaatatcaagcaataatattgaaaacatgagaccagtgtcctaatgatctatcacaaattccat

SEQ ID NO: 381988 - DNA, 1249 bp, Cannabis indica
cattaaaaataaaagatattggaaggcctcttagactgagggaccatgggcaaccgctttaggtgccctattataaagacgaccctactttgacatgtactaaatgaagcttctcgaaattttcaagtcgctaaaaattcttttaaatttatgtctaatttcgttcaattttactgacgcaatgattatccatctaccaaattatgtccataattttgatatttacaaaaacatgccccactttcacatctatcaaatcgttacccttaaagtttaattcaagttagacattgttttagccaaaaacagtcctaattttttgtgtaagtcctttctttttcaatttctaatcctccccgatttttacgtagtctatttcttatttatatggtatgtcctttgattgcatggatgatttgtccttgacctattcttctcttgacgcgtgtcctttctctcagcttaccctggtttgccacgcgtctaattgttaggtagtggatgctatttttgtctcttttggtccgactgtattgtatcttttcttcaggttgtttgtctcgcctttttgggtcgtggcctctcttcccttgaaactcctttttactactcgtggtgaatggaggaatctcaatgtcaacctttattttggtgcctctttccgacggaggtatttatttgtcgtattctaagaattttctgttctatgccgcccaatacttcttaggaagtgagttttccgtcagtgagttagatagaagatcctcttttgagtctctttcgaatctatcaatcgtttggtcttcctccgtcggtccgaggcaataggctttaaaccctcttttttttttcatcgaattttcgtgggcacctatacgtcttcttggtttttcttattgttacttttttcggggaatgatccttattttgtctttcttgcgtttgtcgtttgtgctttttatttgcttttatcttttgggttttcaactgggccatctagtattgggtctttcttattttcgctaattatttgggttttgagcttttgggcatttactttatttgggccttcacactttttacgttttattgggcctttattttttctgttcgtaatttcccccctaaatgacgtccgatgtaaacttagacaaaagtcacatttaagggtataacttaatacatatttaaatttaagggataaaaaattctatttagccttatattattattattattattattatta

SEQ ID NO: 381989 - DNA, 3673 bp, Cannabis indica
ccaaacaactaacaatacaaataagaagtaaaaattaaaaaaaaaaaaaaaaaaaaaaaaaaaccccaagaagtgaagggaacaacattgcataaatcaatcatccttattaaagatgcaacagtgaggggtaattttgcctacttggctaatgtgatcctagacagtcaggggctgattatggaggccctatcagagagagttgaagttgaatccctcctaatggcagaagccatggccctatgctttgcagtctctctggcggtttctcgcaattgagagggggttacctttttctctaattgtaaggtgtgattgatgcggtgaagtcttcgaatgtctcgtgttggcgttcttcatctattgttctgcaattgttttctttgtttaagtcatgtttcttgtaattttgtgtggattccccgtactgttaacccaaataaggaattaggttctttctacagctagactaacaaccaagatgtccaagttagaatttactctcgaactgaccacttcttaaaaataaggagtggttagatgcctttcttgactctcaagcttttttctaatgggagactacctcaaatcattgctcgtgcctgattaaatcaatgcaagttacgaattctggtataaaaccttttcgattctttaatttttggacaggtcatccaaacttcaagaaaaaatttcttgaaagctggaggaagcctactcatcacaggggttttgaaaagcccttttgtgaagtttctcaggctgaaatatgtcttgaggaagtttaattttaacattgttggaaatgttatacagaactttcacaaggcaaaagctcatttacaggaagctaagcttaggtgtcaacaacaacctaaggacatttatctgtaacaagctgagaaagaggcaggtaatctctttgatcaccatgtcaagctgtatcatagctttcttacaaaagagcaagataaactagctaagtatggagattaaaagtcttcatattttcatgctagtttgaagggaaaaaaaaggaagataattgaatttccaattttgtaaatgaaaagggagatgttgttgacaactattcagaagtggttgttcaatttttgaatcacttcaagagatttatatggagtaatagtttagcaagtactcacattaacatggagagtattaacatcgagccaaaactatatttggagaattagcttttactgctcaaacccttctcttgcaaagaaataaaaaataatgccttatttagcattccaaaccataaagtctggggcccaatggctttggttcagccttttcaaaactctttggctagagataggataggaaatgtgtgaagctgtgtggcacttctttgatactggccaattcccaacagatctgcatgctactactatctctttgattctaaagaaggaggttcccaaccaggtagtgcactccaagccaattgcttgttgtgcaactatatataagtgcacctcaaagcttctttgtcttagacttgcctttgtcttacctggtttagtgcatcaaaatcaaggggcctacattaagaataggtccataactcataacataatgatatttctggattttattaagcattatggttataagaaagcttctcttagatgtgccattaagatagatcaaagtaaagcttatgataatattgattggattttcttggaggatttcttaaaagctctctgcttcccttttagattcattcaatggagtgtgatttgtcttaaaaacacatcatattcttttgtctatgaatggaagattgtagggaacttttaaagggatgaagggttttaggcaaggatatccaatctctcctttattatttgtgattgtgatggactattttaccaggaaccttctccatgattctcgagcaaaggagttcaagtttcaccctaggtggaagaatattcaaatcattagcttacgcttttctaatgacttgatacttttctgcaaaggtaccaaagaggcaactgcagttttgtagactgctttgaatgagtttagtctcatgtccaaccttcatgctaatctaaataaatcttagattttctttggaggggtttttgaggaggttaaagatggtatcttagtgacatccaatttgaagaaggttgctttcctcttaagtatcttggggttcacgtgaggcctatcaaatagagatatgttgattgggagataatcattaggaagatcaagctcaagttgcatacctgggcaaccaaaaatctatcttttgctggtagagttcagttgatctattcagttttacttgggttaacaaactacgggatgggcatctttgtcctcccctaaagtgtgacaaagtaagttaaacacctatggaggttgtttctttggggtttgaatgtaaataggtctaagcttcatttttcaaattgggataaggtgtgccatcccaaggcttatggacggataagctttcgaaaggggactgattggaacaaacctattctagcaagatacatttgggccataactaaaaaaatgatgtgctatgggttaaatggatcaataatatctatttgagacaagaagattttcaaaattaccatctaaagctagacacagcttgtattggaggaaactatgtattttgtagaaaaatatttcaaagagaagatgttttagctataggaacttatggaaaattcaggtcagctaaactttataacagcaagcttgtccaaactaaagtaatgtacaactagaatgtctaaactctgcattcctaagcatatatttatgttatggcagactgtgaatggtcagttactcactaaagatcttcttgttagattaaacttaaatatctcctccttgattttcccggtatgtgagcttatgcaagaatcccatgagaatttatttttcttatgcccgatgtcccaactagtcactgatcagttgcttagttggcttgggattaaggcatggcctataaggtttagctcttggttgaatagaaaagggagatatctaatggataacattgctacaacaatggtttttactaccatttatagcatttggctcaatcgtaacagatgtatgtttgagaaaagaacttttatggcttggtacatagttgcaaatatcaaaaacctgattcaaataagaatttttaatgttgaagtgtaaaaagaaaatgtataggagatgagttttttttttttctagaattgggaatgagtagttttattctttattttttgtaagagtgttgcttagagctcggttatgtttttgttgttgtaagtttgcttattaattaatgaagttaattttcttcttgataaaatatataaatcttagcaagtaaaatatttttttttgaatagaatagaattttattaatcaatcatgctttaactattacaatggatataagttcatcgggagcttcactttcactgaaaaacgtgatgtaagaatgaacaagagccacgagaaaaataatgtccaggcgtccaaccttgttcatagaatatttaacaaaacaaattttaacaaacttgaagaagctaaaagaatcctacaatcattaaccgaagagccaaacgaagatagtgttggaatatgttttacc

SEQ ID NO: 381990 - DNA, 2517 bp, Cannabis indica
aaaataatttccaacaatcccaaccatgccttgatctgttcaaaacattctgcagcaaaaacacagttaaaaaatagatgctctgctgtttcaacagccgagttgcagaggagacaagtgtctatgtctatcaatccatgcttgagtaatcgatccttggttttgagtctagtcatcatagctagcaatattacaaaactatgtttcggtatattcaatctagaccacacttcattgctccatggcaccttttcaagctcttgagcaaaccaagcttggccttctacaattttgtaatcgtgtgctgagaactcactatgttgtacatagtttttgattttgtctttaagctcaaccattttcctccaataccaacctcaattgaaaggagttttatactcctaccaagattgatgcttaatatacacactatgaacccatttcacccacaaattgtccttctttttctcaattgcccacacatgcttcaccatggctgctgcattccattgaggaatatacatctgacctagaccacccactttctttgggcaacacaccttttcccaagctacaacccctgctccattcatcacacttttccctgtccataagaagctcctacaaattgcttcaagctccttaattatttgcttagaaaggaacataatttggcaccaatagatatggatggagagaagaactcatttactcaataccagcctccccgcaaaagacaagtgcctcgagctccaaatcctaattctagctaccattttctggactagactactgcaattagtggccgagatcttcctagcacaaatgggtactccaaggtacttaaaaggctcttgttgctttgtaaaaccagacatgtcaagcacccttctaacctcatactcactcattccactacagtacactgctgatttagcattattaggcaccaaacccgaagtgatagaaaataatttgagagcttgcatcattaaatagatgcttttgattccactacagtacactgcagatttagcattattaggcacattacaacatgagataggtctaaagtcactcaccaaattagggctttttatctttggaatgagagtgatcactgtagagtttatctcctttaacagcttccctgaatgcagaaaagatctgatggcttcacacacctcttgtccaatcaaatcccaattgtcttggaagaaaaactcccaaacccatcccgccccggactcttatttccaaggatgtcaaacatagcctgcttgatgtcttcattggagtactcggctaacaaagcttcagcttgcactctagaaaccattgggccctctgcaataacagacacttgcactttcctctgatgttgcatttttgtcccaagaagttgtttgtagtattgcagaaaagcctctgttacctcttccatattgtctactctgtcaccactagcattcacaatagaattaattttgttttccactctcctttctcttaggctagaatgatagagattcgtattcgcaaccccctcttagatccaactcactttggatttttgttgcagataagaaatatatgctttgtgaacctcctggtacttctctcgtgcttcctgctccttttgttgaacaacccgatccctggaattcttctgaatatcatcttgacatgcttccaagtgagccctggcctgtgtatcaagattcttgatatccgagaagccctgttgatttagttgcttcaatatacccttcaaaaccttcattttggtcacaacctggaacatacttgttccctgtacaacattcttctaagtgtcctccaccttttgttggaaagaagggtgacttgaccacattcgaaaatacttaaagggtttcctacaattttgaatagtaggtaacacattcaatattgcggtagtgtgatcaaataacccttcattgagaaacaatgcttcagcattctcataagtatcctaccacctctgatttgccattatccgatctatctttgaataaactctctcttcccattgttgcttattattccaagtgaagaagctcccactttgcttgacatcctccaaatgacactccctcacacaatccttaaacttggaatggctatagtgttctctttttccaattctttatcctttttccagaatatcattaaagtcccctaggactatccatggatcttgcctctttaattctattaattccttccataacaaattcctcccatcctcatgattaaaaccatagacaaaagagacatagaaattatttctcttgtctatggaagtaacttgccacctagagcgatagtgacgaagaaaaagaattctgttgcaaccaaaagttttgatgaggataaacaggtagtggctttcatggctcaaagtcatcattctgttgaatctgaggatgatggagtctcctactgtgtctgaagccgacagtaatggaaagcaaaaatgcatatgaagagatg

SEQ ID NO: 381991 - DNA, 1831 bp, Cannabis indica
ggtacatacctacttccaaccaaacaatgcccatgtttacctattttgtacttaatccttaatgacatcatcacaaaattaccccttttggtaaaataccaagactatgtcaattacataaagggtattattattttattttattgaatgacttaatgtttttggtttacttaatggtcaaagatcacaacaatgaaaggagattatgctaatcatcaatatcttattgttacctaatagtaactgagtttacaccaaatatgatctttgtatttttgtagttaaataattatgtaatatatgtatttttttttgttcagatatatatagttatacaatttagtgtaaacttgtttttataaatatttaataatatattttttaaaatgggatatttgtggtaaaagtgcctaaattattacaattgcacttcagtaccaaagttatatttttagcagtagttttgttgcaaactagtaaccattttatcacctaaacgaaaaaaattattgttcttgcaaaaaaaaaaaaaagttaggaaactcaaattcatatttaagattcaacccaatatatattactgcaactataatagatcttacatatatatagtatataaaaaagtcaattctaaaagtttaaactaatgagaaaattatgtattttatgagaaacccaaaattggttccaatccaacctatgaaattatgattttcctttattttccgtcaaatcatgggaagtcacaaaaagattcccgggaaacaaacaattctgattctgacttgacataaaattgggctggcccatttagaaatgaagggataagacccaatattgggctgggtcacaattcatgaaaaagtctcaacaacaactattcaatttaggatcccttcaatttatacatcttattatcagattcttccaaaaaaaatttaaaaaaaaaactagaaagaaaagaaagattcttcatcagattcagctactgaagaatagtaaaagaaagattaaagtctatttctttcatttataacaattcaactctgagctaagtgcataaaagttttgaagtcattttttttgtctttgtatatttgtttcttatatgtgtccaagtctaatgatcaaattggagaaaattatacctttacaaaataatatggatagatcaattagtcatatatataaatatatgatgaactattatattgacacgcttagttgacataaaagcaccatttgtattattaaaatacataaataaataatgacagcttaaaaaaaggagaataaataataataataattgaaaaaaaaccctttgttgcagtgtgtacaccatgttgacatttttctttgctagttcatatttgacttgtaatcatatcttttttttgttctatccaatccatacagctcttttataagttcaccaaaaatccattatgtataacctaatacactctttcttatttgaaaagcaacattaaacaattgcaaaaatacaataatgagagaaaacattcttatttgagagtttacatttttaagtttagggttttggttttggaattttagtttgttcatagaagaagaattgggatgcaagtaagccttgtaagtaaagtactcctttaaaataagggtaaagttgtacttttctaacttaccaagaaaaagggtaaagttgtaaataaaaataataatgtatttttttcttttatttttatttgcattagaataagtacactctaatttaataatttaattttatatgaaatatatatatttaatttgtactattttttttttctcatattcttaaaaa

SEQ ID NO: 381992 - DNA, 2037 bp, Cannabis indica
gtctagtagctttccatgccatctgcagtcatttgactatgaattctgtattagtggttgttaactgtagaaagtttattttttgtaagagcaaagtctcgtttgtgtttgtgtatctttttgctaacaaaattgttcataattttgtgagagcttcatgtttaaatttttaatagggggaatgttgaagtgttaaagttagaattagatctcaatttgagatgaaatattcaagttctctgctatattttatgggtattaaaattgttattttttccaaaaggttatcttttatatcagttaaagtacactacaaatattattaagtgttcttacctatgctagaattgttgatactccctttgcgttgaatgttcagtattctccttttgatggctacccttaggaagatcctactttgtattgcactattgttggcagttttgtttatcgtccaaatattgcatatgttattcatactgttactcagctttttgtttctcctactaccgcccacgggactgttgttcttcgcgttctacagtatctttgagggcaaaaccaactactaccttccacctcttatttggagttgcgagcttactgtgatcccacaaaccaaaagtctgtcatcgaaatctgtattttttttttagaggattcccttatggtgccctttagcatttctctaataatcgctcacaatcagcctaaacttaaagcattactccaattgtacaaagccacatcaaccatataccaatcattagataatcagaggacaagatcaaccatttgtacccttttcttttaatccagttctgccataaatagtggagagaaaaatacacagaaaatcagtgaattcaaattgttggtggcatgtcaaagttctgggtttcacaaatgaccaactcatcattagaatataataaaagttaaaggactggtgacctagttggtccaagatataagttcataaaatttatacagtattatatataattggagttgaatcttctgtcacaccttccataaggctatactaatagtctcgtagacttatctctctcacaagatgtccagttgttgttgacagctaatccagttgactaatctcataagggcaatactagtcatcaatataaggacagcataatactcaatcttattaatactatctttattcaagtctagctatcaaactaatacgaaatgaaatgtactttatgatatgaacataataatgatgtagaagcctcctcaactaaaagggtatatatattccaccacaaagtaatagacaagtaatttttcttaactttctatttcagctacaatttattgcatccttttgggttattatgaatgtttaaaacattattgagcaaaacaagtatgattaagtccaatcaatgaatgaataaattttacaatcaaccaaagagttaattcattttagtacagatatactcatttgattaactctgtctagacaattaacattttagcacagaagtagttcactaaacaaactcccatttgaaaaataataacaataattacaactaaacccattaattttctctgattattatatcataaactggattttcataaaatccctaagaaaatcatactcttccaactttagccttactcatcagtggcaacctctgagtcatcggaagacttgctagcagactcgtcgacgacaacgacgacgggatcttcatcggggtctcgagccgggtcggacttgtccatggcagctctggccttatcaaggatgggtttgaaagccagctcaattgcaagccatcctaatgatagggctccaaacaccaccaatgcttgtttcgccgccgtcgatttcttcatcttgccgaagcaattgaactagggataacaattgctttgcactacgtgtttggggacaaatgatttttttgttcctttatgtaagaaaacggtgcttttggactaaattatgagagagaaggaagagtgttaacgcgtgattggactggggagatg

SEQ ID NO: 381993 - DNA, 2460 bp, Cannabis indica
gttagggtttttgggtttgttcagtagaggattgaaagcttgaaatccttagacaagtgagaaatggatcccttttcttccccatcgcctggatcttcttccagccaattcaatcccgatgtcttcaaggaccagctcaagaaccagcttgcccaggcttatgccgaggaattccttgaggttcaaaattcttccactttaactttgtctcttctttgattatgtattcatcctaattttcgtgatggtcttgggtttctctaacactcacaagaccgttgattcttcagttggaaacttcattgcctttttgggtttttttttttattttattttcaattttgggtttgtaatttaacttgagtttgtgacttactacaataccacacactatcatcagtatatatatatatcaatggcttttatttaaatatagtttcaattgccattaattttttatgatatttgaggtaaaaaagaaaatcccactcttgtccattgtttcattcttgatggaccaagttgttttccagttgtgtctcatgctgtttcaccaactttattatcccaaaagaaatatcagtagggataaagagaaatgtttggatccatttattggatcttccgtgacatacatggatattttcttttcttaatcaactactcaccagtaaacattgattattatgaacttggatttcatatggaaacttggctagttattttttgtgttaatacatttggtgggacttttattttcattaatacttttctttaatttggaattaaacagactctgagggcaaagtgctttgataagtgtgttacaaaaccaggatcaagcatgagtggaggtgagagcagttgcatttctagatgtatggatcggtatgttgaggccacaggtatcattagtaaagctctatttagtggaccaccacaatgaacattttgaggcttgaaaaatttcttgaagaaacagggtcaaaacatttgagcaaaaaagcttagatacccatgaaagcataagagacatttgtttcatatatttctattcgaacctattcttttatcatggggttatatgttttaacttatatgcaatgtctttaaactactgtcatcactggttgaataacttaaattcttggatcatcataatggatagttttcatgtaactaatgtagtcttaaatttggtgtcgagaacgattggcatttcaaatagcttttccttttagacttcattacaaaacttcaaatttgatcaattttactcgtgcccaatcctttatctgagaggagagtctttttgctttttaactcacactaatcattatcttgttcttagccaaattgtgttgtagcaaaatgtatgacaaggtctatttaagaaacaatggcagggtgacctggttttcaatgccatttgacgactggtctggcacagaaaagaaaatttgaacagaattataggagttatctattttatggccatgtttggtaggagcagaggagaggaataatgggagaggtcaaatacttgtgtcaggcaagaaaatttgtgagagggagaggagaagttattttaggttgcgtatggtttgaggtaatgaaatggattagaatagaaaggaatttatttatataatattttgggtaaattgcggtataaatacctaatgtttcagattttatacacttaaatacataatatttatttttggaggaaaaaatacttaatgttacaattctcttacatcgttattaccactttcgttaactcataatacgaacacgtgaagggttcgagatgcattacatttatttttatttttatttttaaaactttaaattttttaatatcataactaaatgctactttgttaccaaaaaaaataattcagtttctcatacaatttttcacatatattggtactttcaatttcgataatcatgtttccatatactgcactgggtttcactcagtttatggtaattttagtatttgcattctcttttcttttttttttttttaaaacaagagaattttagttttttgatattaagaacagtggcgggacccagggattttaagttgagggggggcgatacttttttttataagtgagggggtgcgtctttttttttctctacattgcataacatattaaaaattaatgcaaatttatattttagtattaaatatactataaagtaaaaaaagtaacaataaaatatatttggttcaataattaagacattaaatataagtattattggtagaggttcaaaaagtaaaataaaaatagtaaaataaacatgcttttattgggattagaactcatcacctcctttatatgcatgaaatgactttcccattataccaaagcttatttcacatgtataggtatcacttttatttataaatatatattgtaactatctaaaaatgcatat

SEQ ID NO: 381994 - DNA, 1901 bp, Cannabis indica
tttctttgaattgataaaatctcaggcttcagaggaaatactacttcctgatgacaagagatggccatttcttctaaggtttcccatctcttcatttggtatatgccttggtgtgactagccaagccattttgtggaaaactttggccagttcttcctccacaaaatttctccatataagcctaatgatcaaccttattctgtggtgcatttctgtgtctcttgtcattttagtcttcttcttctattccttgaaatgtctactctacttcgaagcagttcgtcgcgaatactatcatcctattcgtgtaaacttcttctttgcaccatggatttcactcttgttcttagctattggagttccaccttcacttactaagtaccttcatcctgctctttggtacattttgatgactccattcttctgtcttgagcttaagatttatggacagtggatgtcaggaggccaaagaagactctccaaagtggctaatccttcaaaccatctctcagttgttggaaactttgttggggctttattaggtgcctcaatgggactagttgaaggtcctatcttctttttcgccattggaatggctcactacatggttctttttgtaacactataccaaagacttccaacaaatgaaactctcccaaaggaactgcatccagtcttctttctttttgttgcagcacctagtgtagcttccatggcttgggcaaagctccaaggctcctttgattacggttctcgaatagcttacttcatcgccttgttcctctacttctcactggttagtttccttgacactttaaagaaatcttagttcatatattttccttgtttgttccttaactaaatccttctcttctttcttgacatttcgcaggctgttcgggtcaatttctttcgaggattcaagtaagtcatggcctaaacaactctgatatgaaagtacctcttaccccttttgatggcttagttctctaacacttgtcttttttctttaatgaacagattttcattggcatggtgggcatatactttcccaatgactggagctgccattgcaacgatcaaatattcaaatgaagtcactaatgttgtaactcaatctctggcagtcattctttcattggcttcaactctcacagtctcagctcttcttgtttccacaattttgcatgcttttgtgtttagagacctctttcctaatgatcttgccattgccattagtgacagaaagcctaaacataagaagtggttccctctaataaagaacttgagctcagattactcaaaagacattgacaacttcttgaagtttacagactctgaagcaaaagacttggaagcttctgagaatgttcagaggtctgatggtgaacaaccttaggaagtctgttcttagactatatatatttacttaattcaaatcatttggacttgtgaggaactcattaatttttagaaatttatttgtagttcctgtgagcatgtcatttgatgaatgagtgtaaacttgttatgtttagtagttccaataataatgtagaaaacaacttgtgtgctctattttgtaaaaggttttgttaaagtaataacagtaatattatgcctatactatattttcaggcagaaaacaaaaatatacatatattacttattaaaaaagaaatttcaattataatgatgagtaatgatctaagtaaacttaatacttcttcaagaatagtaattaacatgaaagttttcatttgttaagaataaacatctgaaaactttcatatttgtattattgctcatgtacaaagcaaaatcacatttatttataataatgtcaaattctaagaaatgtaacagttgttaggttgtttttagcattatttttaggttaa

SEQ ID NO: 381995 - DNA, 1659 bp, Cannabis indica
ctacaaaaaattatacttttagtcactaacaaaacttgtgactaaaagtaaaaaaattgtgaattataaactatctttttatgttgtgactaaaaaatctgttattaaagtattagttacaaaaattataatttggtgtgaatatattgttagtcacaatacaattcttgtaactaaaactaaattttaatcacaagtaattttttattgtaattaaaactcacatctagtcacaaaaaaaattatattgtgactaaaaaattgtcacttaaactaatttttttttagtatatagatttttatttttcaacaattaaagttgatatttaattgattattcgatgaaaaagttcgaaagattggttaatattatggaccaccataattatatattactctttaattgaatatagagaatagacagagtaacctttattgttatagcggccacggccagtatatatacaacacattaatgtttcttttgtgattattagaagtttttgaaaaaaattacaagaccaagatcaattttatcatcaccattttaaaattggtttctcataggctagttatatatatataaatatatatatatggtatattttataatgtgttttagaaatatgttttaattaattaagtttgtttttgtgccaaattatgtttgtttcataagttttaatgattaagtatatatataatatcgattgaaataagaaaaatatgttaaataagattaaaatgatggatttagtatgtatagtttagagttctaagatataatgaataaaatattttaaatttaagatactcaacatattttgattctgctcggtaatgcaaagtctagatcttgaagctattttaaaataaaaaacatgtactttgtaatttgaattagctagagtcgcgctacccaaataaaagattgcgatgctaacgtttgtacaacacacaaaaactcaaactcaaagttaagacactaagtgccatttttgtgattaatttttcacctctaaaaactcataaagggagactactaatattggaagctttttttagctaaattattaagattggaagcttcttgctgatcaagagtttttcttcttcttttttaatgcttttttactttaatttgattaatattaatattatgcttattatcataaagtaatttaggattttaatgtaatatcttcacattctattattagtcaatgcatttttatgattttttttttctttattgtaatttatcaatttgtgcttaacacttgtaaatgtttaattactatttatatgatttatgattttaatttaaaatttgagaaataagagttaaatatgctataattttttttataagtaatattttgtttatccgttaatgtgacaatgtatacatatattcatgatgatatattcaataacaagatgtggatattatttatggatcacgttgaaaaagagtgttggaattaatgcttaattatttataaatttctattacacataaatagaattataattatttgggggtccaaaaatatgtaaatctaaatgaacaaagaagaaaaagacgtgacatatatatgatggtgtggcagctgaagctatatatgccatttccaagtattattattattattatta

SEQ ID NO: 381996 - DNA, 3047 bp, Cannabis indica
ccttaaaaaaaaaaaaaaaaaaaaaaaaaaaaaaaaaaaaaaccccaaataagaaaagtttattttttagagagttaatttttttattaaattttttttttttcattttagtaatttattgtgtaattatttaattattttttatatgattgtatttttctttgagaaccaagtttttgaattttgctagacacttctcataataataaactttttaaaaataaaataatgataataataaacattcccttaataggttaactggtttgagaattggcttatagtttatactatttcataattagaactttgttattaaattagcttataaatttcaaatgttgtttggtaatattttttttttatttaattaaattttaaaaacattttgcttataaatttgtataagtgtaacctaatttgcaaatagttttataaaatacaaactaacaatgtttaaaaacaatacaagctgtaactaagagaccataactaaaatgactctattggtttattccaacacgaaaaaatatataaatatatatatatttctttctttaaaaaaaaaaacttgtataaataataatataaaaaaaatatagaatttataaataacttataaacagattatttagttataacttataatatagacatattttgtattcggtaaaaaattatattaagccttaaaatatttcttgaaattatattttagagttgtatatatttgaagtctcatgtctttcaatatcttggtgcttgaattgaaggtttagacttgtatggatttgggccggaaattattgggcttttctgatttggatgaacttggcatgatgaatcttcaaatgagtaatatacaaaaatgacaaaaaatttacatttttatgaattttatttgttttgtttttacaaaaatatgaagtgttgtttttgtttgtttttgaaataacattgttttgacgttgctgctacatgaaaataacattattttttaaaaaaaaaaataaaagggagaattatttttccgttgtttcaaaataatattaatttcacgttttcacattgctgctacaggaaaataacattatacaattaatgccttatatagatcataggtgaacaactaactaacttcagctattgcagcttaacagaattagttacacaccaactaaatctctatttataatagacttagggaaaaaatatactaaaaacaactactaaactactaaaagtatatattacttatacccctaaggtgaagcatatatattgtatatggacatcttataaatgtgagtagttagtattggagaagatagtgtgaaagcgtcgactaattaaaaagagcttgatataggaacgagttgtatggtggaattattaattttgtctcgaataaaatgacagtcaagttcgatatgttttgtcctctcgtggaaagttgagttgttggcacttggcaatatgtatggtggattgattatcacaataaataaatactggatgtagttgaggaatctgaaagtcatggagaagatgttgtaaccaacttatttcactcgtggtagcttttggatatagtgggctatttttttgttcgccgtgatatgagactgtctcctagaaagatgcaataatcgattgttgaacgccgagtaataggacaagacgtccaatcaaaatcaaagaatcatcgaagtctcaaagctaaagtagatgaatagaggagttcttgaccaggatttccttttgggtaacgaagtagatggtgaattgcttggagatgtgttgtgcgtggactagccataaattgactaaggaaattgacatcaaaggtgatgtcgggcctagataaggtaagatacaaatttttgccaatgagttgtcgatagtgtgagggattgtctagagcttcgccaagttcgttgtaaagtttgagctttggatccataggtcttttgctaagtttgctacctatatagtccgtatcttcgaggagttgtaaagtatttttcctttgagagagaaataaattatctttggcacgagcaatttcaaaaattgaggaagtacttgagatttctaagggctttaagcttgaagttatggtgtaatgtgtcttgtagttaatggagtatggagagattgggaccaacaataatgatatcgtctacatagacaagtagagcgatggaagtgtcttcaatgcctcttgtgaacagggtgtagtcagcctgtgattgcctgaaaccttctttgattaattcatctgagagctttttgtaccattatcgagaggattgtttgagaccgtaaattgacttatgtagcttgcaaacaaggttggtatctacattaagagaagaagaaagtgtaagtcctttaggcaaggccatgtagacctcttcattgaggtcaccgcttaaaaatgcattattgatgtctaattgcaaggtgtgccaatgtttgagagttgagatggcaagtaacaatttaagtgtaactgttgggtgtacatccaaagtcccacattggctataaatgggaagaatcttgggtatataaggataaacattatctccattggaatgaggccttttgggaaggtgcccaaaaacaaatccgtgagggcttggcccaaagcggacaatatcattccaatggagaaatagatggtgtccgacggtccttacaagtggtatcagagtcaaatctcaaaattagtcatgtgattgtatccccggatttccaaacaaaaataaggtgaagcttgctagagtcgtcggaggtttagatctggttcgaagggatttcgaatcttgctggtgaagggattcatctagcttactcaaggggatcttgagtggttgaatcgagggattcttgtattcgaagggatttcgaatcttgctggtgaagggattcatctagcttactcaaggggatcttgagtgttggaatcgagggattcaagtttagatctataatcgtctaagggaaggcaaagtggtccttagtttgaggggaggattgtt

SEQ ID NO: 381997 - DNA, 1387 bp, Cannabis indica
tttttcaaaaaaaaattaataaagcgactttgataacaagagaatagattagagagttgatagaaaagtttctacctaccaatttgagcgtgccacgtctacgcattcaacgctgagggaattcaggtagtctccttccaaaatttattctaacatcaaaacaaaaaagagaccagatatgtttattacaagatatgctaattttacgatgttcaacaccaaaatatttactattaaatttacttattattatttgttgatcacatcaataaattaatatctacatattggatttaccttattatatatggatggagtatggtgacaaaataatattcagataatacatgattgaattttataattttaaatggatatgattaattttcgggttaatacgacttaaaaatgacacgattagcttatttatacaaatatatatatatatatatacacttatatatattttatatatatttttttgatagcaaattcattcattccaaagtgaaagatatacacttatatttattaaacggtataaactatattaagttagttaaatataagtcactaaaaaattaaataactcataaatatgtcctaattaaaaaattataactatgtaaaacttgtcaggtcaatctatttaattataaacaaattgggtttgaattgtatgtttaacataattaataaatagattggtttgagtttggtatttgttgaattgttaacctaaatggaaatgtttatatttaaaaatatttcattattaatatatatataatatattggtttcattttttattatttattttatttaaaattgatgttgttattaacccatctttgtcatgtgatacgaccgaacgagtaacgaccaaacttgattttttttggggaagggggaattaatactaatactatccaaattatacattaggtggcgtttggctggaggtaatgaaatagaatagaatgaaaagaaaataatttttattctaattctttgtttggttgcatttaaaactattggaataccattatgatggaatgacctttccatcattttggtggaatgactattccattttaaaatggaaggaaagactattccaatgcaaaatttgaaaaaaatttaataatttcttttattaattttttaattcattttaaattttattatatttcattcctattccaattctcattcctatttctatattttcattcatcccaaccaaatgccacattagttatacttaactctacaaatccaattttagtagtaaaacgcttttttaaaaaatccaaatgcaaatgcccaacacacgtgacaaatttttagcagtccacgtaatattaattattaaaaaaataattt

SEQ ID NO: 381998 - DNA, 1446 bp, Cannabis indica
aaataaaaataaaaacaataatattttctcatatgctcatctaatttgattaccaaaagacttttgaaactgttgcagtgagtaacctttggtataagaatgtgatctaacataaatattagattatctataagtcttgtaaaattattactctaagcagaagaaaataaatattaagaaagtaaatgagagtcttacaactctgagtatcatcagcacaaccacaaatcccagttgtccaatcctcatcggctggaggttggtagctttctggcaaaacttgtccgcattctgtacatctatgaacgtccaactgtcatgacaaacaaaacaaaatctccattaacacaaagctacacaaataaaatcatcatccgagttcaaaaaaaggaatttaaaagtaatgatcataagaacatgtcaatatatcatcattctataactgcatatgaatcctgtaccaaagaccataattctaaatccacccaaattttactttgagtttgcctcacttttttgtttagctttctctttttttcttcttaaacaatatgacaaataatcctgaacagattacaaattaagataaaatatgacaaataataagattttaaaatttcaacatgaaccaatagtggagagaaaaacttgtgtagttatataatctataaacgaaaaaagaatgacagtgataacattttgaaaaagaaaaataatataagagagagaaggggacctgaggaacttcaataggctgattgagctctccaggagttatatcctctacaggagcttgatcctttgtgagtttcacgtacttcgattgggtatttccctcagccatataaattctgatctatatgataagttgatgattgaattggcagagcagagcactcaatgttgatggttgagatttataggatgaaactctctctaaacttttaaccaattcccatttactactctcccacaagatctactttggaatatttcaccgttatttacttggtacccaaatatatagattaatcatttacttggttttttttttcttttcaaattcatcatttaattctaattagtaattacacaacaaaatgttatttttttccttttttggcacaaaagatcacaatgcagaattaatctttcttctcttttctttctttatttttttcttgcaaaattattcttgttaatcatagaaaaggaatttataatttattttttcaaccaacttaattaacatttaatttctcttaaaaaaacatttttcatatatacatttagggtgactatttaatggttacatttttattgtaaccatatggttacatttttctttaacctgtaatagcaggttactaacaggtagactttccttttttagtatttaattaattataactaactattttcttaaaataattaattaaatagtag

SEQ ID NO: 381999 - DNA, 776 bp, Cannabis indica
gactaatacttttagccaaagatcttgtagtcacaacatagtaatgataatttataattactcacaattttttcacttttagtcacaagttttgttgtgactataaataaaatttcttatagtgagttgtaggaaaaaccctattggaaaataaactcaaggattgagcgattttctatatgtctctagaaagataggagctaataataataacttttattacttatgtaactctcatttaattactctccatgtgtaagctactcctctacaactacctttcacccaacataatcacgaacgaagacagaaaattgcgtatatagaaggacaaaacaaaccaacccacttattctgattggaacgattgaagaaaaaaagagaatgatggccccttttgcccaggggacatcgtcagagaacaatgttggggacagagtaaatgtggttatgtaacagaaaatgttattatttttttaaacattgtgattcaaatttaaaactactgcacatatttaaaatatatttttattattgttttataaattatttttattttattaaatgtgactatttatctctattatattatgtggttgtgtaaaaaaatgtttatctaaaattatcctttggttattactcttttaaaacttatcgctatttcattattatattaaatatgtttatgtaattgaaagtattaatttttaaaacattgaaatttaaatttaaacctacaacttataatatttatattatattaaatgtgactatat

SEQ ID NO: 382000 - DNA, 2897 bp, Cannabis indica
gtaaaagcatcagcacgttgtaatgtagtgctcacttgtatgagttgaataatggattgtttgatttttttcccttttaaagtggtagtcgagctcaatgtacttagtacgttcatgaaattttgaattgttggcaatgtgaatggaaaattgattttcacaataaacgaaggctgggacatcttaagaaattcgaaaatcaatttgtagtcaagttatctcgctgttggtagcagcaaaagttatatattctgctttggctgaattcttgaaaatgattggctatttctttgtacacattgatatgaggtaatcacctaagaatatgcaaaaaccagttgtggaaaatcttgtaattagacacaaagtccaatccgaataagacagaaacctttgagatgaagataggatgtggctgagtagtgtaatccttgaccagggctccctttcaggtaatgaaggagatgtgaataatctgaataagtggagtgggaggtgtagacataaattgactgagagtgttgattgcatatattgtatatggtcaagataatgagagagataaaaatcgaccaattaatgaacgatatgaggaagggtcatctagaaaagttccctgtagatcatccaacttgactcgagaatccactagggtcttggcgagctttctacctgtatagctagtgtcgtctaagagttgacgagtatatttttgttgagagataaagagtcctttttttggctttagtattctcaaaacccttaaactactttagttgaccaagggccttcagtttgaatttgatgtgtaatgagtcttgaagttgatgtagcaactgaaggtttggtcctgtgatgatgatgttgtctacatacacacctaggacaatgaaagtattgttggaacttttggtgaatagggtataatcagcttaagattgtgtgaaaccttcgagaataagagcatccgagatcttcttataccattatcttaatgattgccttaggccatagattgatttgtgtagtttttgtaatgtcttaacccgtaagaatgccacatgtatgcttttataaattagtttataataataaagtaatagcataaataaaattgtagtttaattaaaaattatattaattgtttgaaatataaaatttattttggcattacaaactgtatagggttggggatccctttttaaaaatttataaaggatatagccatacgatattacatcaaaatatacttaattcaaaagcactgtaaacaaaatccttacaactcgacactactagctgaataagctgataagcacatttttcggggaagacctctaactcatggccatcttattaagttctttcccttacctgcaccaccaagcatccgtgagtcataaaaacccaacaagacaagcaataactcaaacactttatatcactacacaaataaatacaatatagccatttaatcataatcaagtaatcatatactcaatccataggaaaaaaatctcacaattatatgaaagaaattattaataacaaatattcgtctaatgagacaagctaatgctgttacttaataaagtaactatttatttaccgttgtctaatgagacaatcttaatactgttgcctaatgagacaaccaatatcactatcgttgcctaatgacacaaccaataagtaagaaacttaacaacaaattcaaattagagtagtaactcctcatattgttgcctaatgaagaaactaatggagtgataactctttcttatagacggtaattaccgtatcataaattgacatactatgtgatgcaattgtccttttcttacctcaagtctaaattcaagtgtatcgataaacaagtggaaaatgctcgacgatcgtaggccctatgccacaacaacgatagaccagtaaataactcaattaaatccgttctaggatttaaactcaaaatcgaaagtttccttgttgataaatagcgtgttaataccctaaatatcaattaaacacaaaaatgaggtaccttaaaacctccccaaacagtccaccagacccccaaacgattaaccattttttggggccctgtttggggaaacggttagccgtttcctctgcagaaatgacaaacttcgagtttcacttctcaaacccttcctaaacttaaccaaaacatgccaaaattcctagaacagttataatacaaattctaagcataatccacaactcaacaatcataattgtacaacaatcacaaaactaccattaaagctcaagcttgagttttaagaactcaaacttgaaactttcaattaaacaacaactaacaacctttaattaacttacaaactacaataatctaagcttaataacttggcctaacatatacaacttcatacagaaacaaaaccatgaaaattacacttaaaaccaaactttttcttcaaaatttcacaaagataaggaagagctatgttaccttgaacttccctcacttcaacactactcttaagaaaggatttcttggataatttgtggaggaaacaattttgagtaaccttggtttgctttgggtttcaccttggccgaaaaagagaaacaaagagagagaaagagtattttgattttcttaggtttcaccttgcccaacaccaattcaaacaaacctaaatcaaaccccataattcagtttaaacaataacaaaatccaacagaacgtaaaattagaaaataccataaaaacctcaaataaaccttgaaattaaaaaaaggtgaagagagattaacttaccttaaccttctcaaccataaaataaatatatagcttataatttaattctataaactaggggtgggcatcatccaatccaattcaattgaac

SEQ ID NO: 382001 - DNA, 579 bp, Cannabis indica
tgctgatgctgctactcctggcttcaaacttcataactgcaaaaagggcaagggcttattgctcccacaaaggagtgcaataatcatgctgctatgcctcttcttgataagatggactcaaaaacagttgttcaatgtactaagttgcagaggttcacagcacagggaatgtttctcgttgattagctggttatggccatgggaagaaaccttggtggataattggctatgcagagacaaaaaaagacttaaggtgaatgacattgtatgctttatcaacaggctagctccaaggctcaaaacaactttcactcgagtgtatggacaatggtgggaatataaaaaatggcaatggcattatggtgcaactctttgttacaagttggatttacttatgtttcatgctatctttgttacaagtattggtctttgagctcaatcagctttacactaccatcaccaccacatgtaagaaaaccatgtgatacaacttgtatatccatgacagcagcctgtggcgaagatcatggaatatttcaggaatatttcagtacatgcaagtaatgaaaagcaagaaaa

SEQ ID NO: 382002 - DNA, 2125 bp, Cannabis indica
agagagagagagagaatggaatagaggagcattaatgtctgtgacaaagacatacagagtacggacaacctcatgtaatggaaccctacctttagctgttttttctttctccttttatttattactccaattgtgaatgaagaatgaaaccaaaatatgtataaggtacataaaaattgaactgtattagtattatatggcaatatcatgagtgacccttttttaaaaaaaaaaaacaaaatatatcaactttacggattggagatcaatttgtatcaaaattatcattatatctcatagtttgtgacttgtgtaacctaaactccataacatgtgttatgtgatgggttaaatccatttggaatagttgtaccaacaaaatatcatgtaatgtatttgagatatatagtcaaattgatttttgtttcactgtgatcatcctactgttgttacatttttgatgaatattacacctataatttgatgtatagtaattaatgtttgattaattctgtctctataacgggttacagagttcattagctgataaaactttattttaaaaaaaaaataataagtgtgataacataaaagagaatgtctttttcaaattctatttataagttttttctttggagctgaaagtcaaagtacaaatcttgggaaagtgatttacttcttatacagttttcccagttacccttgtaatttttgatgaaaaagaaaataattaaacgaaagggaaggaacatacgtgtgaaatgagaaaataaaactaaatggggttttaacttttaagtctctttttctttgacttttctatttgaatgcttttgaaagatgggagtgagactagagtctagacttggtgagaaaccaaataaataaagaattataatgtggttttgtttaggaaatgaaaaggagagttattaaaataggagagttattagaaaggagaataagaaaaagtaaaaagtactggaggtgtaactttgttcagacgcgacttgacaggtgagttgagacacttgaaatgttaaaattgtatgtgttattaattaaatatcaaatcttacatgacttacaaaaataatttttaaataatatttttaactaattttagtatgctaaagtattaaacacctaatacttaataacaatattctataatttaatttaatagttttatataataccactaattaattataaaggcaaaaataaagactcttttatctcagaaaaaaaccaaagacttttgccgaaagagagctagagctcttgtgtaatgtcaatatcgtttaagaatatttgaaaatctctttttagtaaaaggaaacaaaaatttacacttagctagtaatgattattaagtttattaacaataaggtaagatggattaaaaaaatacgagatgtataggaattgtaaaaagatggagaatgtgaaggaaaaagaggagagtaaatcttttagattgtttagtagaaagggtgtgtataattgttattatgcacgaaaaagtgaaactaagtgagagtgaatttttagaccctcctccaacacatttctccatcctaccaaacataatttattgatgtgtaaagttatattatgcatgcatattttaatgagtcgtgatgcattttttctcattagtgcttcaattgatactttttaattattatgatatcttcatgcaacaattggtctaaacacaatctgtctataaccaagcgcaacacatcatattccaaagttatccaacaaaaattaaaataaaacaaataatactcatcttggacaagcatttacagtggactaggcatcataataaatgagtgcagccaaatagtgtgaaatgtctattcaatctaatatacctaataaatgtggtcaaaggaaaagtcaaatataggaaaccatctcatcacttctctgcaatctcaattgggagtttgagacatgggacttctctatagcatcctggccttcattatctacaagatttatacactatttttttcactcttgaccagtaataacattgtgcatcagaaataatcatgattccatttttattttattttgaaatggaatcatgatttcttattattacaat

SEQ ID NO: 382003 - DNA, 4202 bp, Cannabis indica
acctaaggaattttactacaaaataaatccaactatttatctttagatctttaaaaaacaaatgcagaatcatttaaattgcccatcacttattttttaaaaaaatatatattaattttcagtattggtcacagttcttttctatatgtttatatatcatatatattctgtcacatggtaatcttgcttgcatcatggaaatgctctccaagtaacgtaaacttggtcagaagagctgtcgtgattagcaagaaacaaccaacagattctttggtgggcctaattattgtgaagaaagcaaatatctcatgtatatatctataagcacagagatatgagaactaagcaaatacataccctagtctccaaattgatgaattaattaatctatactcaacagacaaaagtactttgctaaagactacttatgcaatccgggaattacatgatgaaaaagtatgaaaattattaattaatgtaggtagtgatgtttcagaaagcaattactaattaaggttcaataatttgatccaggagtttcccatgtctcagctatgatgctatgtagaagacaagtatcttggtgacattcacgagaagaagacaatggtgacatggtagggtcttgctcttcattcataacatcttcaatcttttccaaaacctcttccatagtaggccggttttcggggagttcagagacacacttaagagcaatattcagcaaaatgaaagcccagtgagctgcttcagccttagctatttccctatcaaacacctctccagtccactcctctcttatcatggcattcaccaatttaggaaggtctacacctgttctctctacaggttttcctgtgagaagctctaagagtatcactccaaagctatacacatctcctttttcggatacacctttctctggtgctgtgtagcctttggaggaacatatcccatctcccttggggtctagaaatctcgagtgcccgaattcgcttatgactgcttcatcattgtcatccaacagaatatttgaaagtttaagattcccatgatgtagtattgtttcatgctcattagtaattctatacatgaagctcaaaccccttgcaattcctcctgctattgacaatcgaagtcttaatgggaaatccctcttgctttcgatataatctgcagatacatgctcaaacaaattatagcctcaaagatctaaacaaaaagagaaaaaaatttgtagtaattttttgattttgatcagactgattatgtagtttacgttagaacagcataattttaaacatgtctgattaattaagtgcaaaaatgatgaaattaactcaccttcaaacaggttaagcagactgcctttgttttgatacttgtagattaggagtttatcttcaggagtaaaactataagcaacaagaggtaaaatgtttggatgcttcacatctccaatcagattcataattttgcaaaattcctcaaaggaaacttgcaatctcttcaatcttgtcactgaatacaccgcattgttcttgagtattaccttgtacaaactacttaaaagactctgacttcttaaatcagctgtggcttcaagaaattcctccatttcgaatctctcttcctcatcaacaaaaaagacaagatcagatagtattctctctggcttcacttcctctgttgtcctaacttgaggggtcatagttggagagtaatgaagagacttcagaattgccttgtctcttgccaattctgatgccttcttccccgccaagtatgtcacaaaaatgaacaaagagagtccaataactaatggtatccagttttgtgatctcttgagccaactcttttcctcagaattgtcactttgggaactctctggggacacattagtatgatccttaaactcttccaggtacataattctactattcggtttcttcgattccacttggaaaatcgggatcataccctcaaaatgattattggagatgtccaatttcctaagatatttcattttggctagatcccttggaatcctcccacttaggagattactgcttagatttaaataggtcaactttctgcaatacattatggcgtttggaatgtttccttgaattctattttcggctaagctaagaactcgaatatttggaagcttgcataatgaatttgcatcaagtacaccattaagatttaagttttcaaggctaatttcaagaatgctggtactaactatgttacatttcacacccttccacttatccaagcatggatttttgcttgatgcatcctggcctaaaaaacttaacatgttttgaggatcaacagctctaagaaacaaaattaatgattcaaattcagatgactcacctcctaaaacagtaggcattcgaaggaagacaacaccaataatcatccccatcaaaaaccggttcaatcctctccttgtctgcattattttctttattctttttaagtctctattggatcttcagaaactaaatgaagatagtcatacaaacatatatgcttctatctttattgatcctcctttcattattccacctcagaaaacgatatattctttcgtttattacaaagctttattgagataaccaatgctctatgtgtattcctaatcgttatgtactatgtcagattcatatcacagtcataacaagcatgtgtaaaatcacaggatattgtctaatgaagctcaaagacttatttataaacacaattggtgaacttatttataaacatgctgacacaggttggtcttattctgttaaaggtttgtttactttggtggaaacaattgcaatactagctctgcgtgattcatagattcatcctttaaccaggtgtatatttgtagtccaataatgttggactaggaaagtaaaaaaattttgaaagcaattaaaggtaaatattttgaaaattaataatttatatatatgcatgatattaattaaataatataattttagatttaaatttaataatttattgtaattaattatactagcattataacatcaatagaataaaaaaaaaatacattttcataatgaacctgttaaaacaacaggtaatacaatctcaaattcaaaaaaagatacatttacagattaaataaaaaaaaagtacaattctaaaatttcataaaatagactaacacaaaacttaaaaatgataaaatatatataaaagaatccccggagctccgtcgtcagcactcgagatggttgctcctttgtcagccacagcttcagctacggcgaaaagagaagacgagcagggtcgtggcttcaactccgacttcagatcttggtctttgttgctctctctttcagttctctgtagcaaaaccatcatctttctcgtcctccatcatcatcattctctctttcaacttcggctttagctccggcgaagtgagacagagagaatggaggaagttcagtacatggagaaacgtgcgcggtgctggagaattggggccggagaaacaaatccaccatggagaaacgtggatgttcagttcatcgtgttcggaggaggacgcagcggaggacacaatagtggtggaggacttgagaaccttggtgaagagagaagagaaagacagatgaactagcaaagaaatggagaagagaacaggaagtttggtgtggcgtgcggctggtttgtgatgatgagatatatgctaggctttttagtttttaaatggaaaggaaaaaaattatttaataaataataaataagtataagtaaatactatagtaataaagatgaaaatacatatggtattgaaattcggaccccttaacaaaaatataaatttggacagtttttattctttttttttttttttgaatgatcaattggttattaaccaataacttccgctaccaaacaagtaacaaatcagttggaacatcctccaaactgaatcgacgatcagggaataatatagcagccttcgcaaagtgatgggccactacattagctgatcgtttcacaaaagaaactgaaacattaccaatagagttaatcaaagtcttacaatcatgaataactaaaccaaacaaagaaagcatttttaaaaagctacgaatagcttgaatagcaccgaggcaatcagattccagttgaacattttgccattgcttttccttaat

SEQ ID NO: 382004 - DNA, 3288 bp, Cannabis indica
aatttaaaaaaaaaacactttttttttaccccacaattatttatttatttatttttctatatttttcattactttttctttttttcatccaaaataatcatactttcaaacatccacctaagaagagtattctatagtctatacaaaacctttttttttaaaaaaaaaacagataattaactatttgtggctgtaatgtgattattaatgtaattaataccacattacatcaaatcaaagtcatatcaactaattttgacaccaaaaaagaaaaaaataaaattaaagcataaactcatcttgtgaatcagagcccacaaacaccgtccaaaaaaaaatccattatcttctccagatagcaaattttggagatattggagtcaataatcaataccaatggccacattgtttaaaatattagctatatattttggcacacatatatatacacacatattataatttataataatactctttatatatatacactatacgagatctcatcctccaataagatgacgttaattatctatagagattaataaaaactctctaataattaattattagttctccaaaacatttactacatatatttcaattgaaaagaaaggacaattaattaggtcatcatcatcacttcgatgatgggtttccactttagataactctagcctaatcttgagctcatactcgatttctagtaaataaataataatataaattatggccacctaaattaggaatgactcaagtttagtaataataaataaatatatgtatgtgcactcacaatcatggatgattgtgatagaagaaaaagaagtgaccctctacctggccttttcatcatttatatttcttcatataaatttatgattgtgtatgctttttatttttgttggtaagtaattatataaataggtgattatttaatggatacatttttgttgtaattatatattttttttttgacttgtaatagtagattattaataggttaaaattatttttttagaattaaattaaccataattaataattttcttaatataactaattttaatttaaatattttagtaagatctattttagcaattaatatatataatgattttttttatatatatatttaagtccctattataatatttttaacatttaaaccatttaactataatatttacaataaaattctattttatttttacaaaatttagacttctaccccttctaaaataaatttttgaatacttaattaatttttaaaaattacatctaattattattttgcaacaatcacttgacccatcttcctcctttacataaaaaaaattaggattttagtttgtcctaacttaacattatgtaaattttctacttcgatataatcacttacatctatgctacaaactcatttgtctattcaaccagctacagttggatttctcattagttttttataacttgcttgctatttttctactgttatgtttatttgtgaaaaaaaaaataacatttcaattaattggtaatctactttgataatttatttttacaatctttagattgatgaaaataatttaaccaaagagcgaaaatagttaacaatcattaattttatagttgttattacatttttacttaatttttcattgtttaaaagagaaaaaactaaataacttgaaccaattttagaccgacacactaatttggcacttaaaagtgttaacaaataagattgagcgtaaaattacctctactaattagaggtcatttatatattttttttattatttaaggttatgtgtgtaataactttaaataatatggagttttgttgcaattattttaattatttaagttaaaaaaaaataattgctaaaagatctttacttattaacaaattgcataaaattaattaataattattaataatttaattttaattaagtttttataaagaaataaagtatcaagttacatatagtttttatttatcatacattgcatctgtgagataaaataacatatagtttgtattgagtaataatctaaaaggtcatataagttatatgaatactctcgtttcatatcaaaacctatgtttgtttagttagagcattcctaatatttacttttcagatttcacattaggatcataaattatgtcagaggtagccaatctaaaatatgtattaaaacaagtatgactaatcacctagatctagaaagaagaaatagccaatcacattaacacattgaaataaaattaatcaacatttatcatatccctaaattaaaaaattagttcataacttcaacaatcaaatctatgtttaaaataaaatagaaattaacataagaaataaaaaaggaagagaaagaaactagatggagaactcagtaggattgccacgctcacttcccaagtcttcttcatttgtttctagggttctatttgtaaatgtttccttaaaaatttaaaaccctcttagaaaaatccattttataactcaaaatagcaaaattacgaaactgccccaatttcccatacatagcacctcatcgcgaccacaaatagcctggtcgtggtgacaaccttgagtcaaaaatctaaggttctgtaagcctcattgccacgaccaccatgtcttctcactatgacgacaattagtcgcgactagcttctgaaatttcaactatttttttcttcgatttccaattgtcttgtcccttcgatatttaacaaatttcacactttaaaatcccaaaaacctgaaaccaagaaaaaaaagtgtaaaatcatgcaaacagtaacaacaaaggagaaaaacaactctaaaaaacttaggctaaaaatagcctagcaaaatttctcaaactaactccttactcgtcctcgagtaagactaaaaactaagacaaacacacgaactaacacacaaattaataactaagtgttgtagtattttgcacacgcaagtgcacatatcgtttacaagtaattatagactcactaagagtgaggtcgatcccacgaggattgtagttaagtacgttaaaattaaacttttacttttatttggttaaataaaaattaagaaaaggttaaaactagaaaataataaaaacagtcaaaggagaaataatttaaggaaattaacagttaataaaaagtagggctttgattttaattgtatctattgaatatggcttaatatgattatcttcctattatcaatttctatgcaataacaagtttactaaggtaatttatagtct

SEQ ID NO: 382005 - DNA, 3749 bp, Cannabis indica
agacccgaacccggatcgggaccgggactcggacacgggacctgttcctgaacccggtatccgagacccgagacatgcgacctgcgacctgcgacctgtagttagtattggggtcaagtatattaaaaatatattataactttacacaatctattaatataagtcaataccaaatataatactgtattaaataatactaatatacaatacaatcaacataatacaatataacttagtactgtattaaataactttacacaattcaacataatataatataatataagcatatcaaatgagttatataaacattaattattgttatatatatgattaaatattaattggtcaatttattagccatctcaattattaaatttatattatatagtgtcatattgagcaagttggccataagacacataccaaattattattaaactcaacaatcatcatcattctgttagcttacataattaaaataatatttaataaaaaaaaactatatctatattacctatgatcacatcactatgattattatatgattttaattattctataatattaattaatcatccctatatatatatggtatgcctatagctccatattattatcaattctcagccaaaataatgggtatgaattatatatttataaaaatattggtaatattattattaatattattggataaaaatggtgttaatggagaagaaaatgtgccatgttttttcatatttggagattctttagttgataatggaaataacaacagacttccaacctctgcaaaagttaattataagccttatggcattgatttattatcatctcctgatccaactggaagattttccaatggtctcactcctgttgacatacttggtatatatatatatatatatcttctctcttatatattcatttatatatatatatatatatgaacaattttgtagtacacttgctaaaagaagcgtttttgtatattgattatgtgtttgtgcattcaggtgagtattttaatctgttttttttttctttcaaaaattatgtattgtattaattaattaatgataaattataatatatatatatttataggtcaacttttagggtttgagaagttcataccaccattttcgagtgcaagtggagatatgatactaaaaggtgtaaattatgcatctggtgcagcaggaattcgccaagaatcaggccaacatttggtattattaataattatatcatcctaaattttatgaatttttcaagaaaattttacaatgtagacattatttttgtttttattagtaaaaatttctctaaatttttttagtattttgataaataataactcaattttttaaaataatttatcgtatctaaaataaaattcaaaacattattacattgaataaatgggtgttttttaatatacttgcaattgaatattttgaatttatttttaggtatagtaaattatttataaattttaaaaacccggtgaaatacccattattttactatattatagttaaaaataatataataatttctctaaatatcaaaaatacagatactccattaatcaactagtaggacaaaaatctataattagaacgagcacaatcatataaaaattagacaaaaaagatctcctgatttaaatttaattttccaatatatttatatattattacaaaaatgagaagtatattttgtacgtaattataaattaattaattaactttctaattaatcacatgcatgcatgcaggggggcacgtgtgagcttggataaacaattatggaaccatcaaataacaattttacgtatgaatcacattcttaataataaaaaaatatataattataattataattataattataaatcatcaacaaaagattacttagaaaaatgtttgtattatgttggaatgggaagtaatgattaccttaacaattatttcttacctaaaatttactcttcaagtcatatttatacacctcaacaatatgcttctctcctcatcgatcaatatcaaaaacaaattcaggtattaattattaattatatcatataatatgttattttatattattcttattttataaactatgtaaatatgtattaattattgtttttttcctttaaatattaattagtttgcatgcataaggagattaatcttgtataattgtattggtgttgagaagaaaataaactattctatacatttgtagagtaatttgcggtataaatacttaattttaattcttgattatagataaatatttaaatttaatttttaaggataataatacctaagttatattttaggacctgtcaaattattatttccatgttatttttttattgatatatttaaagttatttttatataaaaaataaaatttaatgatctagactaatcatgaactgtcacatagtcattgacttcacacttaatgaccagatatacctacagaagtttctgaaaaataacttaagtattattactacaaataattaaacttaattaaatatttatctacaaactaaaagttaaatttaaatatttctatcgcaaattattattattattatttttttgtgtgtgtattaatcacttggccaagatgagattttgataaaatagtatataattaatttttattgtagtatatatcttgtaaaatgaaaatattttgataattacctatcaaatatatatcaaaaaaaactgttattttgatactcttattagtgcaatcgagttctacatattttaatttaatatgtaattaatatatgtatatgcagagattgtatagttatggtgcaaggaaggttgccctaattggattgggacccattggttgcatcccctatgcaatgaaatcatttggggcaaaaaatggatcaatttgtgttgatgaagtgaatgaagctattcaattattcaaccaaaagcttatatcacttgttgacaatttcaacaacaaattcaatgattcagcaaagttcatttatgtcaactcttttggaataggctctggggatcccactgctgctggtatatatacctacctacctacacattatttattttattttaaatttaattattataattgatttatatatatagaaggagccaactttctcccgtttattagtagtgcctaataccatctaaaaatagcactttataattagttagcgatatttcgtaaaaattacatacaataatataagactcgatatttaatttactaatatatgacatgttagaaggtgctaacagacccaactccaaacatgaggcaagctaagtttgtacctagggcctaaggacccaaacaaattataatacatatttttttactaattttgaaaaatattatccttttttttttttctaaataggagtctaaaaatattttattttctttcatttactaaatttcaaggctaggcaccattgattccttttgaacatttctaccgacctaaggcccacttagcccaggcccccataaaaaacacattattttccctgattttttgaaaatatcacatatttttcaaatgaggcccaataaattttcttcctaaggcccaatatatctctgagcaactacaataaaacaaagtctatagtatataattacatcaccttgcctatatcctaatctcaaatacttattaattttttgggttttttttttaattt

SEQ ID NO: 382006 - DNA, 2587 bp, Cannabis indica
tttttactgatggttctccttgcagacatgactttcttgaggcacgctcctattttcaaccgcaagcttaaggctagtactacaacaccatctcctgcaatttcccagaagagaaacagtgacatcgttcctactcaggtggttgctatcaaggctcgcgacatcatggttcttcaagagaagttcgttagggatgaattcctttccaaagtcaaggggattcttactaaggacctactgccttgctcaacttaccttgccttgtaatttatgacagtgtttttcgtgggcttttgttgcaggttctaaggatctcgatcttctgaagaaaaaaaactcggttcttcaagagagtgtggagaaagtgaagttagatgcaacaactaagcataaagagatcgaggatcttggaaaagccaagggtcaggcagaggaaaaggtcaaaactctagaggcgcgagttgctgatcttactcacgatcttgagaatgaggaagagatctggaagaaatagtatgactaggccatctctaactacatttaaaccaccctaaccaagctgcctaattttgacttcacagtatctatatagtagggggttgaaatggccaatgcatttcgcaccatgtcgcgtattgagactcaaggattaggaggaaatattttccctaacgatgttgaagtcttgaatactgctaaagtcatagagggtacaagaaaggtcatggacgatcccaacactcctgtcgcttagtcttttttatttattttgttgaacttccttttgagcagtacatgggtactcatgttttgtacttaaaacagcttattttgccaagttattcgaacaatgtatcctttcgaggatacttcttttgttagtatttgtttatcgctgaattgatgtgtgtttttagctaaagctgactttattctcgcataattcttcatcgatctattcacagcttggtgtgatggatttttcctaagtataaacatggaaaaatgtaaacacttcaaaatttttaaaaatttcaaaaactgagtttcatttcattaaatagtcaataatacaatatatatgattacaccccctatacccaggacatttatgaaataaattgactaagtatttatatacatgggagtactattgataataatattttaaactttctccattccaagctcgatcaagaattgagccgttgagatcgaataactgataagttacattgtcaattttttagcgatgagataaggttcttcccaattgtcaccgaatacgccatgcatggagttacgtgtattaggcatgactttttgcaatactagatctcctactcgtaggctcctttctaaaacttttgagttctacgctattgataggccacattttttaaatgggcctgatcgcgcttttcctctagaaaatcgagttggatcaactgattttctgtattagtttcaatgttgaaaacatcacttcctaacgacccgactccaaccttgactggtaccatggcttcacatccatatgagagtgagaaagggtttcaccagtcattgagtgaagagttgtgttgtatgaccatagaacttgcagaagcttttcttgccacactccctttttttcttcaagtttaccttttatagtatgcttaatgattttgttgaccacttctatttgtccattactcttaggatatgcgactgctgaaaaagctttttgaatccccaaatcatcgcatagtttgcgcatttccttacaatcaaattgttttctattgtcagagattaatttgtaaggaatctcaaacctgcaaacaatagctcgatagacaaacttgtgtaactttgcagctgttatggtcggtagagcctcagttttggcccacttggtgaaatattcgactgcgaccactgcatactttacccctccctttccttttggtagcttgccgattaaatctatgccctaaactgcaaatgtcaagggactagtgatagagattaactggcttggtggtttgttgacatacgtcgcaattcattggcatttatcacattttttagcgaaaatggtttcgtctgctcgcaaggtcggctagtaatatccttgctgcataattttcaaagcaaaggagttgccttcggtgtgatgccacaaattccaccatgtacctctcggagaatataatcgcactcatccccatcgatacatttaagcaacagttggctaaaagtcctacgatatagtttgttgtcataaataacatatcgagcatcttgatatcgcaattttctagcctcgactttgtcttcaaggagtctacccattgttaaataagtaacgaatggagtcatccaagtgattttcttagttacatcgacttgcatcatctccttgcaatgaatagttggatgggctaacacatcaacaagaattacatcgagtaattctgcttctcttgttaagaccaaacgagccaaagcatcttcatgagaattataagcacgaggtattctactaacaataacttttttaaattttttaacaactcacaagtataggaaaggtatttgg

SEQ ID NO: 382007 - DNA, 1930 bp, Cannabis indica
aataaaaatttaaataaaatattgagaaaagtatttgaagaaactcaaaagtcaaagtctagaaaactatttctaaatatagtatgaatatttgaggttaaaaaaagaaggatttagttcaactgatgaattattattttatcacattttatcaaaaattttcaaagttggactatattagctacactagtgtgagtgtttatggttggactattaatctttgtcaaatatttaagaaatcacttatgggaaaaagaaaagaaaaaatcatgcttactaggctatatggcaccattatagattatactattactagtcaaacttaaatgtttaagtaatattcgtttatatcacaaaagatttcatttggtaatacttacatattacaaaattagtaaaatattgtacagtttgtgatagcatcacaagtggtaataaataacataatttatatattgataaatagatatagatattaaaagactcaatcctttgatggaaaattaacgtggtggcaaaaatttactttgtaaacaatttatcaaatgttggcaaatttttcacaaaactcctttaaagacaaagaaaaggtgatgtgaagaatttcggtacaaactaccatctttgtctacaaataaataatcactttttaaagaaaagaaggaaaacaagtttgaaaacaatataaacagaaaaaaaaatgacagaagaatgaaaagctcagcacacttccaatgaggctggcctctttatatttatattcaataaataagtattataagaatcatctaaaaagttatactaaacatatacacgtttataagaaaagaatatactagtaaaagagtaaaagttggcagcctaaaatttttcacaaaatctgttatgtcatctcagcaatagtggtagtgggtggattttatttcttgacaacccatctcaaacttggtggtgtttcgactacacctagtttgtccaccaagaaatgaaatatgtaattggtgaggctctttgttaaactatctgcaacttgatcacacttgatcattggatggtacatatttgacttccaaggacttgctaaagactttgtcttggacaaattaaacatctagctctatttgttttgtgcgtgcatggtacactgaattggcagccaatgcacttgctcccatgttatcacaccatgttattggtgtgtaatgcaatggaaaatcaaactctttgagtaaggcttgaatccaagcgatctctgccgaaacttgagtgagagcacaatattctctctatactagaccttgataccacaacctatttcttggacgaccacgaaaccacagtgtcccctagatacacacaataaccggctacacttcttcgattttcaggacaacatgcccaatcggctttcggataccctataatggcaagtctgtcagaggttttgatgtgtaaactgtggtatacataaccctttaaatacctaagtattctctttgcagcactccaacaggttgtagtaggagcctgtagaatctgacttagcttattgactgcaaaagagagattaggtctggtgtgtgtaagatattagagacctctaataattctcctattcgataggattgtggagtggctccccatctgtttttgagaacgatttccaactgtcattgtgggtggaacatggtttcaaatgcatcatcctagttctgatcaagagtttcttgacatacttaccttggttataggtaaaaaccagtctcatctccatgaacctgttggaattattttaccaggatcttagatctactcacaagtatgttatttaacaccctaaatatgaacttctaaaacgatatgaaataaacacatacaaagtataagaaaccttacagtagttgcaatggaatataatgtctcattccac

SEQ ID NO: 382008 - DNA, 860 bp, Cannabis indica
tggctataggtgggtgtgtgtgtcttggagatcctgatttcgagtcccaaataaaaatatggttataatatataaacgcttaaaataaaaaaaaatagaaattaaaaaatacttatttcaaagtcatcatgcactttcccacttccactccaataataaatacttataaatttaacaatatcttctagaatgcactataacaaaccaaatgtagggaaaattatacatggggtatgactattaaggatgattagtcctcaaaattatttatcaagtatattttatgagtgattagtaatatttagtaatcttttttaatagtgagaattatttaattaaaatatgtaagatttgataaattagaactattataacatttattaatggtgtccaacattatttatatatgtaccctttagtaaattaggtaggtaaaaatatattattatgtgctttaatatccaatcatctaatataacttttgtggatcatataaaacaatgatacgttattattaagttttgtgtataaattgagagtgttcactacttaatatttcgaaaaaaaaaattgcactacatatgactttaatttatttgattttatgagaatttacatttattattgtttctatgttttttttcttcaattttagaaaatgttatatatgatcgattttatgagaaaatcttaaacttaattagggtgcgtttggaaagtcacaatgtaattggatttgtgtgtaatttgaggtaattacacaatttgacatgtttgtctgaccatgtaattacactgtaactgtgtaattggaagtaattgagaggttccaattacactctccaattctcatggcccat

SEQ ID NO: 382009 - DNA, 920 bp, Cannabis indica
aaaaatattcttatattattaacatcataaaactttacaatatgataagtagtaggtatagacaaggggaaacaagaagttttattgattgatgaattagtataagaattattttgatctacacttttatttactgatgtaaatgaaagattacaagagtattgatttttaacatctgttacaatagctaggtgacactgaagacatgactttggttaactaggttcatcaccaagtagataaagactatttttaagctttcccttgaccttgtccttaacaaaacaccagtgtttataaaattccaaaaagacattattatcatttgttaatttagaaacactaacaagatttttagtgattgctggaacttgtaaaactgattgcatatgtaaaggaaaagaatgtaaagaagatggtatagtagcataatctatatgaaaaattaaaagcttcttatcatcctctacaacaagggttttttaaccttgataaggaacaaaaatgtcaagaatggagttgtcaaatgttatgtaatttgtagcaccattatctacataccaagaaccaagagtgatcatcaccaaagtcttggatcatagtagaggagtaggcttgtggatcataatcaaactctaattttgtgagacaatgatcacgattctggagcccttggttttggagtgatctagcttttgtcaaatcgatagtgacacgttggagttgtatgaataatgtgtgtaagagctcttatattaaggtaacatccttattattatgacacaaaagattgagtccaatttccgaagcaaagtttgaataattaattagagctaaaattattcctccctagatctctaaatcagaagcagtttatttatctgattatcaaaaagtatacaattgtgatgagacaatat

SEQ ID NO: 382010 - DNA, 2486 bp, Cannabis indica
taacttattaccttactgttgttcggtaggattcaattcagccattaagaaaattaaactacataactgtctattacaaatatttatcttaaaaggtttttactgtatatataactgaatctgacaccttgacgtatgtaattacgtccatattaagtactcataactcatgagcatccccaaccaaaaaaaaatagagttggaaatcaaataagagaacgaaaaaataagaaaaccaagtaataaatgaatggggtgactaataaatacgaattcccccattctcaaaatttgaactcacgccaaatagaatgttgaaaatcgaattaagtagatatctgtagacattaaattcgcataataaataaattataataaaggtctatgataatgcaaaactgctacggcataataatggtctaggtacgaataaaggcatgagaaaggttgaaagattttattttagtaacacgatctggggcccatttgtcggcctgactgttcagcacagcctcaaagtccacacattaaatgactaaagaaagaaaccaaacaaaggcttaaaacaaacaaccacatgtttggcgggaccgttactccaaaaggaccaaaccaaaccaaacacagttcatttcattccttccagtcacgtgcccccacacccttatgtctactaatctatatcaatcaactcccttacaatcaatcacaaccgttagtattttgattgatgatccgtgatttgatctttaaacgcaagacattcgagattaaagtgaaaagacaacaacatattatggctcttaagcttaattaatcatcacaaaagttatccaaccatgagattcaaataattcgaaaacaaaattacaaaatggaaaataaattagcactaacaaaataataaattaagaaaaaaaaaactaggaagagactaaagtgatagagggtagaacatggaaaataagtgaatgaggtattacctcaagaatacttgtgagctttatgattcggtaactggctttctgcagagaatcatatgcatcggagagaatattccggtatctccacccctggtcagataatcggcggtcttgaaaagcatctcgtggacatcgacggtaccctttggagcgattcccacggcggcaagcacagtcacgagaacgtggtttctccagtaagcgaatctacccatcttcaaacgtgtccaccatggaagagcaggtggtttagccagatcttgctccttcaccacctcgaaccccactttccgagccgtttcggctatatcggagtagctccgcagaccaggcaaggcgtcacctctctcgatcccttgaatgatatcaacatgttcagcgttctctcctacatatttgtctgtcgttacccattcgtacgacacatagagagatccaggcttcaaaaccctaaaaatctctgcgtatacctcctccagcttcggcgcgtgacaggtggcttcgatcgagtaggcgccttcgaagctgttgtccgggaacggcatctggaggaagttgccgcaaacgacctcacagagcgaatcgagcccagccttcttgttgtgctggcgggcgcgtttaacctggtattcgttgatcgtgatgcctacgacattggcacgagagtgggcggcgatggctcgcatggggcccccaaccccgcatccaacgtccagaattcgatcccctggtttgacgttgatgagatcgacggccatctcctcgtgaatgcgcgtggcatcacggtgagacttaccgggtatggaaggggagaaatggaaggactggccccatccccactcgtaaatgtcggttactaaattgtagaaagtatctacaaagtctggaaccttctcggcagtttcgatctccttagggcggcggaagaaggaccagtactgcttatagttatcttgaaccttctcggcggagatcgatccgccggagagattgacaccgcgcttgccttgttgttcggcggggcctagaacccatacgaaccagtagagaccgaaggccacaagagccccggtgccaagcactgcaacaaagtccatcacaggagagtgaaggaaacgagagaagggtacggtgagagagaaaagcgagtgagtgagtgagggtgagaatggggcaattaggtcttactatataataaagattaggagcttttgggagcctaattacaaacgaaaaatgtgttttgcttcgtttctgcacgctcctggcgcgtgaatcgggtatctcgttttgaacacgtgggatggatagatagaggacaagaggcgtgcgctcaaattggctttcccccctcttctcatacaacaaaaatatatatatatatatgattgggtgatccgtaatgcatctcttaaaagggatgtattggtgcattgtttcagtatttagaaaaaaaaatagtataattttttttttcatttttatgtacgttatagttattta

SEQ ID NO: 382011 - DNA, 2729 bp, Cannabis indica
tatcaaacaactaattaaacatacaacaaaactcaattacttaaaaaaaaataagacacacaacatacaaattcttaataaatgacttataaaattaagttacatatcttattggtaaacaaattatttttagatcaatttttaaaataactaatttgtagcaaaaggttttttttttttttttatttacagagattcgaaagagcaccaaacgcaaagaacaacaagaagaacaaactgagaaacaaaccggtagaagccagcaagtgacaagaccaaccccaacagggccaacaacacaaaccaacaactaacaggactaaacaagctaactaaaaacactcaaccactaaaggataaacagcacaaacaaaagaaactgaaagaaactataacagccatctgctcaactattgagaagggaactgtcaaaattggacaggtcgatactcccaaactgatttgcatcgagtgcccacttggctaccgcatgagcaacaccattgatccaagaggcctcctagagaccaagctgattagcagagttatggaacaatttaaccaggtcctgcgtacattatgatgcaaagaggtggactgactctgcaactgtttgcagcgaactgacttgactgcatccgtcgaatcactcaggaagataacgttactaatcccctgtgtaagagctgattcagcaccccaaaccatagtagccacttcacctggcagagattcagaataagaaaaccgtttagtggctatgtgaaaaattgtaccttcctcatttctgagacggcagctccggtagacatcctgtccccgattgcaatatctgtattacagattgtccatccaggagggggctgcaaaatacaaggattcgtcatactctccggagagcgaagatcgaccatctccgtgatccttctattggtatgtaaaagaataacataaataagtgactctactgtattgtggatttgattattacactccttccaaatcttttcgaagataattgcggccccctcaaggaaaacattgaaatttatcccactcggagaatttgcatccatcttgaaccaagccagccaagactcccaatcaaggatacttgggatatcggttctcaaatgccaaattcatccaaaccacaatgcccttgcaaagtggaaattccaaaaaagatgcagggaatcctccaccaccagagagcacataggacattcagtgtcccgaatgtagaacagggagattaacttgcttcttgtgaggaggttgttggatagaattttccaccagagcatctttaatctactatggatattaactccccaaataattctccattttacattgttagcatcataagcatccacatttttaaccacccaataagcagcttttatagagaaatggccattatgttctgggagccaaatccaagaatccggggaggagacacgaggaagcgtaatattaagaattcctttggcgtcatcatgatcaaaccatctcctgatcaagtcttcatgccactagttgtttcagataaaattacttactagactcatacctaccgtagcatccaactggggttggggttggagaacaccattgggaacccaaggatggaaccaaatcaaagtagcgtttctatcaccaattttgcgacataaccctttggataagaggcatctcgaatttagaattgctttccaaagaatcgaaacagaaccatttacttggaggtccataaagtcgtgattctgtatgtatttgtctttgacaactctgctccaaaggctattgttatctgttagagctttccacatgcccatttcatgaggaaagccaaattaacggcttccgtagagcaaaatcccagccctccgcagaccttgggacgacatagaaattctcaggcaattgtgtgcatcgatcgcctcccttttagatcaccccaccagaaatcccaaagtgccttatcaatcttcttcgcagtggatatgggaatgacatccgaagaaactacatagtttgagatggcagagccaactgacttaatgaggcatgacttcccagctcttgaaagtaatttggctttccaatcttggacctgatttaacaccttttcaacaataaaatctgtgtctttggttcgttttgatgatttaaagagcggaatccccaagtaagaagcattagccgaaattctcttcatcccaaggaattgagagatagcatgagtcctagcccgaggaacccctctagtgaaagtaatggatgatttcgtgaagttgattgattggccagaccaactacagtacttgttgaggcaatccatgaatgcttttagcctccttcaaagtagcttggccaaacaaaattatgtcgtccgcaaacatgaggtgggtaaccggggcaccgtgtcgtcccattataaaccccttgaggagatccttactctccatctccaagaaaagtctcgatatagtttcagcagcaataataaatagggagagagataaaggatctccttgtcgcaagccccttaaagatttgaatttcccatcaccgaaccattgagaagcagttttcttggagataaagggtccccttgtagctaaaagtttatcatcacagttatatgatatagattaactccaacaaaaaatttaatgtgtcttgactttcactactacaaaaagactttttgcttcagtttt

SEQ ID NO: 382012 - DNA, 3950 bp, Cannabis indica
tacgttctagtagtagagggatctgcttgctcaaaactttcgaaaacagactcccatttacttgtatcaatccctacaaaattccaatgacacaatttagaaaacttgaaagaaagaaaaagagcccatttcatgtggtagacagatagtttttgaaggttcataccgcagccagtgtcgtcgacctcaaaccaaagaatctttttgttgtctttcttaggtgtttcccttgcatgatgaccttgatgcgttagtttcatcttgtgtgcacatctttgtttcttatgttcatgagggaacttactccctgtgctattaaaggtattgaaattttgacaccaccctctaagtatgacatgtcccgctgcgaaatgagtttcgaaacaatgaaatcttggaatgtaacacacttgctaagttgctaccaatggtaattcttaagttcacttacatgtagtgaatttgattgaattgctgattagatttgcaaatatttgtacaactcttgcagagtccccttgaactaatcttggcatgtcatctaagatagaaagtttctaagattagattagatgtaatgaagaaacacaacattgttaaatcttgtacaaatttgtgtttgattttctaagatagaaagtttctaaccaagcaaatttatcgaaaacagaaaaagtcataccagaaagatctaagacagtctccacattgtggtttatgcattgaactgagaacatatcaacaagcccttcaagctctcttcctaagtcaaattcagcttcttccaacacaagttttccagattcaacctataatatatagaatataaaatatttcaatactcatatcatcattgatactaaggcataatcatatcaactttgtgtattcataactcactttgctgagatctaatatgttgttaagaagcctaagcaaagctgttgagcattttctgatctgtgtaactgtagcatattgttcatttgtgaggcaatcatcacatattagaatgtccaataatccaataactgcagccattggtgtcctcaattcatgactgtcatcaatccaataaaaaaattgtcatttacttctcatctatgaaacacaatataatactaacaagtctttaataatttgtctctaattcaatcaaataactcaagactagcccctatgagagaagggtgtgttcaattagtatgaccaaccaatctcatacttaatcgatgtggggtatcaactcaagtcccctattcaattagtatgacgatttttagaaggtgtccaaaaataaattcttacaggctaggcccaaaacggataatatcatactaatgtgagagttaaagtgaagttggataaatagggctcaacaataagagtaaaaatctaagaaagaaacaaaaaaaggccaacctcatattcgctaggaattggcttttgtagttgctagaagcttctgctcttcttcttgcatcaagatgactaatgagttcagctctaagtttcatttctttagatactccattagtaagtataaaaatacaaatgcatccaatcaccaaaatacacaatgatgcagatatcaatataaccaatgttttcaaagctctctcatccacctttcccattatatactttcttggaataattataacacccacctgcattaataacagttacaagttacaaaaaattgagaataagtaccaaacaaagagaaataatattacaaaatttgaaagaatcattaccagaggaagtctctttagttttaggaaaaatgagtcaatgtaatattgctgattaccaagctgagcattctcaatatgaacttcatgactaggaggaaactcattcccatattttctttgtaaccaagttgcccccattcgaataacctcgtcctcagaatcgacagccatcataagtttaggcccttttgttgtgtttctcaagagaggagcattagtagaagttgaaagcaagtaaccttcttgtgatgttaagtaaatatggccactatgaaactcaacaagctctttcataagttgtccaacgctatacaaggcggtggtaacaccaacaacggcgactatgctcttattagcagcatccataacaggcaatgctgctgaaagcataggggaacctgagtatttgctcactgcaacatgccatgttgctacaccatcgggaacttgtgaaagaccggcgatattgatcaaatcctctggtgggataggcctagcttttcccaacttatcgcctgtgattggatcgagtggctctttgtaccatatggctgagaaatttccatgtatggattgatcattccatacttggtgtgatgaaagcatttgggaagcatcatagttttgtccagcacttattgagtagtttgaaagatcagagtaaatgtagaatgtgttgttgcttctgtgatctctatgaaaggcttgaacaaaaccatttcggtagtttattgtgattgcatttagagcttttctgcttgcaaataacgcccatgtcacatccctcattgattcataaagctgctaatgataacataacttttagtaaactaaactcaactaaaacaaacaaatcattactttaattcttacaaataccatctaatgctaagtttgcttggttagaaaccgaacaaagaaaatggaagaaaaatcaacgaatactaagtaatggtaagtttgtttggttggttggaactgtcttttcttccatttttcaagtaatagtcattattctactgaaatagtttccaatactttaaattgcaaccaaacaaaagaaatgaaaatcgacaaatactaagtaatgctaagtttagttggttggaatgacctttcctctcattttgggaaggaatagtcattctgctgtaatggattccaatacttaaaattgcaatcaaataaaggaaatggaataaaaaccgaaatactaagtaatggtgagtttagttggttagaacagtatttcctcccatttttgaatgaatattaattttaccgaaatagtttttcgataaccaaacaaagaaaatggaatgaaaattgtcaaatactaagtaatggtaagtttgatgggttggttaaaacaacgtaaccaaataaagaaatagaatgaaaaccgacaaatagaacaaaacagaaaacagttgaatagaatgatttcttagcaaaccaacctcaacttgttcagcttgagtagtagggttgctataacgtttgatgacatactcagagagtttaacctgagcagttgtgatttccgccgtggaattcaaaatgttccacatcctcaaaatggggcgttgaagaagttcatggcgaagaccataagccaaattactaagtgattttgcagtgtaaatccttgtaaaatgccatgtcaaaatggtcaaaagaccaatcaaaatagctaacataacctaacaaaaaaatcacaacaacaagaaaaataagataaccataacataacataacataatataataattaagaagagagaaaataattaaaaaccaaccataatggcaagacgagcaacaaagacactataatatgaagaaagacaatatgtatttgcatattgaaactcttctctttcaacatctctatgaaaaactcttctaccacgaggtgttatgattgtacttcttctccatgaattggtagcaaaaccagtaattttatcaaacacccttttttagaagagagcccatttagatcaaaagttgtgatcttttctttgttttggaattctcaacaacaacattcatatgatgatgatgatgatcataacaagtgttaaaaagggattttctttctttctttctttgaacttttttctttataaaagtgccatgcattagcacaaacttgttatatgaatatgtaagagagagagagagagag

SEQ ID NO: 382013 - DNA, 1134 bp, Cannabis indica
gaactaaaaataaaaaaaaaaaaaagaaaacaaagaaaaaaaaaaagagctttttagaaatcaacatgtcacctatttcgctttggatagtatttcactttggtgatgactcatattgaaattgaaaagcacaaaaaattacaacctctaagaaaggattcttgaatattggtgaatactaataaaattaaacataatatgaagataattatacaaaaaaaagaaaaacataatatgaagatgatagagagcaatcatataagaacgagagagattataaatatgataacaagttgtacaaatacacgtagatgtattatgagataatatcatgaaattaattagaacctacccataatatgaagataattatcaaaaaaaaacataatatgaagatgatagagagcaataatataagaacgattgctcttatatgattgctctgtggttgtcgaaaagatcacaaaaccaaatacgaactgttgcattccagagattgaagacactacacaaacgaatcctactgcgctagcttgctctcaaaatgtggattttcaatttgggactatggagacttgcccggacaagtctccacagtcgccatgaaaatcctcacttggaactgtcgtgggctcgggaataccacgacagttcgacaattggcagctttagtccgtcagcatcagcccgaaatggttcttctttcggaagtcacattaactgtggaaatatttacaagaatcaccagctggttgcattttgaagggactcactatatccctcccattggtcaatcgggtggtctaggattatgttgggtgaaaggtgttgcttgcagtgtcatctcgtcgaacaaatttgttattgttggagagatttcttcgcacccccctggaattccttggttgctttttggagtttacggccccccaagatatgaagataaggaagctttctggctatctttaggtgatgcggctctcactactattgatccaatactgctaattggggacttaaatggcacacttaaatgcctaaactacgccaattctggtaattcttctcggtatgctttatatctaaggcgcatggtgaatagggtgggtcttgtttgttggatatattttacca

SEQ ID NO: 382014 - DNA, 4175 bp, Cannabis indica
aaacctgcatggttataagattagtcataaacaataagcttaatgggggcatgatctaataaataagaaacacagttattgcaaagaaaaaaaatacattacaaggtaaatttctacttcaattgttgtttttataaattttataaactttgttgtttttaatattgagatttacacctagcaaagctaaggcaaaattcctggaccggctgagtaactttttaataccttctgcaactactaactaacaaaaaacattttcccccaacattttatctcttcatagaaagaaagctatagaaattcaatgacataccgcagcaagcaattgccgtgtccttatatcccacagacgtagatagctatccaatcctggacaaaaagaggggtagggggttaaaaatctaattgcctgagaaaacttttaatgtagaagtcctaaagcaaaacctgaaccatttcagtgatgcaaaaagtgctaattggttaccttgtttacaactatttaccatccttttatcccctagatagtcaaaattacaatgcggcccagtggcccagtagtaaccaacctttcaacccattcaattatctagcagagcaataattatcattcttttctctcctgggaaatcaaattacaatccaacccactttatacaaacctttcaatctattccaacctattttcaagtagagtactataaatttctcaataaggataatataatactactcaccacaagacgctatcactggaagctctgggtgcctggctatcgatctaatgcttccagaacatttgcccaagaaggatcctaacaatttgcctgaagagaacacatcatcattaacactataaaggaagtaattgatttttcaaacaaaaaaataaagacacaacatggaagaatcaagtagaaaattggattattcaatatctactgtaaggtaagagttactgaaaaattactcaaaccctggagtaagatgtaagaggtcacaatttaaaaaagaaattcaaacactaaaaattatttcagaaacaaacgaccaaaatatacattccagacatgaaagcaatcatgcattcagaataaataaactccatgactttcagaacataagataaacagtttacatatatgatgaaactccatttaccagtccgcatgtcaacagaggcaaggtcaccagatccattccctatatatatagtgtgaccatctaaatcttcagcaacagattttataggggtctcccggaaatcaaaggatataacaggccttctctgagcagaaatatcatagaggcgaacctgattgcacaaacgcacagtgaataaaattaccagaaaaaatgaagttaaaataaataaaaaaaaagaatgaaaatcaagaaccttttatgacttctacatgtaaatatttaaaccacaatctcattcctttaacagtgaggaagaaagtaagagaaatagagtgcataatgagatgaaaatgtgttcatttccacagtatcatgaatgtagtattctcgaaacaaaacttctgatagaggatacctgatgactgttggtaccagccacaaatttacgatgatcatctttactaaggaaagtagcagatgtgaaccaagttggggtgaaaatgccaagactgtccttacgaggctacataaatgaaaatgattaaatcaatgtgaggccatacactagaaaaccagagcagatgacactataatttgaaagtgattgatgagataaagatctcacagattttgctgtccaaatctttgagcactcgtttaaatcccatacattcatctccactcccttcctgtggttgagattgaaaaaaatctaatcagtctttgagagccaatgtatcaggtatttttcttagtgaatgatgagaagattccaagtagttttttcacaaattagatacaaaagcgctcaccctccgaataatgcataattttcacttccatccactttgaaacattgaatattaccagatgagcagacatcccacaatcttgaagatcccatcgtggcagaatctgcagatgtgatatcttcaaaggacctcattattgctttcccatttgccgtacaagtaagaaaagtgcaagacctaatagcataaaagaaatttaactgagatcaaagttctatattcccaaacaaagccaccaatgggattgaacaattggaagcttgggaaaggaaatttatacgatgatctaactatagtacaaaaatataggtccatatataatactatgaactcaatgaattaacgagacaagttgtattcccaacttatattatagaaagattctgaaaaatcaatgaacattacctagattcggattccaatctattttttgcaaacaaatgcaatccagcaataggatcaactacaggtccaccatcagtatcaccaacattagaaattgcaaagcgaagattcccattaagaggattgagaatctcaatctgtaagaccattaggcagattcaaaataaataaaagcttcgaacaaacccagtagcaagcaacaaacagaaaccaatatgctgttcctgggatattcaaagtacaatgaagcaactcacagtgccattctttcttgcaacagctaacaactgccacaattaaacgaaaacaaaatacttgtcaatacttgggctttatggagccaaaaatgcagcattatccaaaagaagaaaataataaaattcataatacaataaacgtaatgaacacacatacagggtcgtgtttggcgtccaccattgaagcggtaatcacggatttcgaggcgtccggctcgccccatctctctacgatctttggatgccctccttgcttactccgagcttcaataactataaatcaaacaagaaatttctttgaagagtacagatataaattgctgatgtaatattcatattcgttttctcagccttcttctgccaaaaacatcattgagtaaagtcgtggtagaagccatggacggaatccatcatcgtgctcatctagagtccaatagcaaaaattaagagtaaaactgacctttgatgagaccaagtgcgtcgaaggtgagagctctaagcggagggcaaccggggcattccaacgtcgtcgtgcgaggcatctctgaagctctaaaaccctaactctccttctttctctttctctctgcagacacgcaccaaaacataaacccttggtgttggaggaatatctatttagtccttgcaactttaagttttgcaattaggtccacagttatttctatagtctatactctatagtatataccctttcattataaaagttagtaatttcattggtaactagattgtgttactttcttacaatttactttttttcttgtcatgaaacaacaattcctttttattgtatttaattatgaaaatgaaaatagaggatgaccaatccgaatcagcatatttttttattttacgtcccgtaattcttcctcagtcggtgataaaagagagaatatagtcttgacgagccttactttttttttttccggaagtatatatatttttatattataatacctatttacacatagaaagtaaataaaaagtgagttgcaaagcctaccatgcacaagtactcacacatcatattacaaatacatacatcaaccatgcaataaatctcatcacattttaaaagaagaaggcagccacacaaatataacaatatcacacatacactccaacatccatacaagtccagagtaacttacattcttaactcgaacgcagtatcaatggctagtgcacccttatatactctgttccacttaccacattaccatgcatgtgtggttactaaccacgtccaagtacctagaacatagttaaacaactatatacaatctatcaataaatactatttcactaaaactatcacattctctaatttcagtacattcaacaagtactcaaactatacaaaagaaagtacaagaattagtaataattactttttcttatctcaactccactttaataaaattatgcaacaccttttaagccctgtcattaattagcaaacacttagaccaatataataaacttaggtggcgtttggttggaggtaatgaaatggaatggaatggaaagg

SEQ ID NO: 382015 - DNA, 1807 bp, Cannabis indica
aaaaagttagtaataataataagggcattcaccatttcctatattcgtgttcttgcagcctttatatgtttcatcaccaatctcaagtttcaattctatgccttttagcttggaccacatctcttcccaagagaaaaaaaacacttggcatttatgaagattagaatgaaagaaggagaattaataaatagatattttagccttctttttatgtttgtttaatagaaatctttgcgtgataaattggtacagtttaggtcaagcaagcaaagttgtttgagtgatccaattagggacagagaactagctttattcataaggttgattaaaatattgagcaaagatgagcatcatataatcacgtaacaattattgtatttcctatttctatgggtgtttaaaattaatgtttcccaaatcccatatacaaattttaaatttgaaacttatatggtataaaaaaattagtacctttaaaaagtttatttatgcactcctatttatgtcggtatttgaaaaaatattttaattcattttttattgtttaatagttatttaagatatcttgtaaaattttaagaaactaaaaaaaaacattaacatattgaaaataagatttaaacagtctattttacacgtgtataaaataaaagaatctcacgtacaatcgattatttgaatcttattttcgatgtgttgaatttttttaaatctctcaaaaattttaaaaaatatcttaaataattatagcataaatgaccatgaaataaaattttactaaaagtttctctcatatgttgaaacatataggaggatcactagaccccttttaaatggtgtgttgtaaaagtagcttatgtatgcaaaatcacaataaaaatataatccactattaaaatataaatttaaacaaatcttaacatttttattgatttaaacacaccatgtttaactgggcttacattataaatttaaagtgtatttaatattattttagtatcattttttcaaatcaatttttttattttttctgaaacagaaatcaaaatttattttaagttagagagcaatctatttttcacacataaaaatgataatcaaacacgccatgttttatgacttgtatataatatagttgatgaaatgtatattatagggttctaaattctaatctcacctattatcacttttcaaattaaggtgctcagcccaatctaagaaaaactactttgtataacttgtaaagttatgtcataatttataaggtactatttgtcctttttaatcatagttacaccgttaataacatcactaagtttaaaaatctataattgcaataaaattagatttataatactttttaggacagaaagttaacttgtttataatatatgttagaatttgaggataagatgaatgaggttccatcccaaaaccaattggcaatgggaggagtagccctttcatcttatatatcacaatttatttccacacattagcaatgtgggactaactcttaatacaccctcctcacgtttgggcctggaaagtgtgggtataacgaacgacctttaagagaccacaggaccgaacgtgacatttgaaagaatcccacaaggccaaatatcgggaaacttatgggtgtacacgtcgggaaatttgtggattttgaaaaaggtcaaagacccaacactggaaattggcacatattggccgaaaggtcccaaatggaggttaaagggagagagcggaagtatctgtttggaccggcggcactttggctcacaacggatcacaaacggctttt

SEQ ID NO: 382016 - DNA, 935 bp, Cannabis indica
ttcgagtaccaaaagcaaaagcagaataaaactttcgtatgcaaattccgatgattataggcatggtagaagtgacagaagcaggcataagaagctaacatcaaaagagtccgactgtgataggcatcattatagcagacacaagcagtcttatgattcatctgacgattctgatgaccaatttagaagtaagaacaagcataagcattcttattcacaccaagattcatgcactgcgaggcagcaacgaagtggtaaacatagacataaaagggaccatttgaactccgacgaacggcgccatcatcaccaccaacgacatcatcatcaccatccttagtcttgattaacagaaatcattgttataatgaaaacagttctgcttgagcaagtgctataggctttgaagtggaatggcaattcaaattattactgtcattttaacggggcagcttatcttattctgccaagatcacaggacatattcagtcagttcttgctcttggccccaacacagacgcaatatttgccaatggcaattaacaagagttgcaacactaggaagtattgaagcttcccaaatccgttgcaatggtgaatttacagaaagaattaatgtttagttcaagtagatatatacataagtaaaagggtctattcttccaagtatgtagagcatatttatttttgccaacttatacactaaagcaaaatattaaatgtggtactggctgagttgatttaagctttgtttcaaagtgttatacaagatttaatatttcttttttgcttttttcaacttaagattttgtttaattataagattttattagcgaagtaattcatttctatttctttcgtgtattatgctttttgttttgtagaattaaattgactaaaattttaaattaattataataataactcagtatttt

SEQ ID NO: 382017 - DNA, 1869 bp, Cannabis indica
gatataaagagacactaaaaaaggtttttacggtctcccacactagagaccttatgattgtgagtcaactaaaaactcttaatgtaggcagagtttggatttgtatttgttcgaatttgagatgaatactgtgttagcctatattttaatcattatactatttgttttatatttgatctcttagttatgacttaattcctgggttgtaactgcatttaaatttattttgtttttttttttttttctagtgtaaatatatgagtttaggttagtatctaactatatgttatagttagtatatgttagttttattttctaactttattttggtgtgcatgtatagctcttgccttgctgtgatttttacatttatatattgtgattgtgaacacatattataatatagtaataataattgattccctttagaaataatgtcaagagctatttgtataatttaaaatggaaattaatatacgtacaatccaaatgaacccttctaaaaagagacaataatgactaatcaatgagctattttgtagattattatattcatatatatatatatattattattattattattattacttgtggttataatcaaacaatgttttggttgacaaaataaataaaaaaaacagtattataaatatactttagagcagttgaaaacaaaattagtgaaggttttattcgtggttggataaaccctggccagacatgaactgacacatttgtgtagttaaatgtgaataataaatatatatttaaatgtacataaataataattagagaaaataaataataaagtggccgctgtattaattatcattataaataaatatgtgtttggccccattattaaatccaaagataaacattagggtactttattctatacattatttaactgtatgttatacaaaactagagcttaattaattaataatttcgatatctcattgtggatagagattgtgtcaatcatttttaaaaggacaataattttggataaaaaaaattaaatatttatatatagtgtagtatcctaaatgaggcacgatcgaggccgccatatttatttttataataagtaattaattaatattatattaattaagcacaaatttgttattgtaatataaataaattatgatcacatcatacaatgaatatatattaatagtaatattatatatggattcaaatcctcgtaatatatacgtgtcggatctagattaatgtgtttgctaactagggttcaataccagctacagtttagaagatactgtaatgaagaaaattattatgatgatcataatataatattggataatgaagtattaaaaataattttatgtagaatttttcttttaaatatttgttattgtttcatatttaatgatattttcttatttattttttaatatataattatttttcaaaaatactattatttttcttgtcacttctttcttttgttctccctctctaaaaaagttttaaaaattcaaaggactcaaaactaatgaaaccaaaataaaaggctttgatacactatttttttttaaaaaaaaaaagttaagactcaaaaattctctaatagtaaaatcaaaaaacaatgcaaaaacttttaatttttggtagatatatatcatcggagaggagcaaaagcttttttttgcattattttttgactttgccattaaaaaacttctaagtctcaaatattttaatttttcttttaaaataaatatcaaatcttttacttttagttacttttcaatttgaaacttgtttgaattggactaagaacttttcaagagagtaagagggagaagaataaaaaagaagtgacgagaagaa

SEQ ID NO: 382018 - DNA, 4231 bp, Cannabis indica
cgatataagttttcaaaaacttatatttcatgcagataaatttttaatttaaaaaattagtggtaatagtttttaatgtcacttttttgaaattctgatactcttttttttaataaatctgtcagatgctaataaaaactctacatccaagacaaagctcatcgtctatgtttagagctcgactgtcacaacttatggtctatgtttgaactcgacaagcactcgactttagcgaggctccaccacgagtcatcttttaaaccacggaaaagaagaagataagagagggaggggacttctggtagtgcgactaaggtcagtggaccctcaagtttgggattcaatagacgggaagatctgtggtggcctctattttcaacagctaggcttcatcgacaacaaaagatcatccctcaagtttgggattcaatagacaggaagatctgtggtggcctctattttcaacagctaggcttcatcgacaacaaaagatcatcccagtcctgaacacggttaaggaaaaggagagagagagagagatttggggttatgggatgagggtggggtcggggtgtagtcggagaatagaggtgactataggtatgggagtgaagatcgaagttggctacacgtagaagatgaagaagaaaaaaaaattaaaaaaaaaaaataactacttaatttttttttaattttaaattttctaatctaaattattaattggaccaatactattttaacatatagcaattttgaataagcaaacaaatcagttaaatttaagactaacaaacttacaaaaatcacaacattagagactataaccgccaatttttgaaattgaaaacttatctgtatcaaaaatttttaaagaaaaaaaccatctgatcaagtcaggttcattgagatgacacactgattgaacatacaacttaataacacactttgcaatatacaatatacaagctaccaagcgttatatatatatgcaatattttatgtacgcactcttgctatccaacatcatagtgacgaattcttcatctgtttcatgacacaatagtaaatttatttaccatctgttaaacattacatagagtgttcggctggacggggctggtaagttcgtcgcctgagttgagattctggtgttggctgctgcaggaagattcttgttggatcgttcgggtcgacatatctgcatatcattgagaaaacaagaattaataaaattgttcttattagtttgacaagcgcacataggtcacttacgcgtgtcttatcatctcatcaacgggagtctgtgctgcttgtaaaggatccgtacgtggtggctccggcattgaactagcttgctgctgttgtcgattatattgtctgaccgaagaaatcaagttgaagaaaaggggaacaaatgttccacagcctccttccttgaacaaaatcttgaatgagtgagtggaaaataaagccgcaggttgattttccggaaccacctgaaataagtcatgttaaggcattatgtatcggtaaagcaaggaatcatggcgttttatcagtaaccaaaccaaattacttacaggctccacttgaccagcaatgttgttacagaaaaatattggttgattaaacttctctccgtggacgaaaagctgcatagaaagtaaaagtctatttaagcacaaaccaattaacagttgcactacaataggaccctaaagtgaaatgtgataagacctcccatttggtaacatatgataagggcaagattagggcaagtctgatatatgagaaacaatttgattgttcaggatctcttcttatttctgttttatttggtgagtttaaggaataaatatgttgagagtgtacggttaggatatgtttattctaatccatattgaggcttggctcttgggagagaaaccagggctcgaatttccttgaatatcaattaaaacactctttgttttgtttatttttctctggttttccttagttacctgactctggtgtatcaaatgaaagctgcaaatatttctggtggccagcagcaaaatcaaaacaaaatcactgagtcatgcattttgttagttttaagagctatctattttactggctcccccagtttcaaattatagtcagtaacattctttaagcaaaaataaaatgtataagctatgctctactttcttttaagctaaatgtatattacccatatcttgcggataaagtgtaattaaaatatcaaggctattttaattataagctatctattttacaagctcccccagtttcaaattatagtcaacgaaattctttaaacaaaaatagaatgtataagctatgctcttttttcttttaagctaaaagtatattaaccacatagtgcagataaagtgtaattatcatataaaagcaactttccaacatcatagcaactaaaggagacaaagatatagcaatatcaaagacaactttccaacacaagcaactaaagaagataagaagtattacataccagtggcacatcaaatgcaacaaattctccaactggtttacttgcgacgaataccattctaatatttgacaagtaaattgttccctttgcttttacatgacctccatgatttctgacaacagagatacaaaagtgagtgattcaattcacataaatgaaaaaattgtggatatttcaagtaaaaaaaacaaaagatggtagagtaaaattatatacagggcataacaagaaatgagagattgctgtatctatggatttgattgatcctttgggttttcaagactaacaaagagaactagcgaataaaactaaaacaaataggcaaattgatttgggcagattcaatggaaacagtaaattgaatccatgctttggtttattattctgatatcaaaacatgagagccaatcttcaaaaggacattgaaaatattccatatagaaaattggttagatcaaaaacttcaactaaataatctggcttcatatgtaattaaagagctaaatgtttaatagtttccaatttccttttctttctttcttttcatttttctttttcttttatcctaatctaaatatcgatttcaggtacagaaatcctaaaattgagcctgagaacaacagatatcgatgttgaataaaacatggaaatctggtctaacttcctagtagttatcaagtacatatttttcactaattcgcataatcttttctcgtatagtaacaaaaaaaatcaaaaggtatttccattaaaatttcatctaaatccaaattctaattacgacaacaagaaaaatcaaccctataaccatacagttacaacaagtactggacccaatcgaatctccgtgcagaaagaactagagatttgatataaacatcaaaaatcgatttgcaataaacataggtgaaaatgattgaaagtaaagaaagaagggtttggggaatagaaaactaacccagggaccttgtcgatttcgaattcgacgccatctctggcgaggacgaacatctcgttgaggaaaggaactggcattccattggggaacaattgcgggttgagagccattgaagattgaagattgaagatgattgtgtttggtttggggaatcaaatttaaattctttctgttatcaaaaccgatctctcttaattacttctataagcttccggaccttccttcttcactttcatcatatcttatttataggtgttttttttttaaattaggattatttttccaaccaaaattatgtctctcaattataagatatagaattagaaaaaaagtgattaaatttaacgatttcaataattcgaaagaatttttaataacttgaaaagtttacggcatgatgatatatgttaaagttcaaaaaataaaaattttaattagtttaaattaaattatgtgtgatttagtttgggaaatttaaatatctatgtattaattcggggataattttttccttaattgaatacatatgaaaattgaaaatatgtgacaattttatctaaaacccaatactacccctcccataactcaaccacatctctctctcttcgtctatctctctctcaaccgaccgaaccacaatccccaatccccctcaccaccgcccaaagcgccagcccctcaccaccgcccaaaacgccagcccctcaccaccgtccacaacaccgtaaacacgcaccgatggagacccaaag

SEQ ID NO: 382019 - DNA, 2263 bp, Cannabis indica
ttttgtaagtttccctatctatttgtgccacttgggcttgtagttcgatcataatgagcctaaaaaaaattgagaaaattacaccgaacgtaaaatttataaagtttataaaaatatgaaaaaaaaaatatatatttatatttcttatgaggttttgttgttgtttacatttttatcggtttaattttctccacatatttgtaatatgtttgttttatacaatattctactcttttctattctcttcctcaaagcccaaccccacaaaactcaagtccatatcatgaaatcctaacattctctcccaccaatctcatatcatcccctcttttctctgtactttctccctctaaatctagaccgaggctagttgttgatctatcctcgacgccatgaacaacgactttgtggtgaataatgaaagtcggtagaagatgcaagctttgagggtttaagctagccctaatgtctagtgggtttattgtacatttatttttattagttacaacatatatttgtaataaaagatgatatttatagacataatagtaagttttgtgtaatggttaagctagattacgttaaaggtcaaatgatccaattctacgtccgccactggttatgtctatatcattatgataaaaatgttgggaatacaattatatttcttttttttgatttaagcatttatatattacatcagcataacctgggactcgaacccaggacctccaatacacacgcaccccctatggccacttgagctagcctcaagtggttgaatacaattatataagatcttattatttttcatgtaaatttcctataacattctttctaaaaccttggagttatatatgagtttcagtatacttacagagattgtagcacaacaaaatatcactcatctcattcaatgatctaacccttgttcctttacgtgtagagtattatcaatcattaaacttgaatcaaagcactaatttctacaattttccagaactgtgtgggcaattgttacaacactattgtatcacgaaatctagagagagatgagtttatggcgactaggtttttcgagagagaaaagagagcagttttttagagaatctgaatctaaaaattagtgtgtagaatgctctcctgtaactttcattttataggcaagtgaagagttatttttctctattaatcaaaataaaaaataaaaagaagatacgaatggaaaagtagctacggtagtcgcccctcgcaatgggcctaggtaagattttcctcatttgttcacttaagcctaataaacttaaaaatatgtcatctttttatttttactatatttaattaacatttttttatatgtaaatactagttttaatcgtggaagaaaatacaatattgcaagaggttataacctgcaaaagataaggtgaagagcatcatgtgccaggacaagttcacatcagaaaaatacaatattgcaggaggttataacctgctgcaacctatttttgagaagcaaatctggtgcagaaccaatatacctaaacacagttttattctttggttagcaatccaagatagattgaaaaccaaagatagactacacaagcatacatcatcgacaatgctgtatgtttgttctgtacacagctgatgaaacattagggcatatatttttctcctgcactttctcacaggaggtgctggagcagatgaagaattggctctgctagaatatcaaatcgaaggcctaggataaaattataaggaagattgagaagggaagatattcgaaaaaccagaaaacaggttttcagtgttgttgttgcagctctggtttatgtcctgtggcttgctcgaaatgagagtctatggaatgagaaatagcaacatgcaagccatctggtgcagcagatcaggttgttagttaaaaataggatcagtagtgtcagtccaaaaaaagttacagcaaaaaacaaaagttggattgatagtttgtgaagattgttttaattcttgcacagaacatatatattgtatagaatacataaaggcctgtttggttcttttaggatgtaattgtttgtattggagtaataaaattccttattcataaaaaaaaatactagttttaatgtaacgcccgtattttataattaataaactcgaaagttaattttaataatttatatcttaataaccaaaaggatcgggatcccgaatatcaaaatacaagttagaagtactttactattatgtacat

SEQ ID NO: 382020 - DNA, 1033 bp, Cannabis indica
ctactgtgggatttaccatccctaggagggaaattcccttcgatcatcttgaaatgcagagagagaaggaggcgaacagggccttgaaagggcgtctggaatcggagaggctataagtctgccggtgagcagccgtgatgtcggtagtctacaaggcaaagattgcatttgacatgcatgcatcgcctctagcggggcaggttttagaggttaaggccttggagaactgactgggctacagtttggggcgagaggccgctcctttcaccgtggagctcttggaccaagtggctgggagcgcctcaaaactgcccatggagacttcggcatcctgcatcagtgtagatgctttcacgcttgcttgctctgtaaaacggcaagctgttggggtaagtcttcatggcattggctttttatattcccctgtcttttgttttggaattttaaacttttatcttggttcgatttcttactaggcggccttgcttgcggaaagggccactattgaggttggcgcgctggtgactgaaatagagcaggtcaaggcatcgaaccgtgatttgggccctgacaatgagaccctccgggccaaactcatgggtgccaagttccagatcgagggctttctgtaggccaatcaacaattgaaggatgaaagtgcttgccatgctcgtcttatccaaaatatgaaggctattcacgaccttaacacagagactgtggagcggatttctggtgcggtccttcctccacgtcaggtggtgcgtagccatgatcctcctgttggaatatgttttaccaggatctagatttactactatgtatgttgtttaacatcataaatatgaatctcttaaacaatgtaaataaacacatataaagtttgagaaaccttacagtgggtgcagcagaattaaatgactccttccacttagatctctaacccttgtatcctttatgtagcagagtatcaccaagatctgagcccgaaactccttccttgtgtttggattcttcacagtcttacatacta

SEQ ID NO: 382021 - DNA, 2186 bp, Cannabis indica
agaagccaatgaaggtaagaagctcgctgttatatagtttgacaattatcttatattagttctttcttgttacactctgtaactgtatttattatttacatgtaaacagaaccacctgcgccagttgaggataaaaaggttgccacttggggaaccgatatcccagatgatttagtcttggacgagaaattactcgccaaatctcttaagaaggttagttcaacttgtcgttttgatcccaaagttggatttttcttgtattcaattcaaatcaaattctgaattcaaattttcggttttggaatttttccaggaggatgaaaggaggaaagaagagagagacgaaagaaagcgcaagtacaatgtcaaatggaatgatgaggtaattttcttttcttttaggaacacatacaaatgcaaatcgtgtttagtttagtttacacgactctgacgattcatttttcggttttgatgaaatttcaggtgactcaggaagacatggaggcatacagaatgaagagagtacaccatgatgatccaatgaaggatttcctgtgatgtgttagaataactatatgatataatagcatttggcaattggcaaatggcaccccaactcggatttctttcttctttttttttctttgtatttttaaaattaattttactatattgtatgtacatattcctctgttgctcttatagaatttgcaacttggttgttagttaaatctgacaatatcaaaaacaaattatatatctatattttcatttgaaagaacagttaagagtacaatcataataatcatcatagaatagtagtgatatatgtataagatatttaatctatttttgatcgtattataatcttgtaattttattatatgtatatgagcactctcatcaaacaaaactctgcaaagacaaaaaggagtaatgaaagaacaaaaaaaaaaacaatgagaaaaaagaagctattttaccttctattgagaatgctagacttatcttacatataacatttgcataatataaactatagaacatggttgttaagaatataatgaaatttcaagtagcctaattgtgatagctgtccattaagataaagagaatacattacatttatatatttattttttgaaatgtagatacactagacaattaattatactagtttgaagaaatttttatgtcaatagttaatgtgatatacattaattggaaaaaatatataatgaattatgtactaaatatatttagacaaatctttaaaaactaatgtaagttatcctacatcaaaataacaaatcatgcaatcccatatggataaataaaattaaatttgtattcaaatcttcttatattagtatttgagatttgtaaatttggtatgcatattccaccacacattaccatatatttgtacttttacatgtgtacatgtgtatggtaatcataataaattgtgttttgaatgggagcgaagcatcaatctcttgaagctatctcaagtagttataagagagtgcatgtgtattagagatcttgagttcgagttgcagtttaagacagaataaaattatgaggctttaactttatatacaattttgtaagtatcacattaaaataaaaaaaattggtctcattcccacatcaacgtcttcttctgtgaaaggttcaagagcagtcttctgagagtggttcggttcggctccaattaatttactattattagtttaactccaattaatgtttttatggtgttagaattataaggagttcatttcttaattaattttaatgttgtgatcgtgtttatgtattgaaactaatttagttttttcattagtcttgtctttcgacatggttctttagtcttgtcttttgacacagttttttagtctttttcttttagtttttctggttcgagtcttgtcttttgacatgagttgtatagctcagaatcattatggtgctatggtggaagcattcaagaaggagaagattggatgtgttcaacccaaaattgctgagataataggcattaaagaagcattgagttgaattgcaattcattcgtgggatagagtcatgttaaaaacagatagcttggtgtgtgtccaagtgcttcagagcggtattttatgctttcacaatttgtgttttgtaaaacgatctgcaaa

SEQ ID NO: 382022 - DNA, 1411 bp, Cannabis indica
atttattaaaatacagtatgtgatacatgacaatatctcctataacaatgttcgatcgatatcaatattatattaatattattattgcatttttcttatattctattattttaaaaacacgaatattgttaaaataaaaaaataaaaataaataaaaaaaaagagaataattagaagatattataaaattcctaatccaagttcaattatcagtgtactcatcaatgttaataatgtttctaaatcagtaatgaaaacaaatatatatatatgtatacttatatatatatatataatttgtgcatgtatacctagtaagataggtacttcttgatggggtttaggaaaagggtaggatcgaccagatttggggtggatgataagggcaccgtagacggtggctcgcagccagccgacgtgtgcgtgccaccatagggttccctcttggccggtgatgttgaatctgtaggtgtagctctgtccaggctttatgggacattgagttgcatatgctggtccatctgcccaaccactcagaaattgcaatattccatgcctaatcacacaattaatttaattatcacttaatcattattattattattattattattattattattattattattattatataaacaaataaaaaatattgaataatcatgactatagcttgatataatttactatttttttttaatatagaaaatcccaaaataattgactctcagttattcgtacgtacgcgtaattaaaatttcaacatcagctagctatatatatgaaattcatatattatttgtagcattttatttctaaacaaatttcaacaatgtaccgccctgttaattatttaaaaattgaaaattcatcaaaatgcaaggaataatctaaatctatcccgcttagtgtacagcggcaatgaccaaataattttttggaaattaaaaacaatattgatgaacgcagtgcatatgtatttttaaattcaaaccttaccgaacatattactgttttttttatactatataggttttttttattattattagctaatcatgttcgtaatatgagagagatattattcaattctatacgtatacatatatgatatacataataaatatatatactaaattaatattattacgtgcaaatttccttatacttaattattaaatattcttaatttttatgttatatagttatatatatatttttttgttgtataataataaaaatagagagtagtgctaagatcggtaacttcttgcaaagtcctcattgtactttcacggaatgtattacgtgatgtaccacagcttttagatgatagagttatttgatctgagggctgagattgatgtaggggtaattagggttaaaaaatagtaacgtaccctgagac

SEQ ID NO: 382023 - DNA, 6654 bp, Cannabis indica
attcatcaagcttttcaccaagaataaaatgttcattagctatattagacaatctttcataaaacttagacaaggttttattttcagacattctaagatcttcaaatattgtctgaagttaataaacctagaacgcttaacatcagaatttccttcaaattgtgtttgaaggatttgccaagcatccttaacagatttacaagaaagtataagcttaataaaatcttcacctactctatcaaatatatcattaaagttgtactattggaagcaaataactaattattatctttagtagatcattcaagttcaggttttaactttgaattaccttcgaaatctaccacaacaagataagaccatcttgaaagaattattctccatattttttcatcttgggactggatgaatgctcccattctcaccttctagtaagggtagttagagtcattgaaaagtgatagacgagaaatagaacttccttctataaaaaaaaatttcatagaaaatacaagaaaacgttaaaggatcacacaaaaagtttagtatcatgctctaataccaactaaaaaattgtgcttttgtatatgccaataactttctttaataacaatgaagaaaaaagcgactgtaaagatctacagtaacagaatggaagcttgtttttgtagaacacaaatttgcagtaacagaacataaataagagtgcaaaatataaaaacttgacacaagagaaatatacgtggtaccagtgttctttcaaatactcctggttcatggggccacgtctagaaaatgaaatcaattagtaaagtctcaaataattacaaatacaattgacttaaacaagtttagactttctcaaaagtttttccacaatcctttataatttactttgccaatttgatttctaaacatcaccaaatagtgaaatccctttgtcttttgatgtgtgagtgtttacttcctctcaaagtaaggtttgacaagtcttctcttgaagacccttctcttatctaatggagttcttcaacctattctaagaacaatataggaacaataaacgaagactaaaacctagttgaacactctaggttttcacaaaagaaactctctcctcacaaagattaaaatatgcaaagtgaaactagaagaggtgaaaatatttagctgctctctaggtcttatttatagaccatagaaatcttagagatagcctcgaacacgtcttcaaagatgtacaaaactttttttagaaaaatccctaatttgcaagatcaaattcgtattctgctgcagcaggaccaaacatgaaactttttaatttgctatatacatagcaagaccgaaattatcatttagagaaagggaatgtcaattttttaaaaaataggcaacttttcataaagagaattccttcttttatatgataagtttcataaacagagagaaacaactgaaaacaaaaggaaaatgacaattaaaggaccgaagttaacaccaaaaaaatattttaattgtacaataaaaatatacattaattaaaaatattttgacaataaattgcagaattggactttacaattataagtacccaaattataaaaacaaattaaaaatggaaaaaataagaaaaaaaagataacatgaattaaagatttcctaattttctaatacaaattaaaaactatatattttaaattttatgtaataataaaaaaaataattaaataaaggtaaaattggatttaagaattaccaaatcttaaattagtgagggatccatatatttccttctctctttttaaaaaataaaaataatgcaaacttatattgtatttaataaaatttagatttactagaaagtctcttatttcaatctcttagggctcgtttggtatgccgtataagggtcgtattgtattaaataatatataacactatgtttggattaagcaatgtattgcattaattattacggctaaatattttaatacaatgtatgttgtattatttaatacataataaatggtccgtattagcttgtattataatatttacaaaggatttggggtcaacaccaatctccgacccggacccggacctggacacggacgcgaaccctagatcccggacccgggaccgaactcggaccccgacccagactcagaccctggacccgaacacagacccgaacccagaccccgacccagactcggaccccggacccgaacacggaccccgacccggaccccgaaacccaacgcggaccctgacccaaacccaggacccggacccggtacccagacccgaacctgaacccgaacccggaccccgacctagacccggacccgggatgtggacccagacgctggacccagacccggtacccgagacccggaatcgtacgtagttggtgttgggatcgagtgtattaaaaatatattataactttacacaatcaattaatgcaagtcaataccaaaagattgtattgtattaaataatactaatacaatacaatccaacacaatacaatacaatacattacaatacggcgtaccaaaagagcccttagagttcttaatattttaatttattattaggcgtgttcaaaaaactttgaacctgttttcatcataatagttagtttttataaaaattactgagataatattataactatagcgaatacggttataagaatgaaaaaattaaaaattaatattcccacatatatgttccgggtgccaatattaactaaagttggaattatgactctattagaaatggttgatcacacctaaagtaccactctctggggtgcgacataggtgatttgagtcattcttgttgggcatatgactatgagtttgagcacgtatccgagtaaaacctgacacaatagtgataggttaaaaaaacagaaaaaaaaaaggcttaagaatacacttcgtgttgtaaagactaaaagagtaacaagaagaagacttgtcatataaagctcagctctgagtacgtaacacgaaaccttagccaacgcactatttctctctctctcaaagcgttccaaaagtgagaaacgaatgatgctcagaagaaccatatagctgggaaaaagcaaagaaccaaataaagctttaatctttatgttccctacctatcacatatagtattagtccaaaacgtattgaaattcgtttaagagaagaaaaaggagagacacccctcgatttgaaactatctcagctcttttagttttcttcctctcaaaaaatcagcatgggtatttgcttttcttggtcgaaatcccacgaaattccaatctcttcctcctctgattctcctcctcctagctaccaacaattacccaagagaacccatgaaccatggaacccaacagcatcaagttcttacgatactaaaaccccttcttcttttattcaaaaagggcccatcttgcaaagaccttatgatgatataaaatcgatttacaagctcgaaaaggagttgggaagaggtcagtttggggtaacctatctctgtgaagagaaggccactgggagaaaatacgcctgtaagtcaattgccagaggaaaacttgttactgacaaagacattcgagatgtcagaagagaagtcaacattttgcaacatcttacaggtcaacccaatatagttgagtttaaaggagcttacgaggataagcataatctgtatttggttatggagttgtgctctgggggtgagctttttgatcggattacagctaaagggagctattctgagcgtgaagcagcaagaattttcaggcagattgtgaatgtcgttcatgtttgtcatttcatgggagtaatgcatagagacctaaagcctgagaatttcttgcttgttaacagagatgaacattcacccattaaagccactgattttggactctctgtcttcattgagcaaggttggttggctgtaatattggtctcattattattgttaattatttttacaaatggttctttactttttttttatttatgtttttggctgctttaatttttcaaagagaaaatgatttttttttttcaaatttttttttgaaataataagtctaaacacttaactgatattagtttctatggtgaagttataaatcagtttgtgttttttgggtcacatgtgaatagctgggaacgtatattttaagctctattttcatgaattatattcaacaaaaatgatatcatgataatgactagtcagattagtaagtttgtgtttacatccgaatgaagtcaagagaaccaagtcaagaagtcaaccaagtcaaccattttctaagtaaagacaagaacaaaagtccaatattggtccatctcatgatatgacaacgacatcatttgagtcccagtaaacacgtttagattattttatattattattactattattattttgaaaaaaatgattttgtgtgttcatttcaaaccatattttagttaacataataaagaaagctttattcattaattatagaatctgcataacaaagaaactcttataatgattggcagttcaatgagttcactagaaaaacagagtacaaaacttgtaaaataaacaaaacaataattaattactatgtcaaaagttatgagtgacaattccatttaatttaattttttttaaggttaattaggaattttttttttcaaactttcacatgtaacaaatgttttctgaactttgaagacaaagtttggagagcatgatttagtatacagataatcaatgaattagtaaaattaaataaaattagacaaaagtttttaaatttaacaatcgcaatagtttagggagaatttttaatagtcgaaaaaattcaagtacataatttaatacatgtcaaagttcaaaattaaaaaatcttaattaaccataattaaagaaaacaattttattgacaaaggacatttttgcaggaagagtttacaaggacatagtaggaagtgcctattatgtggccccagaagtattgaggcgaaattatgggaaggagattgatgtttggagtgctggagtcattttatacattcttctaagtggggttcctccattctggggaggtacatttatttcggtatctttcattatatatatatatatatatatatatatatatacaaacaattatatgtgaataagtgtatgtatatataatgaacaattgattatgttagagaccgagaaaacgatttttgaagcaatttgggaaggaaaacttgacttgcaaagctcaccatggccttctatatctgcttctgcaaaggatctcattgcaaagatgttgaggatagaccctagaagaagaattacagctgctgaagcccttggtgagtaataaataaaaacaaaaaaaacaaaaggaattaaatattcattgtgtgaaactaagtttgacagtaattttatttttattagaacatccatggctgaaggaagatggtgaagtctctgataaacctattgacagtgctgttctaataaggatgaagcaattcagggcaatgaacaaaatgaagaaacttgctctcaaggtaagtataatggaataaattttaatgctgaccatattaaataaatagattttgttcaataaattttagtaacatttatgttatgtttggactctgttgtaaggtaatagcagagaacctttcagaagaagaaatccatggtttgagacaaatgttcaacaacatggacacagatggaagtggcacaatcacactagaagaattgaaaactgggttgtctcgattgggatctaagctttctgaatctgaaatacagcagctgatggaagctgtgagtattattatttattattatgaaattaattagcataggattcaaaatcaagtaatttttacgtaattatcaggctgatgttgatcaaaacggggctatagattacatcgaattcattactgctaccatgcatcgacacagacttgatagagatgaaaacttgaggaaggctttcaaatattttgacaaggatgaaagcgggtaattaatacatcttcttcttcttcttcttcttcttcttcttctttaattttcatttatttaattagttttacttttctaatgttacatcaaaattcttaacagttatatcacaagagaagaaataaggcaagctatgactcagtatggaatgggtgacgaagctatcatagatgaaatccttgatgatattgataccgacaaagtaagtaataattttttagtttaacagtttttttttttggttttctaacattaattttaacataatatttattaattttataatattattatctatatttaaaaataaaaattatgtagatattttatataaaaaaaaattaattttattatatatatttaaaaataaaaattacatcaatatataatcacatctatatataaaataaatatatttaaactttaattttaccacaaattttttgctttaaaaatgattaatgatataaatatacttttttttttaagaaaaatataaatatgcttttaataatttgtattttgtacactttattataactatactcttctaactacaaattaagaatgtatctatcacta

SEQ ID NO: 382024 - DNA, 1232 bp, Cannabis indica
gtagtagttgtactccttaaattctggagtggatattatccacatgcgagaatgagtaaatactttttttttaatttctccgttttgtttcaatgagagaggttatgtggaagatgagtaacaactatgaggggttagtagagagagagagagagagaagaagaaaaagaagaagagagagcgatggtgatatatgctttgcctatttaaattactctgtttctcattcaagaatttatacagaattaacccgaatagggtcacgagaaagtgtttatgatatgtaagttcgttaaaaaaaattctaacttttctgaacaaaagttacaactaaaaatacatataattttaaaatgaaaattaagagtactatttgtgcttatttatttcttttaataattagattatattatataaattggaacacaaaataattctaaaaggatggcattttaatttggtgattactagagagaagttagaaacgtgattaagttgttgttttgagagaatttctcgaaaggacttcgtttcagtaacaaaatcagaataactattatctgttaataattagaagattatattaaattattttataattattgttgttatacccgtcaaaaaccaccaaataataataataattgtaaagcaatagtaaatttataatgttcaaatcaacaagttgggccgggtggagtatgaattgtaaccaagatgtcatccactttagtttggagattttttgtaatgatttaaaagtatcttaaaagcacctaagtagtaaccaaaccaacaataacagtgatttccttttcctatttaacaataaataaatatatatatatatataaatttattttgatgttgtccatcaataagtttaaaaaagaaacgctataattaagcgtggttaaaaaaaatattcaaaaattttatttatatatttatttatttatttcaaaattttagatgctagcaatcattaaaattatttgataaacatacacattgaataagagatcattgattatagtctgaatagtgtaagtttgggaatatttaaactcatcatttacataacaatgtgttatacatatggacatcaaaaaaaggcctattttagcgggcccgaccatattattgatctatcttagtaggcccaaatcgccgtgaatttcaataggggtaagttgaaaaacgcctcttttattaatcaattaactaaattt

SEQ ID NO: 382025 - DNA, 1781 bp, Cannabis indica
aatacactactactatatacatataagatgaataataataatttgatcaagagcaacaagaaggcaatgaagaagcaagcaggcacaacagcagcagccgggcagggcggggggcagggcgggcagcagggcgaaggagcccggtttttgggggttaggagaaggccatggggaagatatgcagctgaaattagagacccttctactaaagaaaggcattggttgggaacattcgacacagccgaagaagccgccttagcctatgaccgggccgctcggtccatgagaggctcccgcgctcgcaccaactttctctactccgacatgccagctggctcggctctcaccaccattctctccccggacgaccccaacaacaacaccattttggttaacaacaacaacaatctcaatttctcgtcctcttctgcttcttctgctgctgttactactgctgctgttggtagttatcagtatcatcatcagcagtatcagcagcagaatacgagtgcaacagactgtttgaacattattaataataatactgctgaccatgaccatcacaaccgacgacaacaggaacaacaaccgtcgtcgttgttgatgatggcggccgataagcaattggatttgattaataataatcaaaatcaacaacaatattatgattataatttattgttctcatcttcttctaattcatctaattcttcttcttcaccacatgatcaacaacaacaacaatattttcatcatagctattatgatgatcatcaggagaataaagaagcagccataatgttcaacactactacttcttcatcattttcggcggctcttggttcgggttcgggtttaggttcgggtgagcttccaccatttccggagtctgagattagtagttattattataataataatgacgtttatggaatgcaacagagtcctctgtttagcactatgccatcagtttccgatgctctctccggcgccggcgccggccttgacccttttgatttgggctctgcttcttcttcctcttttttcttctgatcatatatcaaaggccattataatttattaatatattaattactatctaatatgtttttttttgtttgttttgttttaatttgagagatttttgtacttctgcgtgtaatttgtgattatataatatatttttaatttatattaatggtaatggattggaaatgataccttttatatataatacataaattaatgtaaaagtaatggaattttcagatttaagtaatgattcatcatatcatactcatatgatatatataccttagcacattttttggcaattttatgagtggctgagatgacaagaattaacaatcaaggcttttagttatgttaatgagtgtagttaagtaattatccaattcttcaaaacttttcgaatttcttttagaggatatactgtacaatttttcttttttttagttttgtttttaataaaataataatgaaaatttagttattagaaatttacggcataactatttaggtttcactttcgattgtagataaatatttaagtttaattttttacggtaataatacataaattatatttctaaaattttcataagtacctgactattaagtgtcaagtcaatggtgatgtgatatttatttttaattaaaaattaatttaaatatatatcaataaaaaaatgacagatgaataataacttgacatttaacggtcgggtacttacaaaattttaaaaatataacttaaatat

SEQ ID NO: 382026 - DNA, 3275 bp, Cannabis indica
tagtttggtgctttcattgaaagggagttagtatcataactgatcaaacgccatggttaacacgaggagaactccggctgcaccatctgcatcatcaggtcttcctcaagaccccttgactgtagatcttgatatccattttccagccacgactggaattcccatgaacactacagatttagtctatcctgccaccacagcaggcacctcaaatcttatcactacacctggttagagtgacatgagcatccaggtggatctgaatggcatgcccttttttttggggaggaccctccgctagcacctcctaatgaagtaaggatccttggagagtagcccctaggagcaacaattggatctcatctctagcactacgctagagagacatgactaggtattggtgaccttgcaattggtgtgccccatgtggacttgggagaagatcttaagttggccagacttagagaggccatctggcaaactggcctaactgaccaagcccgcactgctgattgcgatgtattcactcagcagagcaaaaattcctgaggtgggtgcatgaccaatagtacattctttgatctcaccaagttgagctggatcacataaccagggaagctagtgacctgataaggatgttcaatcagagaactaatggaagaccccaggttctcatcagagatccactccaaggaagactagttaatagatcagggagggtctatcaaaaatctaacaaacctggttcttcacgaactaggacaaaccttctcttgcatgaaggagcataggccttccaacacaagtgcaatggtcagaatagacagatcccagcaaccagcggcatggggggctggccagggatcgcaggctcaacaatagcccccataaacaaatctttagccagctagtcacatataggagtacccctggctggccagagcactacaccccctccctgaggagagcgagccactcaaaggccaatctttaactggctaggaccaggagcgggtggaaacaaccaaagtgatcatctgagaagtgaaactgatcacttcaggaatttggatccaccaaacactagaaatttgtgtgatctacctcttgtcaacacaccaacaacatcacaaaactggggaatcatgggcagccaagccctaccaagtacagggctggccggccatggacagctgcccagcataagattagttagttagagccaacatcccatcctaggaatggccagccaataccaacaacacaacacatggctggccgacctccaccataaactcctttagagtatggccagccaaactctggcaccttagaacctgcagcccctcaaaggagggccagtcactcaagtttctgcagcaatagatccttctgtgcaagcatagttggaccaattaacggacatgataaagggcctagcttgtccaaagacttcagatcttgagctagacaagtcaaggggatctccattctcggcatacataaatgccttacccttgcgcaaattcaagatgtcagtatggaagatgtacattgggcaagaagacccattggcacacatcaaatactttgagatgccactcgatctccaaaaatttactggtgatgtgagatgtcacatattcctggccactttgtcagaaacagctcagtaatggtactttaaacttgctccaggaagattcaattctttggctgagtttacctgagaattttacacacaattcttgtcttcaaggctcctaacatcgcagctagaagaccttatcgaagtcaaacaatgacaaggagaacatttcaaggattacatccagaggttcatggccaaggccacaaaggtcaaaggccttgcagaaaagggtcgatatacggccatactaggggcatcctcccattgagcaacttccggaaagacatctagaggatctcaaccaacaatgtgaaggatttcctcgagagagcttattgcttcataacacttgaagaagttgtccgccatgcccatctagggcatgtcaataagaagcagttacagggcatcatgcagccccatgacttgccagcacataggcaggtaccaacaactctgcctgaacttgcaaaagcactaggagcaagtgcaataacaacaactctggtagaaatagtggcaaaaaagggaagttcgacacttctcccatgccacaaaactagaagaaaaaggaggagaagtacacatgcttcaccctcctaacggagaaacccaaggcaatctatatggccactcagggaactattccttacaaaaaaccctttcccatcaaaagggaattgagcaagagggacaggtcaaagttctgtcggttgtgcaacgacttcaaccataacaccaatgagtgttaaaatttgaagagggagattgaattcctcataaggaagaacaatccccacttgcattattatgtgctaaacagccaaacgaaggcataaggtgcccggaatggagatgcaatgccaccgctagtggcatgacacttaggggtcatcattggcggacactatattgcaagtgagaccaacaaacttagcgagcactatgtttagacacttaatcacgagctaaaaagcgacatcctatcagtcgaagaaagcggctctaagcaaccaaagcttgcagagcccacaatctctttcttagaaggagatgttgtccaagtcattttcccacacaacgaccccatgttcatcactgcacaaatcaaggatatgactgtgggaacatgtattgtgaacaatggaaccccctccaacattcttttcaaatcaacatatgaaaatatcgggctccaactcaccaatttggcaccgtgcaaccaagtgatgtatggcttctttggccaaggcattgcacccatcgagtgtatcagactacccctcactgttggagaaaatccaaccaccaaaactctgatggcataatttgtaataatcgacgttccctcggcatttaatgccatgatagtataactagccctatacgacttggaggtagtaacatccatttaccacctatgcctgaaattctcaataaggcatggggtaggatgtttaagaggagaccaactatctgcgcgtcattgttacaatttggcttgtacaaagctaagaaaagccaagaaagagaaaatgcctgcgaagagctctgacgaagagcccagtaaagggaaatgaagtccagcccaaagcggggagacatacatagatcctcgctttgg

SEQ ID NO: 382027 - DNA, 609 bp, Cannabis indica
aaaactttaattttactatattcttactatattatttctaccagaattttgatagcataacgactgaaattcataaatcttgcatttttaacacctacaaataacataaacaaatatttcagaatagtatatacacaataataataatttacccatccgatcgcagtatatttaatcatagaatgtagttcactacgaatgaatatttaagatatttaaactctactataacatgcataaacatactaactaacaacaaaaactattccgtttataatacaattaagatgaaaaaaacattacgaacctgaagtagtgcaaaaacaacacaagtgggtagtggtgatccgggcggtaaaacgtggactaatttcataaaaaaaaaatcaaattaagaaatgaatatattgttgaccttacttttagccaacgatattgactcaattaaagcgattagaatgaagaacaataattagaaaaaattaagcaataagaacacagagatttatagaggtttagccctatgatagtggcaatagtctactgcccttttacttgtattacttgttagaaaagaagcaagaagttcttgatctttgtcgaaagctt

SEQ ID NO: 382028 - DNA, 3349 bp, Cannabis indica
actttcaatgaatttgcagactttagaatcagatttggctgttagagtttcttctctactccagcaacgtgtcgccttgtccatggaaaacaacaaactgaagcagcagttggccagagtgcggaaggaaaagttgatagtggatggtaagttaccttgttgaattcttgtttctagttccatggaaagatattgaacaatttgcattggttgattgttttcctgctaaacattgtaatgctcctattcctatctgaagtcacaacccacagctataatattaaaattttcacacaattcaatagtcgaactggtactttggtattcagagagaaggggaaaatagattctaataataaactaaaagcaaaaacataaaaaagaagaaaacttggtgctaagataaaataaattgtatgttgtctggaggagtctagacaaataaatagttaattttggtcaacagactcaaaacagctattcaatgaggttgaatgcaatttgtttgcctttcacattgccatataaaatgcttcccaaaatttcattctgtagattaatgcttgaaagtgtgattagaaggcttttaatcatagtgaaactatgtagtatgtaaataggccttctgtttaagattcatattacgataatgagaataggaatgaaatcttaaacatgttatacagggatgtctgatttgcagcaacattagaatttataactgttcaaatgctgaatactagtaatagtaccttatttgattgtggagtgaattttgaattgaatactttgatatcttctgaatttgtcaagatactagtagcttaatttagcatatttgcttgtcattccataacgcgccacataattaattacctgaatttagttttctaggaaggttttgtaaaatgtccaagagatttggattttcacttaatgatgtatcatttatgtcactgaagattgttgtggaaagttagttacatatgtatgagctaacagttgaggagagctcagtccaatctttgatctcttcatattattatgtggaaggataacatggttattggtttctcatatgctattgattatgcctactcgtgcaggtgagtatcaggtactgaagaaggaagctaagagattgaagagtggtttaacaaattctagtcgcagtcaaattcgaacatgtttcattccgaatcccccagctgaggcaggtagtttagaggccatacaaatgactttagatatggagaaacttaacctttactgaaagtgaaatcgaaatcaattagaaaagaaaacacaaaatcatggtttttgaagctgatagattcaccaccttgtaagactcccattatctaaacccagttcagccttgaaaaatatgtgttaggttaacatgtaataattattacttttatccttgttgcattgtaagaggagatgtattctgccaactgctgttttcttacaatggaagagggagctgacttcatcttctttccagtgacttattctatttccttaattcaatctttttggtggagataactataagtagaaaaatgttttttcttaaccatattcttattgacaagagtggttaatcaacttggtttcgatggaaatagaataattagctcatattgaataccaatttttctgtgcaaaaatcttgatttccttaatgtatttttgcccattgttataaatttgtgtgggtttaatttattttggttggttttgataaattttgtgggattaaaagttattccgatctcaataaattatgtcaccaccaagcagcatcgttctctatagacaactatcagattcagtaacccaaaaataaaagaaagaacaattgacaaacatcggaaacattataaattaaattaaatgtgtcgtcaaaaaacgacatatccagatacattatatcctcgagtatttgatatctaattttcacacagcatgagatccatgaaaatatgaaagaaatatcacattctaatgcaaagcaatcacattcattcgaactaagctgctgaactaaatataaattatcaaagaaaacaaataaaagaccaccatgaccaccattcctagggttatggtaagtaattacagtattacaatttaaaatatgtcattttcattaatagataatgtttctaaagtgggtgaaatccaccttaaagaatatattaattctgattctttcgttggcttctccttcgtaataactttgagatgcttccaggtcatcaaagaagaacgataaattcttttgaaattttctgataaaatgagaacctgtatataaatttaagagaacaaaataaatatataaaccacctatacttggattagtataaacttgatataaaatccataatcaaatgagtgaaataatgaaggggaaaaaaagaagaaggcatgtaatgaacataccatatctgatgaaatatgcaaggttacaatattccaagaacaattgagactctatagaaaattcatcatcctagtaaaccaatttgcatcatatttcttaggtcggtcaagaattacaagttctccattcaacaaatcagatgactccactactatggttaaacttatattgcctttataacaaaaggatgttaattttggagctaaaactgtaacgtttaccattctataatccgtttcagaataataaccacaattctccaaatctaaacttctcaactgttgatttgagattttgatgttctccaacgtcaactcatcgcagtccaaagtcaaattctcaaggtgtggaaagtatgaaataagatcttctaatgacgatgggtcttcaaaattgtactcagctaaaactattgagagatttttgattgccttgcatgcagaaagatttgagttttcaaagataaatccatttagtatcaaagactcaagatttatagcttcaatctgaataggttctatgtttgcacgatatccaagttgtatgaacttgaggcttgtactttgtaaacggagctggtgaactaagtttaacaccatcaatttctcgagagaagggcaacccaacacaaacttaaacatcccgtcattctgtttaaaaccaacacggtccaataacaaagttttcaatgctggaagtctaattgaataagaagtatccaaatccgacccttccaactccaaaatagtcaaatacagtagaacctctatccaagaatacatttgggaccaaataaattatattctaattgagaggttataactcaatagagttacactagaaaaaacaaaattaaaaaactaaaaaatatcaatgtaataataataacaataa

SEQ ID NO: 382029 - DNA, 1938 bp, Cannabis indica
acaaatgttgatttagaatttattacagttggagaagtacaaaaactatgactttgggagatgcccacgagtatattgctgtggacaaccttgccttcctgttggccaatctgacattcctcgttcgagtactgtaaaaatttactgcccgaagtgtgaagacatctattatcctcgatccaaataccaaggcagtatccttattgttcattaactattattaaattctgaatttatttttgcattttcttgaatcttgcctgcagaaattttgaagttttttatttaattgtttttttttcctatttgatttatggttgtttttcatccagaatgaagtttgataggaagctctacttctgatccctttaaagttgaagcttttttttgtgtggtatagtgttcatgggcacttgtgtattgtataataggtttatgatataatgtgatataactatgagtgtcttaaaaagtagattaatgtttacattttcctttgtgatttaatatgattattatcgttgctgttcactggctatcaacatttctttgctagttgcaaaacaacgtatttcgagagagagacttagacctttgcaatataatactgtgacatcattttaatttgtctcacaatttttgattcttgatttacttcacttttaactttatcgcgatattgttaaacttcattgccttctgtttctatttgagagtttccttgacaatttgcagacattgacggagcatattttggaaccacattccctcacttatttttgatgacctatgggcaccttaagccacagaaggctgcacaaagttacatcccaagagtcttcggcttcaagattcacaagctgtgagccccgctggatgttgaagttggaatatgcattcagttccctagttagccccaatctgtggttgtcgcttgcatctttgcctctggcctttcactgaaacgggaatggcatggctcggatgagtgaggtaaaatgcagtattccataaaagtaccacaattgattttaccaaaaaggaaatgtttaaagtgcaaattgatcctattagccgggttaaaacttctttttataatctttaaattttacttgtgagattaacaaagtgtttgtaagccttattatttctcttattttctttctcctataatcctttttgagattgtttgaagtgctttgcatttgcagttctttttattatgtattaccttctttaatgcctagttaatcaccaacaatatccacctttgtacttaagattatggaaaacactggagagacagaagaccatgtatttttttttactaattaatttggtttaaacaggtgtagaaccctctcgaaattatacctactttgggctatacttctccactattgttctaaacccaataactccatctgtatatattattgttactccttgctagtttggttttttttttaactaataaaaataagatatattgactgagaactgagaaaattctctttattttttgcttctcttttttggtcattgatgcctgtaagttctaccttaaaccaatcattaaagaagaatgagttttttattcttaataaataatgaactgttggacattagtagcaccaaagctacaaagtacaaacaataggtaactgtatataacattctatgattgagattgagtatttttaataaagcttcatatcttttttaattcttatagtcaatttagtattgataagattgtaattacaaaattttaatattttttttaaggatatttgcgttgaaatctctaaaatatttacaattattacacatagtcatcttaaaaaagtagtagtaaatgtactttatttcataattttgttgcagtggtactttttaattgttaagtgccagttcaaaaatacgtcgctgtatatt

SEQ ID NO: 382030 - DNA, 2245 bp, Cannabis indica
aaccacataagcatcctcattagattgaaaaaacttaatgatgttgtccatcctcctgaggagcaaagcttgacttgtctccattatgcccaaacacaagttgaattctgtcatttccgtaggagcagaagtagaagttgatgcaacatctatctcatttggagcactaggggatgcaaacctagcctttttctttgtagattttgaggaggtttttctagtactttgaaggtagtaccaacagtaggagcttcaatggactcattatcaagaatctattccttttggtcagataacatcttataaatcaagcgaggaaaattgagattaagcctaggtttcttacattttctaagagagacaattttctcccaaatcatatcagccgaattaaattttgcataagttgaaactttatacaaaaagaaagcaagttcatttgaaatatttacatgattcgagcaaggaaaccaattggacaaggcaatcctcataagaacaacatgatgacatgtgatttgagacatgtgcattgtgtctgagagctctagatcattgtcaccagtgagatacccaaacaccttttggcgatcaaattctacttcagttggttcaacttaaattggaaattgaagagcattagccacatcgctcataatgaaagagcaccagtttcccctgacaaacactttcccaaacatcaaggagtcctcatcaagactcccatcaattatgttagcataaaactccttaaaaattcaatccacataaccctcaaaactgatcaaagtatctaactattttctttcattgaataaattaaacacctgaaatggcttatgagcaagcatatttaaatttttttctcgatagtaaaacttcttcataaaattacatatctctaacattgtcattgtaacaaatataatgattatgaggcttgaagtttttaagagtaatactagagggccttttctttttttgaggaaggacaagttttcaagaaaccatgggtagtttacctttagcattctgttgagcagcaacaggaataggaactggttatgcagcaacaagatcatcttctggaacttcactctcagagctagaatcatcaacagatggccctttcggtaaaaactcttcacttgaatcaaactcaacctctgattcttgatcactattctcagattcttcttttggtttagaatcagatgaagatttagagatttttaatatttaaatgcaattaaaacaactagaaatcaaggttgaatttcccaaataaattttgactagtcgatgaacgaaacaaaatctccattttcaagaattatgaatccccttttccatgcacttaattattggaaacctaaacttaattgtttctaacgtgattaagactgaaaaacgagtatgagatataaaacgtttgtacaccacgaccaaaactttactatatcgtatatatatacaaatatacatagatatatttcgaagcatggaagaaaaatattaactaaattaaaaccacaaaaccacaaaaccacaaactattcaacatctaatgcatatataaatcaaagcagagatataataagctattgatacaaattgttgaattaatttgaaattatatgcatatgaataatcctacaaatgcgataataaggaatatagattgaatatatataaataaatgatcagatattgatatatgtaaattgtactaatatgttaattaaatctccagatctgcaaactgagaaagaaaagaaattagtgaggtatatggttctttcaagctatctctagctcattttgatagttatttcatagagactgagagtagtgactcactgttggaaatttataccgcggggacccgcccctaatggggtggggatttcccgtcttagtggttaatggggcggtgttggggaataatttcaatacccgaagcggggatggggcggggacgggaataatactatccgcaccatatatgactctgatatagatatatataatttcctttttattcttaacatagtatatataccattgataatcatccataatcaaaattatatattatatgcttaaattatgaagatttaatgacgatagtgaactgatgaacattgtggattacatgtgtaaagatattttcttctcaattcttagtttcatctttatttactttttaatttgttgggaggcttgagaggtatgagactatgat

SEQ ID NO: 382031 - DNA, 1603 bp, Cannabis indica
tgtaccttcaccgtgcagtttctgttatgcctagggattattttccaaacttttggatggagatattgcttggaggtccgacgtgacttcaaccctccctttcagaaggaagaaccgcttgaagtttgccacccaacttagtcttcacctacagttgtaagcgtgaagcctttgcttgaatttcagtgcgacaaaaaccttccctgtggaagccggaagaccactatcaaactcaacctgaccttcattgtatattggaaaattttcttcacagcaatgataggtagaaagaacacaaatgtgatattagcatgagcatggttgtgcctcccagaaacgagcttgactagaactttgatacgcgcccaattttcctcttcgggaccagaagtgacatagtagtgccacaagttatgtttcaaataaatgaccaagaatttggaggcatccaaatctctctgctaatttagagggtgttacgcctagctgcgtatgactcgagaactagtagtgtaatatactcactcaccttgttagagttattagcacgccatgcatattaaaccgaaaataagaagcgtttccaacaaaatttcctaagggagaatacgcttgaattccttctttgaaattaaaaattttggtaactctggagatgagatgcgtttttggccaaatttcccaagaagaaaaatctacttgtcttagtggagtccctaaaatttaatttgtcgagttttgtaaagagctaaagactcatattggcacggttcgagataaggaaattggcttaaaagtcattgtgtttccagcaccattcccaaacaagggaaagagcctggactgtatagcacttacggacatcactaccggaactctggagtctatggcaattgcgggcaccactcccagaatctaagagcccaggaggtatttggaaagcgaaagctcccccttctgaaaaaaaccacccctgagctagcgttttgtgagcagtattcccgaacggataactactaagggcttgcaaaaaatactaaggcttcgtgacaacctagtaatttgggaacaagaaattggagttcatggacgccccaactgaagggataaagactagttaaaacggttaaagtgatggtcgttggaatcatacacttcaaaacaacctaacgagaacaacccttaaagtagtcttacaaaaaaaaaagtgaagattcaaaagaagagggtaaaaacctaaagttattacaaacaaaccctgcgattagggcaaagttaaaatgtctctaggaaataaaaagagtaaagagggggggggggaacggtaaaagaaaactactgtatgttctgggtactcaaggatgggtgttgctggaaagattggaagaccctaccccaaacaccctctccacggtctctctataaaggtcgtggacgaccctcatgtcatgtatgaggcgagtttcccgggcgttaattatcttccaatagtcggctctccttcttcaagccttcaatttgaagcttggccttagcgagttaagcgagaaggttcgcattagcattactgtaacgcccgtacatttataaaaatattaatttt

SEQ ID NO: 382032 - DNA, 2077 bp, Cannabis indica
tttttttttttatatatctaaatgagcatattttgacttatttatttcatagttcttatcttagaaagaaagataaaagatgcactttatctcttgataaacgtgtatggacatttgatatttaataaaagcccaaattgactaatcaaaaaaagattcaactaggaattatgaaggaattgatgattggttacttggagttggaattggatgtggtgtgaaaacattaacatcttactaaaatggaaaagaacttataataaaattgtactctcagcttagttttttaacaatttttttaatatatttaacttaaagatttttttgtagtacgaacaaaaaatataatcagttttatcataatacctctaaattaagtttttatttgattttccttcaaaaaaaaaaaagtttttatttgatttgagaaaaaattagttcaatatactattttgtaccgttttaaaaagtataaagtcaaatttatcacttaacaaaatagatagaccaatagtaactttgtaaaatacaaaatcaatgatcgatcgaaaacttttgtaaaacacataattaaaaatggtatttatagatatatgagagaaaattaaggcactattggtggttggtacacctgtaattaagcctcattttaatcatatacattttgaccataaagagattataaaagcatgttcattagtacactttacaatcaattgaaccaagtccaattttccaaaaataagcacaaaaaagaagaaaaattaaacaacacacacaagtaagttagtgtcttctttaaagctatatagaacatgccttcatccattgtccctaaagagaagaaaaatccaaaaacatgttttacttgtgctccaaaatatcatgtgctttaagcatatatggttaattagtgatttcaatttgtaaagtatattattgttaaagacaaaaattaaccaagcacttaatttacttgacctttctaacatatattaccattaatataaattttattccacttttattgtataataatatgaataagaatttgaatatgccttttgattatggtattgctaattatagtttaaactcattttccacataagtagtttttcttagctctctcattttgatttgaccaatagtaagatttcatcttttgatttgctttaaatgtttgagcaacaatataaagtgagaaaaactaaaaaatattaatagtatttttcaatgtcactacaagatattatatcagcgctacacatctcgataaattatcatgaattaatattttgatatggtaatacttatgtttaaaatattgatccatctaaaaatttaaaatataaattaataaaataataaccataacatttatgatatatattgactaattattcagaacacattatctcatgatactgagtactactgatagtactactgatacgtaataacaatatgcaaattaatttaagttcaaacttgcaaatgggacaaatatcaagttccaactattttatttagctttgataagaagaaaaggattttcttttttcttttttggtctttttgacccataaatcttgggattgttgatgttgatataataagagtagctatagtctttatgatggatgggcttatggtcgccaaaacagtctacacctttaagctttcttggcatgggctttgcaacatttgttcatgacaaagacaaacacaaattctattctatataattatatatatatatataaatattgatctatgcaataaaaatattattttattggtttttccaatagaattgagaggacaattccaagtttgaattttgaaatattatccggtactcatgatactacaatgtgattaattaacaaattaattatttgagatctaattaagttcacatattcacacatgcatgaaaacaaatgaaaagatataatatatattctatataaaatatggttatataataaaatttttagtttaacgttggtttttagtttacgttaagaaactaaaaattattaatatcgtattctttattaattttataata

SEQ ID NO: 382033 - DNA, 2484 bp, Cannabis indica
gacagaagccaaaagtgttggcggatagggaaatgatacattttgattcatagcaccaaagagtactagtcatagataatggaagtgaacaaaaaacatactcaaaagtatagaaacagtaaatgctaacacaacttttgtctggagggaagacaagaaaaaatcagtggcatcacagaaggtttgaagacaattcaagtaaaatacttgatgatggcattagaataattactgaaccaaatgattactaagaaatgtgaaatgtataacacagtcaattgagaagcattaaggataattataaaagccaatacctgtaatgacttcatttcagctgaatgtaggctggccacatctctttctacagatttggtatccgtctccagcaatgaaagcggactctaaattcaacttttttgcgtaactcataaattgaaggaataccaacctgaagaaacaatacaaattaataactcaaacatttatgctaaaaatgaaaacttcaaacatagtttttctaaagacaaaaacttcacttatgcatcgcacagttttgtaagtagcaagaaaatttcatctagtttttcaacaccctttaataaaatcttaaaaacattatttaaaatctcaatctacccatttctttttagcatttagaaacactaatactaaacacacaaaaacgaagcctctttcgctgtaatacagtaatatgaaaataagtcctgtcaacacactacaaagctactgggtcaacattccaatggagtcaatgttgcccacttcaagaaaaccccttctcaaaatatcttcaactttctggtgcaacaaacagaagaaaatccaaatctatttcggaaaattctcactttgctaaacttatccattgaaacaaaaccaagctcttcgccaccataagcggcacgtgtttaacttaatgttgctttaagcacagaataaagcaacacaagggcattcacagatgaacagaaaaatattatataaacacatatatttcacctaaaataactacaaatatctgagtcaagctttaattgaccatatggattaagccagatcccatcctaagttaacaatcatacaaattcagatgcttgctttacgatttgaaatattatcggtagtaaatagctttcagtagaagaagatacttgtttttcaaaaagaaaacaaaaatcagttctacaacaaaaacagaggggataaaaacaaagatctagtatatattacctttaaccaaagcttatggacctcccgagtctgaaagaacaagctttatttcgaagaattgaaaaatacccagttcttctttcgagctgaagagtcagaaaattatgaaaccgaaaccaatctcggagacccagtaacagttataagaaattgttaagaaaaagggaagcttgtgtggctgaattgttcaaatgtcaattgaaggctccattaaaggtccagttttggctggtaaactgaggatattcacagcaaaaatacaaagtagattcgagaatagcaagtcggtgagcaatataacattatttcaaagaggcttatagcacgagtagaaaagacagaaaataaaaattatttcaccgaattggaaggaaggaagggaaggaaaagttgtttagcttttatatagtttctattttcatagaaaaataaataagctgagaactttctcaaaagggaaaatatttcttcttaaattattaatatttggtcaacttttcagttaaataaaatatccagacaaacattactaaggggtgtaattttgtaaaagaatgtaacaaataattaattaataatagaggtttcgtaattattaatggatgatttaaatagaattaaattcacaacgtaatagatttacaaaaaaaaaaaaaaacaaaaaaattcacaacgtaataagagtggaaaataggggttggcctcctcgggggctacgcctacgccgcttcgattttttacagcgtttgcaatggtaccacaccacgtaggttaggttaatgggttaaaagaacgtacggatatttagtaataattttggtatagcagagtagatgactcttacagtcactgactttatcgactcacgagaaagtcgctaagtatgacctacaaaccgattacattgctatattgccaaaaatgttgggtaaaaagtagcaccaatttaaccccacttagtaaaggctaaaaaaacaatgtgtaaaatttgacacaaaaaattaataatggctttatttagagcacttttttgtaagattattatggcatgtttactattaagtaatgggaatcaatagtaaggtaatcattctcttacatttgtttacttgcattattaaaattagaaaagggagaagttgattaaataagggagaaaagaaagagagaacttcccccaccaattttgtaagaaatgtcattaagggtaatgaatttttattatttttattt

SEQ ID NO: 382034 - DNA, 1044 bp, Cannabis indica
tttcttgctctttcctcttccatcctcaacatcttttccttttggcgtttttgcatcacataaactcctgcgcagcttgctccaatagaagacatggtatgatggttatttagaaagaggtatatatgtgtaaaaattaaattagtagggtgaagagggttgtaagaattggtgttagctagttttgggttttggtgagttttggtagagatccgaatgagggtttatatagaggttgagaattagtgtggtgtgttggacttgaggaatataaggttgtttacacttattatttaacttgtgtttattcacaactaaccaattatatatggggtattattttatcttgacagccccttatattttaattggtattagatggttttgaacacataaaactataaagagaaagtagagagggagagagagatagagagtaaacagtagtagtgggctaaccatatttgagaaaacctttttatatattaaacaataacacttaaaaagagttttagtgggcttaaacaagaaggtcggcttctttaatattgtaaggagtggcactctctcgtggcataaacattagtttaccacaagtttatgacacgtcagattagaggtattggaaagctgatgaaatggaggctgttttggacccattatagtaggggttagtaacttaataatgtgaatagataagatgcctcatatattactaagtctaagctattaagcactattctgggtcgaaccttttctctttggtggtttatatgtatagtgtattactgtattaaatgtcaaccactaatagaaagaattgcgttatcatacaaaacataaatattaagtactttccatcatggggattaattgggggtgatatgaaccactaattttgcttaattaaatgcaaaaatgtaaggattatatataaataatggatattggttgctccaacagctacttatataattgaagacagtcagacaccgctagtatgtacgtatatatatttatatatttagtagttttacttccttt

SEQ ID NO: 382035 - DNA, 1389 bp, Cannabis indica
tttttatttttttttctttattagagaattaataaatttcttttattaatgcaataaataatacatgagagtacgtacgtagtgtttccttttcttcttggtaaagattattaatccaaattatttaattatttgtgtattttgctgaaaacactaagcactatatatatattggtgttttgatgggatatatatagtattttggagattttcgttaattaattgtattatattcatataagggtgatatatttataattcattatatatcgttacaaagtttgtacgtctcttgagaagtttctcaaagcagccaagttaacccaaaccaaaaaaagtaaaataaaaataaataaataaatgctgtatttggatcttttacttttgaagtttctagatgagagtgcaaaaccaacttggatattattttgttcttgtagctagagacatattaattttttttatatatatattattatagttttcagcttaattaacaatatttttctgattattatcccatttgattatttttagtgataattttttagttgcaagatataattttgtaattaaatgtaatttttaatcataaaaaaaaattattaattttatgactaaaacatatatagtacttaaatataaattatgactaatttaattttagttacaactttaattttacttttagttacaaattttattattattaaaaataaatttttttatagttgttatgtaataatataatattatccaataatatatgtgaccaaatcaatattctttcgaaaaatatatagttttgaaggagatcacgttctttaaagcttaaaccctaaaattggagatgtgtggtgttgactaattttcagacttgtaaattgtaattagtaaatagaccattataattgtgagttaaaaagaaatccacatccaagtttatataacctattttaattacaacaatatttatactatatattattctacttaattttaccatgaatcctaactaataaaaatatgtttttttgactcgaacattgagctcactttgtttatatttataggtttgagagatataaatataatctattctttaaactaatacaaaattttaaagttaattagtaattttcctcctcgaattatgacatgtatcaaattatgccctcagaacatttttggtcgttaaaaattatccatgaactattaagattgttaaatttaaagatttttgtctaattttagtaaaaaaattctaacatagatgaaagtttaagagacatgattgagtacatatcaaactttgagggacatgatttggtagatatcaaagtctggggagtatggtttagtacataaacaatcactgaaacagtaaaa

SEQ ID NO: 382036 - DNA, 4864 bp, Cannabis indica
cttaattgtcaagtcatccataagggtttggtcaaaataaccattcattttgattgaaaagcttaatttcatttgtttgttgttgtaaattttttgtatcaagattctctatatccactagaatctcatttctatcccatttacttcaattttcttttgattttatattcgacgaattggatggaatctggctaaaatggcaatagaactatacctaaccagaggatagtagcaattcaagcaagaagttgtactttctcctaatcttcaacaaaaaattcatagagaagatcttagggttttaactacctacggtgttggctagatccgaagccattacagaggatcagaaggttttaaagttgtacaactgcaattgtccatactccgatgacaattatcactctcgcggagattggagatcgacacgaagggtgacaacagaaatcaagaacccaaaaaccacaaagaccaaggtcgacaatagcgattccattaaacaggagatgagttgccagttcttcccagtcttggctcgaagccggttggagcaactccgacgaaaaaccagtgtcccaataaataatttaatgaattatttatttatttatttatttatattatggaaaatactgtttttaaattaaagttttataaaataaaacataaaaaagacataatataatcaggtggtgtaaagtccacaataacaagtatggaacccatctggcttatctaatctcagtcgtccactaactcattcacggtccaaaaaaaagaaccaccggtggggatgatctgtacagccccaaagaagaaacgctatatataaacattttatatatcatagattatatcaataaatgtaacaataattattgttaattttcatagattgtgtgtgaatttgtttggataattactgtgtgttaattttcatttatttttaactcttcaattttgatacgtacctataccctatccatttcacttgaaataaaataatagggcatggatggatagagcttattcaaaatcctactcatgaaataacataccctaaccatcatccccctcagtgccactgtgttaattttttattacatgactaaatttcaaaaacttctatagcatgatttaaaatcatcacaatacaaatatacaaattatttttagtggaaaaagaatacttcaacaaagttcttgagatgttgctcactaaaaaataattttacatcaaagttcatatgcatgttcatcaacgtttactaccataccatgttcccaaacattttaagatatatgctactcccttagcctattaatcaatcgtcttctatacaactccctcaataacaaactcctttgagtagtctctcctaatgttttttcctcttacacaatccttcacttcactcccttccaacacctttgggtgctcaattttcgctcatatccatacctgatatgggagtaagattgatccaaggacccaccaacacatcttcttagtgtattctgctattcaaaaggggtgccgttgctattcactagggataaaaatcatttcatctctttagtcatcactttctttgatgaaaagaaacagaattatttcatctctttagccatcactttctttgataaaaaaagaaaataacaccttttacaccaaaaattttcttcagtgggagagtacacaacgaagggaaatttgaatactatttgggacagtcctagacccaccaaaaataaacatgagttctagccagcctacacctatgtctgagcatgtacctacacctgcattcaagctatacctacaccagctaagcctccatttgtacatccaagcttacacccacctcatatgagctatacatacccaattcaagtctatggtattcataaacaaaatcgatgcagcaagaggaaattaataatgaaaccagttttgcatgaataccatataaaagtgacaggatacaacaatcctcaagtaggtagcataaacaattcatttttttaaactacgtttccatctaaccctacgatgtttggagaccaataaacgatagcaattgttacttaggagagactcaaacctcagacctagtgggagcaaatcacataactgaccatttgtgctaatcctctggataggagataacatgagttacagccagggccagtcctgacatagtttgggcccttattcaaaggaaacatggtgtaggttaggtatagcttaaatatagatgttgggtaacatgacatcaattatccaaacttcaaaataataataataacttaacgtgaattttgtaatattacccatttatatttcagtgtatttcacaataaattatatttagctcaaaacaataaacagcaacaatggtcgagtaattgaacaatatgatatcaaccacacaaatagaattattagagaggaagatattagtactcacttgtagagtagatcttgagggtaagaagataaatcctttttctgggtatcatcgctatcagttccaaggctctcaagctgctggtcaatggctgcaggaagtaaatgtggatgtgtttgcaaaatttgggccaaaagctggccaacaggggattcaaattgaagaggggcaaatggctctaaatcaccacttgaagactctgaggctctcatagtaacatctcttgcccggtacttgtacaatccatttctaagcttgggtagataaaaagaagggcagctctagataccaaaaaaaatgtagtcaaaacgtcaaacttcatattaagagcaagaataataagaaaacctgacaatagctacagacacatgtagagtaccctaggaatgtgatattatggtattgaggtaaggtatctatgaagtggcccaaaaaaattacatgtagaagatgatatttagaaatggctgtgaaatcttgcaaaataaaatgactagaatacttgcttcgcatttttttcccaacagtcagcttgctttccaaaactaacgaatatcaatctaattttcaggcgttgtgtaaattgtgacccctcacccaaaccataattttgtgtttccttgaaagagtagcgacatatattattacagctaattagttatattgttctatgtaatcatcaagaaaaaattgaaggagaaaaaacagtataataaattagcaaaactaaggaggacggtaaagtttcctaatttcagctagtaattttggcatgttcctcttattaatatatatatatatgtatttaatataattctatatctaagaaaattttatcaacgaattagtctgctgtacaaaaattgcagaggaaactgggggcagtctatctaaattggaaaatccttaatacagtatggtcaaacaaaaagaaaattaaaaatatgaatcattttgcctcaaacatgaaaatccaaaagaaaaaaagaaggtctaaaaacgttgagcttactctgaaaaaagcagaagaaaaaaaggagttggaatagatgagtgatgaatgacagtggaagtgcctcgagtccggagctttcagaccaccgcccttaggaataacaaacgacgcatcgcttactacaccataaacctgcatttcgttctctcctcaccacacacacctctgcagaaactgtttgttccttgggtaaatttttttttttttttatatatatttcagtactgactgattggctaccattttcctttacttttcttttcttctcttctcttttctctactttattaataaataaaaataataattctaaaagagcttagaatctaaacttgggccctagttaatcggtgtcccattttgaagttctttggcccaatataatagctgaaactgaaagggactgttagaaatggaaatttttatggcttttttatcaatactttgtaaaagttgggcaatatattttttgggataatttcaaaaaatagagaaagaaataggacaagagaaaagacaaagagatgaagagaatgagagaatgaataaaaattttctcaatagtttattctaataggggtgggagttttatttacaccccataaaatgataaatgtactcttaaataatttttaaaaattactcgtaatatttttaaaattttttcctcacatataataaatattataaatattttttcattattatcaaatatataacaatagatatttatcatttactatgtttcaatttgttgtcccgattttctcccaatatacgtggccatctcgttatgggaaacgtggcaggttaggctctcagacccagatataattaaagaagaataatcacttaggccaatcccctcgagatgattcagtaactattccgggagctaggtccaagtcctaaggggtcctacttcactttatctccacgagctggatagcgtttaactcttccaaatttgtggtaccggaagtgaactgtcagctagcatcgaggaagcgtctaggaacgcgtatgagaggacgtgtcagacgccataaaccaatcttttagcaattacacgataatcaaggatgtaagtgacgactccatcatgaacaatcatatcaatcaaggaagtgttggaattattttatcaggatctagatttactaccatgtatgtttttaacaacctaatatgaatttctaaaacaatgtaatttaaacacataaaagttatgagaaacattatagtgggcgcggcgaaattaaatgactcatttcacttagatctctaacacttgtatcctttctgtagcaaagtatcaccaagatccaagcccgattctccttccttgtgtttggattcttcacagtcttacatacta

SEQ ID NO: 382037 - DNA, 3722 bp, Cannabis indica
aaaacgaataaaataaaaaaaaatacaatttttatttgttcttttatttattttattttaaattattgaaatgtcatttttattataattatgtttttactctttctaaccaaacactatttaatagagtgtgtttgttatgtgagtttgagttagaaaaagtagggttagagaaaatagtcttaaatgaaatatgtaattcaagtgttggagagaattaagattatactattttaatttaaaaattaaaatacacttagaagtacaaacctttatcattaaatttaatttaatttgacattttcattcctatcaaactaaatctcatatcaaacgagttattatatcaggttctacataacttgatagaatatcactaataaaaagtggtattaggtgcctctaaaaataactttttggggggcatttgctgcccaacccaaccatcttcgctgccttgtggccgcgcttcatttttggccgtgtcttcatttttacagaaggaaaggagtaataatatgtgtcaaaatatattaaaagtgatggataaattttttcaacccaagttttaaatacctctgtaaaacactcttacacatgtcaaaaaagacttgactagagcagagtttggccgagaatgataacaaatttaaaggaattagaatttgtttctgtttctaggcatgtgagttggaattccctttagcgttttacaaagctttatattgtttaaaattattttagagggatatgtgattattcactgtgatttcattttcagttttatgttctcagaagggtgtcaatcttgagtttatgggtaaaaaagtggagctgggttgagcttatcttcttcaaggatgggaattagaagaaaaatttagatacttttcttatttttaatattcctagcaatagtattagtatagccatgaaactaagtttctcatacaattttgtggccccaaaattctcggtgttgatgaaacccagtcttattcgtaattttcacaaaactgtttgctgtttttctctaaaatcatcaccacccaccacgccaaaaccccaaactccactctttctaaggccacctatacactctgctaccttgtctgacctgcaaaaatggcaccaatgggccaaaagtcttgcttcctctgtgggaactgcatttgtggatttagataatggtccggactccagccttttgtgcagagagctcaagtggcttatggaagatgccactgaagaaaggttaatagcttcccaaattcatagtgaaaactttcagacaagtgttgggttaagggtgagcctggaagacctttacagactatggaagcagaggattgaagaaaggaggcctttccagtacattgttggatgtgagcattggagagacttggtgttgtgcgttgaagatggagttttgattccgaggcctgagactgaaaagattgttgatttggtgggtgatgtagtttcaggtaatgaaggattgagagagggattgtgggttgatttggggactggaagtggtgccattgctgttggaattgggaatattttgaagggttggggaagagtcattgctacagacatgagccctttagcactagctgtggctgcttttaatgttcagaggtatgatttgcaggttagttttctgctagattgattatttttccatgagcattcaagtacagatttccattcagtgcctctcaggtttttcatcattttcagtgaaatatagattaaaacattgttatttgttagtgtgttggtatgtttatacatgctgctctttcccttttccatcaaactttaatcctttcttgtcatcttttgatgttgcaaacgtataatgagttagtttagaataaatactctaaacataagtattataggcttcaaattatgaacgcatttcattgttctttgatacttgtacatgatccacctaactttaacgtggcaatcaggatgttattgaattaagacaaggatcttggtttgaaccattgaaggatgtggaaggagagcttgcaggtattataagcaatccaccatacattccaagtagccatatttctgggctacaagctgaagttggtaggcatgagccaagaactgcactggatggtggtattagtggcatggatgatctcttacatctctgcaatggggctgcctctatgttaaaacctggtggattttttgcttttgaggtatttaatctctattttataaaaataacacctttagttctgccaaagtcaaatgcctaacatacctatattagctgcagtgtagtaacttataaaatctagtgggaaagagaactgtgaatatattggcttttcaatctccgttcttagtaaacagtgctattttcttttgttaaaaatttatctaaacttcccatattttttcttttcatataattatagaataggtatgtcaatcatgttccatcttccttatatatagtacattcagttgtgaaactgaacaatgaacatgttcaacagtaaaagtaattaagcaatggttatgtagctgattattttatgtttttgttatataaatcaatattgtacatgaagatttcttggcagattgccttgttatgataattttcaattctgtagcctggtatttcattgttgagctctttatattcccttaacacagaaaaaggcaagcataaataaatgaatataggaagcataagcataaataaatgaatataggaagcatagctacatattaagtatttaccttgctttgtgtttgcagacaaatggtgaggagcaatgcaaataccttgttgagtacatggcaaatgaagctggagagagtttttgtagtgtaaagatagtcccagactttgctggaattcatagatttgtaactggatttcataaatgattaattttttctttgaatatcggacattatcaatcgccaaagaaagaagtatgcgcgtcatgggatgcttgatttcagtccatttttgcttaaatgattaacaagcgatttctttatcttacaagaatgaatccatgtgaacttgcaccggaaatagtcgaattttaaaaccaagtcagtttatcagagttggttaaaggaataagctaccaagatttgatgcaagttgagctcgttagtctcgttactagtaataattgtccattggagttgaaagagaagaaatgtaaagatcgccaagttgaaattcttcctgttatacaggtgcattaataagtatggaaacaaggattaaggatcattgcctttgaagagcttgtattggatagagaaaaaaaaagtgagaacggatttgccaacaattttccaaatactttttgacattctagttagtgccagtataagtaggtacaaggtaggagacttatggattaacgtgagccttgtgtgaatcctctactataatataatacttaggctaattagcaattttcccccctccgaactttgacatgtattaaatcatgtctcctgaacttttttggccgttaaaaattccccccgaactattaagattgttaaatttaaggacttttatctaattttagtaaaaaaattctaatatgaatgaaagttcaggggcatgatttaatacatataggagcatgatttagtacttgaaacagtaaaattgaataaaattagacaaaagtccttaaatttaacaa

SEQ ID NO: 382038 - DNA, 1731 bp, Cannabis indica
atatatatatataaagagagagtctcttctatcctccaagtccctattggtggtcttaatgaccatctcatctggaataaagactccacaggtattttttctgtcaagtcgacctatcatcttgctaacaatgtgtctctccctccttctccctctaactcatctttcatcaaaaaaaggttgactacgttttggacttggactctgaatctttctcctaaacttaaatctttctcttggagggcttatcaccacattctccttgctgccctcaatttgttcctcaagaagtctctcccaaacccttgttgctctctttgtcgctgtcctagtgaaactgtgactcatgccttgctagattgttccagtgctgctaagatctggaaagcttccccacttagacacttttatgttactcatagatatgttgacatcaaagactttttactctataatttttctcacctgaataaagaggacttatgacttttgttgtatactatctgggcaatatgaactttagaaataaaaaaattatttacaaattataatatgtctcctgctgatgttgttgattggattaattcttatcttttagattacaatgaagcccaacttaatttgaggaagttttatccatctaaggccttacataatcctggcaagtcgagacatattcctccaggtttctatcatcttaatactgatgcggctctgagttcagatcaaggcaagttaggttttggggctgttatcaaagattagaatgaaagggttgtggctggtctttctattcgtgctcttggtaattttcagctgttgatggtcgaagctttagcgctaagagcaagcctagtctggtgccaacatatcaaaatacccattgatgtcattgagactgattccaggcttctagtagattgaatttatggtcaaaagcgagatctatctgccctttcaaatgtggttgatgatattaggagttctttgtctttcttccccgatgttagccttcgacatgtaagcaataaacacaactacaatgctcatcttttagctcgcaaggccttggggctagaaaaggaattgagctggtggattagttccagttttgtgacttcttctgttgctaaagttactttcttttcaaacaaaaaagagagagtctacaataaaaatagaagctcttattgcggaagcaaggactacaagaaaatgcgaaaaatttagaaatatatagattaagaatccaaacagcccaaaaaattaatttattgtactaattacaaccttctcaactcgttaatagactagaagaaataaatatgagttgaaataagtgtacacgattgaaatattaaacttgatttaatataattaatttctaaaatttttttattgctactaaagtttctagactacttttataattactaaagtgtctagagtttttttgtttgtttgagtactcttgaattttctagaattatctttcacttatgttagtagagggacgtgaatcctctgtcaaaatttttagtctatccctctgtctaaccaatcaaaacaacccaagtcattaatgacttagcaaacacttacttatcatatattcattccgttagtttgttattccctatataaaatatataataataataataataataataataatatattatgtaatattataatttagagaaagaaaatagagaagagatgagaatt

SEQ ID NO: 382039 - DNA, 2681 bp, Cannabis indica
atttaaatccatatccacatgtcccctattcataacaaaaacatcctggcccattttcccttctacaacaaacggcccaccctcacccaacgtatctccctcacttcccatataagtcctccttcttttattatcaattataaccaaatcatcactgattccctctccctcattatcctccaactcagaattgacaacacatcctatattccctcctaaaatctttcctatcccaacatttgagttaataatagaattattacctattataactcctccacgatttcctccattaggcacctccttgaattttgctccttgatttgctccttgagattctttgtgacttgccggagatctgactgttgtttccaccggctggcccatactatcccgaagccaccgcgcaccgatttgacgattagaacgacgatctggagccttcataaacatgccatacgttttgctattgtttctaaaggttcgtcgaatagacgatggcagaatttttctgaatgtccaattacgccacagataaaacaaaaggttgggaccctctcatatttgaaattagcccagaaccattcctccttgctcttgtaaactcgcatacgtcgtcggagaggtttttcaatattgatcagaacccgtactcggtaataatccctccatatcccgttgaaattctttgggcatgatgatacatactttccaatgtatccccccactgctttgagaacaatatccgaacggaaccccacttgtaaatcatacacttgaacccatatctccatcatgtttaaaggtatggttcgagggttatctccttcatgcagacgttggataataaaaggagctcgattaaacgtccacggcgttccctccaaaactctactaatatcgacctcatgaaaaaactgaaacaagaaccggtttgtttctagctctttaacatacatccctttcaccggtctccacaatgaagccataacattttttagagcatcaggatcagccggccgatccgacaacaatctccccgccaaacaccacctcgaatcgaattcatcccctaaatcctcagattgatcgaaccagacgccagtttcgtcttcatcttccaattgtagatctgtccatcttctttccacctcctcactatctcgactactagaagccataaggaccaagagttgcagtagtaaccaatcgtaatactcgtaactaatttgtcactaaaaaacaccatacaacgaacatgtcagaggacaagactattatgtaaggtttttcatatttatatatatccatagtcatatttatatataactaactatatatataataatagttatatataaatatgactatggatatatataaatatgacatttatttatttatattaaaaatacaaaattattgatccagtccacattttgatttgggaccaagtcttgaattggaactactttgtttggttgtaatttatagataaagacatacacttgtatattgaatatctactttgtaataaacaatatggaccataacaaaatcaatacgtgtcatcatatagtattgatagatatttaattaaaattcatgtattattatttcttttttgaatttaacatagtagtactaaggacaatagggttgtgtacatcaaattttgtaaatcgttcaaactgaataattcactcaaattgagataattcgataaataatgcaaaccgaataactagacaaaaatataatccatccaatttttatattggacaagttaaaaataatatcaacttatccaatcaactcgaactaactcgcccaactccactcgattaagaagattttatatatatatatatttacatattatataatttacatatatatatatataaaatataaaattcaattactttttttatagtagttaattttaactttgaattcaatttatatttatttgttttattatcataattacctaaaatataataattagatgtaaaaaaaaattagttatcgatttggataggttaactcaactaaattgagcaatttcattgcgtggattataaattaattttttttaattaaatgggttgcacttatatttttgtaatttaatttttacattaagctgaataaaatatagcataaattaaccaaactgagtgacgtagggtactgatattacaatttacaaataattgaggagcgttgggtaataactcatacactttctccttttttcattccttcctagcttaattaatatattagttttattaagtatattaatgtacttactaattattggaattatattttttttaattaagtgctttcgctgtccatctttattattagaataataataataagtaaagattgttggttcaacaaaagactaataaggtgaattttgagtttgacttaaaaggtggtccatcaaaacaggctcttaaaatacactgtttctcatctcaccaaacatgcttcatcatatcatattacataataataaaatacttgtgtaccttctcactccaatatggctaattctatggtacaatctttatttggtgtggatgtgattgtctttttataagcgttggagtattatgacataaatacttaagcttaattctcaattgcaaataaatacttaa

SEQ ID NO: 382040 - DNA, 1325 bp, Cannabis indica
aaaaattacgtaaaaataataaaataaatctaatttaagtgtattgtgtaaattttcttttaaacacaatgtaatgtaaattaagtttaattaattaatagagaaagaaagctcaccaagcgaggattcttcggtttgacataagatggttgcattagaactttgaagaaaggtttgttcacaaaacctttagctttatccaaagcttcaaacttttccattgatttaattctatcaagtgttctactttttctttctccttttaaataaaatgggaaaaatataaatacacaaattagcactaaaaatccctaaaaaaaacaagagaaaattaatttacatattttcctaaccttgttttgatgactggcctttttctttggacattgtttggtgtattggtggtggtttagggtaatcaatctccatagttgtgtaattaaatattgaagcttcaaatgtagaattacccaaatatttaaaaaatatttgatagccatacaatatattatagtgcttaaaaaattcaggccatccctcttgtagataaagttgcccatcaatacaagccaaccccattttccattttgaaccacatggaatatttactaatatttcttttgataattcttcgccatgaattctctgaaacttaactggaatatgctgcaatgtatgtatatataacaaaagaaaatattaagattctcattatgtaacataataacaaaaaacaatatcaaacaatttaactattagaaagttgttaagttggttacatttgtgttatgagagttagagtgcacctagctagggttagttaattagtttctatttaaggacttgtaatcactttgtaaatgttgttcaaaataataagatcgaacataagagagggaagtgtgagtgcgggagttcaaattatctgatcgaagttcaagattattgtgttctcagaagaaaagctcgagctgagttttcgaggggttttgttaataaatagtcatcttttgagaaatgacaaatctcccaaaataaattaaagtttcatttctcatttcatattcattaatttataaagaattatatatttatttagaagctctatacatgttactaacaatttactaagctcctattgtgacagtcaataatagtcccgtgatccgtatggggaaataccgggtaagctgtgcaatcccacaccacctggggaaggtcaagtgtaatgattctgaggctgtgtaggtatgggactacacagttgaagagagcttaaatggattgattggtactacctatatcaacaaggtgcatcttgtttt

SEQ ID NO: 382041 - DNA, 3005 bp, Cannabis indica
acagctggggtctttccgatattgaattggaagtgaatcattacctttggggaacacaaagacatctacccttgtgaagaaccttcgtgaagaatcggttccccatctatgtttgacgaaaatgaaccccgacatacagcatacccctccgccacgtacaagatctccgaggctcgggggatgtgtgtgaggtgggttagttccgttcggtgcgtagtcaatacgcgctatcgatactccgagagtgttgagccccggtaggttttcgacggacacgtttgtcacatttgatccgaatgcgttgtctgtgtttgccgggatgttgattcctgagatgaaaaagtcatctgctttcaccagctccggcttcttgcagaatttcccattcacgaatactacattaaatgattgaaataatagagaaaaatgttaatttaatttgcatatatattatttaatcaattttaatataatattaatatatagtaataaaaaaagtacatgatgataaactcaatatggttggaataatattttcataagaaataatcaatattgataattagataccgctaaaccatttaaaatttctaaacatttatgtgttatatctaatcaaatttagttatatcttaagtgataaaataattatctatggtggtgaccggtgatcaatggtggcgagtttctgtttggcgggggtccgaaaccattaacagaggatgaaaactctagatctgaagggaatggagtcggtggggatttgtgctggcctaggagcaagcggtctcagttaagagggagcaaatcgtgaaaaaattaatttggtgtacacaaattactaataatcatattatattatatatatttgatatatatatatatatatgtgaattttttttagtatttttagggctataaccccatacttagaaaatggcttcgtgactggtcttgatcgtgttcggatgagctaagaatcagaatattaatgaagttgaattaaatttaaaatggataaaaataaaattgataaaaaaaattattaattttgttttcatcttacaatgaaataatataaccttcaatttcagaatagaataataatccactaaaataaggaaaaagtaattctattgaaatgatattttaataattaaaaatacaaccaaaataaaaaatctattttattttattttttttatctaaataaaatatatatttaaagccctacaatttttggaccttagcatttggttgaatgtaatgaaattaaatggaatggaaaggaaacaatttcatttcattattcctttgttttgttgcatttaaaactattggaataccattgcaatagaatgacatttctatcattttgattaaatgattattccattttgaaatggaaggaaaaaccattccaatgcaaaatttgaaaaaaaattaataatttttttatcaatttttttatgcattttaaattttattccattccattcttattccaatttttattccatttcctattctctttcttattcttatatttttattcctcccaaccaaaaactacctttgtctctaattgataaaataaacaaaacaatattgttgaataagtgttgctaaatatatatgtttttttttctttgtaagtagcagttttattagaatatactaatacatatttatataaatatatgagtaacatgagtaattagtaggaacgtacacgtatctttgggatcatctattgctacgcaaaagtcctgaagagggttgggatcgaatgcgcatgccatgtgagttgcccaagccaaaacagtgagcgccgagatcatgagatgaaaaaacctcttcatatcgatcctataccttaacagttgtatatctatataagattcttttcctattataattaagattatgctagctgccttgtagaaatcttggtggccaagcatctgtatttatagatccatgaggcatgtgtgaatcgatcaatcttcctcatctttctcaccgcatactgttcctgaagaagatatggatcgatgggtatctataaaattaatactggccggggcgcccaaggtgtgtagtctctatatattacaatcacatacagtagtcacattaaattttgcaggttggatattatagcttgcttggttaacttccttttttagctagctagtgttagttagaacatttcatatgtactagcataattaaagttgctcacacgttatgattggtaatatttctatcaattcataatgggattagacataacctacaaaaggctcaagaattcattaatacactcttaacgtctttaggccagtccattaaacgaagacatctctctctttgggtatttaggctcaataagcccattatttctcataaaaaaaagtacaatccctttcattatacgtgtgaaataaaatagtgatggtagaagatggagacaatggtcatgttcaccggtattcaggtttttttttcttgtttcttgtgtaaatgttgtggagagctcaaaataaaggctctcaacatcaactattcaaagtatgtatccattatataatatcaaattggtacatttcaattcctacaatttatgtgttttgttgttggatttaatgagaaataattgatatattatatactcataacttaaaaatttttatagttagttattaatttagtaaggtgactagccatgattttattcgaaaaaagtttataaataagacatagtttaattttagaattataattgatgaattaaaattaattaactgagtttgcaaacagtattatctcaactagtgtgggaactatgggcctatataaccaagcttcctataagtagatctagaatttaccaactaaaaattgttgaaaattattttaccaggatcttagatctactcacaagcatgttgattaacaccctaaatatgaacttctaaaacgattataaaattaaacacata

SEQ ID NO: 382042 - DNA, 2452 bp, Cannabis indica
ttctatggcaccaagagtagtatccactggagaaagaagagatgcagcttctattccatttagcttgagctcatccaaagtgtaaagcctttggggtatctgcacgaaggaataacgcattgaatgaaagcaggccctgaatctgaagcattacaacttacaacaaccaaaaattccccaaaatctcgttagtttaaaaaccaaatcactgaccaacctgcctagcagcaccaaaacaacgcagtccaccaggcttgccttgcaaagctttgaccaatgaaagtgctgccttgtcatcccccttggtcagctcttcatccaatttctctaatgtttttcgccttgacaagctaacctgctccgatgaacataagactctgaaagagggaaacactagatgagaacgggtgaaggtatgataagcctgcatgatgaagcatcccacgcgctgcccattcacgaaacaaaacagttcaaactgtgctttgggaattgagagctctgttttcgcgtagtctaagccacacgaaagtggataaagagaccaataaagagaccatctattctagatttattaaagtacactacagagcacccttatatacacggctaagattacttataatgcatcggaattttttaaactaatagcccctgtcactaaaagacgttgaagaaaatggaacgaagcgtttagtatttgatgaattaaagaagagtaagaggtttaacttttaatgaatgcttcgtctaaaagagttctatcaacttttttttcttttctatgaattttgcgttcgtctaattgaaattctgtatatatatgttacccatggccgtgcatatcataattactgatgacaatgttaaatacgaattgacgtagaatcatcttaacattggaaaatgttaacagattaattttgtttgtttttgttttttttttttttttttgacaaagatgcggattaattttaaatcacctttaaactagtatatgttactaggtgactttgattcataagttataacccatttggccatttgctaatataacaccaattcgattgatagaacacaaacatttttaatatatatctacatatattacaactgcagtaataacctaaagtaacaaaagaattactaagacctaaaactcttgggaagcagagccaatctccccctttcctttgccaaccttcttaggcaaaagggtttggtgaatattgggtaaaacaccaccattggcaatagtaacagaacccaaaagtttgctcaactcctcgtcgtttctcactgctaattgaatatgcctcggcacaatgcgatttttcttgttatctctcgcagcgttaccggcaagctccaaaacctgaatcataacaaacacaaatcagaaaccagttccaatcaaacaaacaaaacatatatatttacatgtcaaaattgatcaaactgaagcaacaggcaaaagataaaaattgaatacaaattcgaaacagcacatacctcagctgcgaggtattcgagaacagcagaaagataaaccggagctccagcgccgacacgttcggcatactttccaaccttcaaaaatctagcgatcctaccgaccgggaactggagccccgccttctgcgacctcgacacggactttgaggcctttggcttgcctctaccgcccttagttgaaccggcagcagcagaactcatattctcgatcaagaatcgaaaacgacagcacttctaggaagaaaatcacaaaccctaaccctagatttctcgaaagaatgaagatttagtgcgacagatagcacagaatacagagtaaccaatatttgagaaaatggagaagcggtggaattatataagcagtaagagcgatcttattggttagattagggatcacgaggactgccaacgtgtcacacaaatccgattcgcgggaaagttttattttatattgcctttgacgtctttaatttcctttacactccctacagattttaaaagaaattttaaaaattgtttacttaaataatagtaaaggttgattcaaaggagaaacgtttctggaagaggtaagattgatggagataagatgaccagcggccatagagataaagaggtaaagcttatatatgatttctcttacatttatgtttatatttcgtgtctcatgcctttgtatatatattaacttattctagtccatgtaaggcttcaaacttcatgtgtttcggtgcctgatctaaatatactgtttacgaattactctcaaaccttgatcggggtatttctaatttcattattattattcttttgactcccggtccgtgtgaactctgatagcctttgggccatttttatacacataatatatgtatatataactattaaatttgtttctatatttcataagtcgatctctaatagttcataagttttc

SEQ ID NO: 382043 - DNA, 1285 bp, Cannabis indica
cacttataaaaaaaaaatgtcgctctcctcaacttaaattcagagtccgccacactcacggtactgatatacatcaaccaaacactcaaacagtactttaaattataatgcacatgattaacatttgtatattttatgtacaaatcttataatgaatattttctatatcatctatgctcattttttcttcttacgtttactttcatctgcaataatgatagcttggaatcatggggtgctgctatttgctattaattaatttttagcatatattgatcccgcccagaatcaaataatataatatctactgacagccaactacacctttgtttttcagcaacctaaccactgatatggtatggtccataaaagttattaaactaaaatttctacaccgtcaccaaatcatcaatttaaatctttatatagagatttgataccgatactttgataatgtattattatatatgatatttaatttaaatattttactcatttctccacccaataaagtttattatgatgctttcatcgttttttaaaaaaaaaaaacagtaacatgtgaaattgtcaaaattatttattatattatattttcctaacatatataccagatatttagtggatagcctttaatgtttcttttggaagagtctttaatgtatctcttaatattaacacgtatgtggcactttattagattatgactcgaatttcgctatttataataatattatcagatttactcaaattatatgttgcaactttcatgaatattttaatataataggaagtgttttaatgtgtgaggtgaaaagagttttacatgcgatataaatacttatttataaggatatataaggtgtaactttggctcttcccaaacgatacctagtgtgatactttcatattattaataaaaaaaattaaataaaatattctttttttttatttttaaatttaattgaaaaacgtatttaattaaaactgattacttagtcagttaatgagacacgttcaaccaattacacctcaagattcagaaaacattcttcttctcgtatcatttcaatccatgcatctatataatgcaattgaactgctactcaaaaacccaatggaaaaaacttcaatcaaaatcgcaaagtgaatgcaaaccacacacttgacccaagttttatacgaatagttgagcactcacacacttgacccacactaattttatacgaatagttgaggatataggagtgttcataaaatagccgattcaatccaatccgcacga

SEQ ID NO: 382044 - DNA, 3065 bp, Cannabis indica
aatacaaatttgcatcaattttttaacatgttatataatatagaaagaaaaaaaaaaaagatgccccccacacttatgaaaaaaagtgtcggcccatctcaacttaaattctggaatcgcaactggtatagtgtatagtaaactgtacttagtagttttatattaaagatcttttactttaatatactatcgactagttttatttatattgcataatcttaagtctcttgtacaactttacaagattatacattttccatatgaataagtaatttttaaatatttattaattatacttctataattaatatattcatttatattgtatttcatatattctacaatatattattcgtttagtacttaattttaggcataaattgcaacagtttgatttatgtacaaatctacgggtcatatgtctcaaatcgagataacaaaattttatttaaataaatatatttatttattagttagaaccaaaaatatcataattaataaattaatgaaattaatcaagttaactttgtgaattctaacttataataaaatcaaactatgttttaattttttttttatccattttagagttcatattttctttcttttttttttcttcctaaaaccctaaaaaaacccattttgtagctttaagttgtaatcgttaaagggacttcgtgaaagggagtgagtgagtgaagaagactagtaaggaagaaaggaaaccaaaggagatgtcgactcttcagctccgaaatctcaacgagcttttctcaacgtcctcgtctccaatttccactcagtttcaccaccggaagccattctctctttctcaagctccccaacgaacatgcatttctcagagcaacagacgaagaactaccctcaaacgacaccgttttggtgttgtaagttgttcctttgctccaatggagactgccaagattaaggtggttggtgttggtgggggtggcaacaatgcggtaaatcgtatgattggtagcggtttacaggtttgtttttcattacgttttgtgggttcttgctcatattttgaaattctctctttccatcacatatttggaccatttctttgaaaccagtgtgtgaattgttatgagttttagaatgtactttgaaatttttgtttttattttgtagtataattgaagcgtcagaaatcgttttctttcttttttttcattcttatttagcaaccacgttcattttgctccttttgtattgaattttagagataatttagaaagttgagcgagttttcttagtgtttactaattaatttggaggaggggttcttgaatagcttaactgaattatctataataacttaggaaagcgacataataataattaattttttttttttggtatgattttgaataaattggcagatcatcttgtttatttacatttagtggatttatgatttttccttttatcgagaatagggtgtcgacttctatgccataaacacagattctcaagctctgttgcagtctgctgctgagcatccacttcaaattggagagcttctgactcgtgggctaggtcaggaattctgttgtagcattttagttcccaaacagtttttttatttttctctatatgaattcatgctgaatatacccaaatgagtatacataatgagtatattggtgtattctatgagtacacaatatgtttttataaaagggtgctgtattcagtgagttctttatattgtcccttgattgtaaggaaatgattgagttgcaggtactggtgggaatccacttttgggagaacaagctgctgaagaatcgaaagaggccattgcaaatgcccttaagggttcggatcttgtgtttataacagctggtatgggtggaggtacgggatccggtgctgccccagttgttgctcaaatatccaaagaggctggttatttgactgttggtgtggttacctaccctttcagctttgaagggcgtaaaagatccatgcaggcaggtgtcaatttgttttttatttataatgtctcgaaagttgcatcatgcgtgcaagatagtttaatgtagaccaaactcgaagcttaggttaatgcacacaagtttttttatgctggtctgtgctttcctatgttcaagaaggatgtttaagtatcatttcttcttttcttcaggcactggaagctattgagaagttgcagaaaaatgtggacactcttatagtgattcccaatgaccgcctgcttgctatttcagatgagcagacgcctcttcaggatgctttccttcttgctgatgatgttctacgtcaaggtgttcaaggaatttcagatataatcacagtgagtgcttttcctttgacatttcatgttgggtgtttgaatttgtttgggacaaacctgatttcaccatagggcatttatatcccaattaagcatacctttcaacagaatttttgaatcagtttgaagtatgaacatatatgccctaactattccgtattaacactgaattagttagtatatttcttccgttcaagctacgtttgtattatcactgccccttggttatcagttaagctttgcccgctagatgttttcttacgttttttccatacctacaaatgtatgcttccgtatctgaggaagtgttagttttcctgctctttttttggcagattccaggactagtaaatgtggattttgcagatgttaaggcagttatgaaagactcaggaactgcaatgctgggggttggagtttcctccagcaaaaaccgtgcagaagaagctgccgaacaagctacattggctccactcattggatcatcaattcagtcagctactggtgtagtgtacaatataacaggcggaagagacataaccctgcaagaagtgaacagagtatcccaggtacttgaagaattaattagatctcaccatgatttaagttgaagttcatgtacttcttgttagagccaattaatatgttctcttgctctctaacgatatgtaaagatacttcctagtttttttctccaatggttggcttttcttgt

SEQ ID NO: 382045 - DNA, 2443 bp, Cannabis indica
aaaagaaagcttgctaaggacccattgctcatgtactcataaacaagaagccggtgttgtccctcgttgcagaaaccaattagctttaccaaattcttatggtttgtactaccaatagacatgacttctgctttgaattcttgctcaccttctttcaccatgttgttattgtacaactttttcacggcaattattgaagttatattattgttgtccaattccacaacacctttgaaaacaactccaaaggcaccagctcccaattgttcctcgaatccattggtagctttttctagttcaacaaaactgaaattctgcaaattcatttctaggatgttctgatttggtttagtgattgatgctttgcgacgaaggcgaaaacagaataccaatgaggttattagcagtaggatattaagaacagcagagctacttataataactgatccaatgactatcagtgttgttttgtctacttttcttttcgaatctaagttgttgcattgcttggaagcagtagagttaccttttcttattttgactagactttttgttccttgaatacttgaatccatcatcccatttgttaaaggagctgctattttataacatttgtttcctccaaaaatggcaagagggcagaaacaatcaactaagcaagcatttctgcaccaatcctcagacactgattgaaaggactcataatcacctaaaggccagttcaagaaatcaatgctatcaatataaaagtttttgtaatcttctaaatcatcattgcaactttgagcttcaaaaattggtatgcaccctttcatcttatcatttgaatcaatgaaggtgtaaccattggggcaatagcaacttggtctgccatcattgtctatactgcagtagctattgtatccacaagctccagatcctacaggcgaccgaaaatttagacatttgttttcgggtatggcttgagaagtttgagaccattgcctgagaggccaaccagtagagttttgagaatcatcatcttttggatagacataatgcctgaaaacaccatcatattcaagaatagccctttgatagaggcctgatgttgatgaactagagtttgattgtgacaaccatttaagtatggttccatttcttgcttggacataaatagagccagatttgttaaacatcacttgaaagctgattccttggccagtacttctcccatcaatcaaattctctggccaataaatagattcatgatcctgtggaggtcttctgctgaacaacacaagatctccatcatcaattgtcataagatacctccctcttgagtagtttgacttagagtaactagcaataagttgtttagttgttgtaagaacttgtgtaggtaacaatgtgtctgttggttcattaaaactctcccaattattgctaaaatccttgttggatagcacgaaattcccggtgttaagcatggctgcatggtcaactccaaaaccagtactccatacttcttttcctgtagagtctctaagagctaatgaaccaaccttggttagttcaacaatagagccttgttgcactagattatctctattggctgaccaaacaatggttttttcgggtactttgttgaaccagatagcaagaaggaagccatctttttgaattttctgaaagccaaatgaaaaatctccatttggagatagccatgatgactcctcattttgatgattaagttttgcagtgagtgatgaacccaaagtgatgttagcagcattagtccaacacagcagcatcaaaagaaatagtaagcttagaaatgtttggttaagatgtgtactactcatcatcattgtgtcttaataatataactaataataatgcagtactattatctatatggagaaacttgaagcttgaattgttacatatatgtatatgtataatactctcttttgacacaacttgacacacagtttaatctaatttaaagtcaatttcttcttcattttttattggaggggggttgggttgggtaaaaattgacttggtctataataatttttttgttcaatgcaactatcacaaatacttatcatcttaatggtggtactatttaatttaaagtcaataagtaaacgttttacctgtttttttagtaaggagatgatataatagtacttataccaaaattattattattattatttaatagagccacttgtttttttgatactcatattcccacttgagtaatttgactcaagagtatctacaaacaggttgtttacctctaacaagatattgtgtagacaacagtgtgtctgttggataattcgtgtgacaaaaaattacactgtgtgaccataaaacgactaatggtttggccgggatatagattcagtgtggttatttttcaaattttacaatttcaagttgttagttt

SEQ ID NO: 382046 - DNA, 935 bp, Cannabis indica
gggaaataattggactaatcaacaaacacactttaaatttaggtgtacatatttgtcaataataacaataatgttccattactataggtaaattatggagagatacaactataaagtactatatggataatagtaatgtaaaaatattaaaatataatgccataaaataagaaagaggttgatgataaactagctagtcatgctattgttaaatattagatgtaatttatgtggaaataagctgcttgacatttagtgggaatgtatatggtgaagggccaccaaaaatgtaatccacaaagaggcgatgagcagattctgtaggatggtttgcatcccagaacagatggctgcttctattggagcaaacttttgaaactggcagacagtaaacatcggctttaagctttccaagtccacaacaagcagccttaacctctgaaaaacctgacaattaaatgaaatcccagaacactgtgttatttataaattaaaactatattaatttgtaagcatattttatttcaaaataagggtaatgtattattattttatatataccataagtagctgctttgtgtatggcattttgcatgacactatagccatcgaagtacgagtagcttaaccctttttgctcaactttcaagctattcaacattgaagtcaaagcttcgttgtacctaaccgctacgctgtttacttcttcattgcattgctcggctttgttacttttcctctcagatggagtacatccaattactccaatcccaacaattacaaacttacgtgctccaagattatacaaacgctaccaaaaacaaattagaataattttaagccataatataaaagatatggtatctgttgggttgttggatgttaatatagttacataaattctgttttaaaatattagctctcctatttttgtg

SEQ ID NO: 382047 - DNA, 2863 bp, Cannabis indica
atatatatatttatatattatgaattagagaagttttaatgctcaaaaatactacttacaaaccacaagcaagacggagaaagcctcaaaccaatctctatcttttctatttatttttgctcttttaaaatgagaaaacctataatacaaatatttttcttttttctttttctcttttgatctataatttgtacattatatactttttggtcccacaaacaaatatttctaacctcccaaatataatataataaagcacttatacttgccacataatagatttcctagacattctttaacttaagacagacaaagacggagagaaagaaaggaaagaaagatagagagaaagatgaagaaatcgatagagtatttcatattagatcaaagtaccaatgtgattacttatataacatttgaattagagtccaagactctaacaaactaacggatttgatctaacaactcaccttaactactgctagtaaactaatacttactaattagctatcttaacaaccgccttcaaacttagaattgatgtatcttcaattctgagtttgtttctaaacatagtaaacttgttaattgagatggcatttgttaaactatttgcaatttgatcaattggagggacatgcttcacttcaaccaattgctaaatcaccttctctcttgccaagtacaagcccaactctatgtgcctagtcctttatgcagtactagattcacagttaataatattgtgcttaagttgtcacacctaattaatggaggccttggcatagagatgtgtaactctgtaaacaaaggtttaaggcaagagatttctataacatagtcaaactcctaaactctacctctcgatggatagtgttttgatttttgcaagactaagcaaaaagtttaggaccaacataaatggcaaaactagaagtcgatcttctgtcatcaaggtctgcaacctagtgtgcatcatagaaagcaataatctctagttggtgacgtttcttgaggtgaaggccgaaatccattatcccacttagataccttaggattcgtttaacaacaatccaatgtactggaagtggattttgcacaaactgaaaaacttgttaacaaatacgaaattttaagcctagtgataatatggtattatagagctactacaagttatctgtagagtcaaacatcttttatatcatcactcccataggcagacaacttaaaaccacttgtcataggtgttctctttgatttttcccctgcatcttggtcttatagagaagatctctgatgtatttcccttgagataagtggatgtcttttgtagtgtacttgacctcaactctaaggaattagttcaactctccaaggtttttgagaaactcagagttcagaatcacaacaagttgatcaatggctttctggtcacttccagtgataagaatatcatctatatagaccaagataagagtagtagagaacttggtgtaatgaacaaatagagtgagtagacttagatgagacaacaccaagagacatcagagaagtttaaagtctttcaaactagactcttggagctcgttttaggtcatagagaaccttgtgcaacttgcacactagaggtgggttagaaacaacttgaaaataaggtagttgtcatatagacctcttcatgaaggacaccattcaagaaggcattcttgacatcaagttgttgaattttccatccttgagacaaggctagtgttaacaccaccctgattataacaagctttactactagactaaaagtctttgtgaaataaaatccaggttattggtgaaagccttttgctaccaacccatccttgtacctattgatagtgccatctagattctccttaatcttgtacacgcatttgcaacaaatagatatgttcttcctcgtggcaaaggtacaagggtccaggtgaaatttcctgttagggtcaacacctcatcttacatagcaccattccactattttttctaaagcaattgaggttggttctcgatatacattgaaaactgttggcttgtgtttccctaattttgaccttgttcacatttgatgtgtattgggaaatttagaagcatgtgctgtaattactggtgtcgtgctagtctcatggagatcaatctacactggttcaggacttcttgatggaggagactcgactaaataatggaaggggagatctaggagcaagagtgacctcaatagagccagagattacaataggagcttaatcaatgcctagaggtggagaatgagaaacagaaccagagtgaggtaatcttgcaacaagagataagtaacttgttgaagagtgatcacgggtagctaagtctgaagcaggaataggtactggtgttgcaggcttaacatgtggtaatgttgcagttacatcatgtggtggctcatgattaattgtagtgaccattggtgaacctggagtgtgttgagtagagacactaaacttggatgtcgatgtaggaatgagactagagaggccaattgcaatttcttgaactgttggtgcaactatcttaggtttattgaagagaaagtggtattcatcgaaaaatcacatccctagagatgtacaacctgcctataggatcaaggcacttgtatcccttatgatttgaattgtatcccaagaacgtgacagttagagtcccatgatctgcaaggggaaagaccaggagctgtgcaatcctacattgcctggggaaggttaaacgtgatgattttgagattatgtaagtatgagactacacagttaaaggacttaaatggatttattggtactacctatatcaacaagatgcatct

SEQ ID NO: 382048 - DNA, 2864 bp, Cannabis indica
actaacggtgcttaatagacatgagtaacggcgtgatctctcatacgttgacgctgcatctctggacaatctgatacttaacggcgttttcacccacaataattcctgagttcttatttcccaaattgataaacgccaaacacttgacgtagaaatgataacggccagagataaacgtccccactttccaacgcacccttccgtcagccttgaacatgatcataacggcgccgttagcttggtcttgagtcaacgccatggaattaaacggcgcaacaggaacaaggttaccgtaaacaaacggtgaccaaacgttaacgtctttgtgaccttggtaggtgggcggtattcgagtacggtaagtaatttgttggttatgatagactccgtaaacgtcgagtctgtcgtagtagacaccgatcttatcgtttgggtttcgagaggaaatagttacctgaaaattggaagttaagaaattggggacggtggtgttgaaggcgtaaacggttacgtcttggagaataaatctgggttttgaaggttgaagaatagcccaaattaacagaactaacaccaaaacgatgaagaggaagatcaggaaaccggcgcagattcgccggataagcttttcccgtttcttcccgtggtggccgcagtccttcgacgacataattttttcagaaagagaatttggagattctgagaaatctctatacagatgatgaattaaagtagtatatactcgtagtttttgtgaatctaaatactaatgaaaaaagagagaattaagaaagataagaataaagagaactaataaccagaactctctctcactctcactttctctctctctctctgcttttgataattgaccgtggcgtgagacgaaagcgtaaggtgcctctctttggggtttatttatatataacaaaagaaaagagagagagataatgcattacatttgaatggttgaaaggacatttatgtaagtatatatgtatttacgaagctctttaaatatatatatataaaaatgatcattataattaacttgtgtgatatttattgagctaggtttagtaaaatgagtctagttactttggtagtggtttgatgggaagtgacaatttggtgagtatgatcaatgtattattccatttagttacatgattaggatttaggcaagtgcgttttgattttataaaactatatatatataattttatgtgtgaccaatatggatattattgcaatgactagtattgacgtatgatttttctttttatgatattaaaaaatttgatactattagaaatctatatatacgtattgatgtatctcttacaatttcctattagtattttcaagactatacaccaactactacgtactaaattatataataattataaaaaatggttaaattctatttatttaatagactgtcatggatttccgaagacgtctctatatgcaagactcatctctaactttgtcatataattatatattatgtagaaatcaatataattattacgtgttatattgcattcgtttactgtgtgtgcccttaaaattgcccatccctaaacgtgaaaattgagtaaaatttgactaaattggcctttggttaattaattcgtctactattctaagttccaaaacctataacgactggttcatattttttcttcatttaagtggcacccaaaaatcttgaaatatatttatttatatatattacagttgtatcgatatttataaattctaatccgataaatattacgctatatatattgctcttatagattattttggccatgataacatgaggttgtcaatgacacgtaagcatgttagctaggctgtcaattatcactatttgcattattaatcttctcattaaaaagaaaaactctacttaaagttaattaattagtggcttgattagtttaatctaaagaattccatgtgaattattgtctattgaaccctcatcaaatgtgtgtttctctttagtagtcaataaaagggttgcctttccctttctgctaaaatcaaacttatagtgacaaaatgggattaggttttaatatatttattgggttgaattatgggcaatggcatcacttcaatttcgatttggggaaagattgaggactttaatttctaaaaaaaataaaaattatgtcatcccaatgtaacagtttggtaatagaaactcgtatagtatatagaaaaaggtaaaagtagagtaatagatggggaggaattaaaagtaaaaagagaataaagaaaaaagaaaaaagtgaataacgcaagttccataatcaccgttggattagatgagtcatggtgacacgtttttcagagaataattgggcccactttttatgacagagaagcttcgagcatctaccaccgactttttcttggcagggttcaagaatatacttcccacctatagccctaaaatattacacaatccatattctatatcaattattcatataacttatttctttaggttactatttatgtacataaatataaagaattatttcaccaatccataaatataacaaaaaaaattataaaagtataatttatagaattttaaatattttacaattttttaattttattgacaagaaatataattttttttatattgtacttttattaatttattattgattttttgttatctatatattattttttgttatttttttatattatttaaatgttatttttcatgttacctttattatagtttttttattattttcgttgttgtttctataaaaaaatcataaaaatatataaaaaaaattactttaaacttaaaaatatattttttt

SEQ ID NO: 382049 - DNA, 1981 bp, Cannabis indica
acacacacacaaaccataattattctttaatatattaaccctattgtttactatacataataataatatatttataaacgaaactaagttgataccgctgataaacaggcaaacaatgttgtgatctcagtacttggctaactttttaacttaattaatcgttttatgtaataagtatatattattagtagaggtttctgttttcttgcgctttgtcttgagcatgcttctcatcaacatctgagcaatgtctcccctaacctagctacatgacaaaattaacattccaatcgatccatcttaaaaggtcaagttacaatatataatttcttaacaaaaaattatatactaattaatatatagtagtgtttatttttttgttcaattaagctagcctcttgtctagctaatactaataaatatatgtgttattaatctactatatctatatggttagtacacctcacaaaacaagacaattgaattttgaagcaaaatttagctagatcggctctttaagcaatatatattgattgaacatgtttctatgtgatttaagtaccgttggagccccctatgcataaaaaaaatatattttgctacaagaaggagcaaaaaggccattgtttaattcttcatccaaaataaccaattcctagaatagtttgaaaataacgaaatgggtttttgtcccccacccaaagtaacaacatatataatgtgtgtgtgtgtgtgcatccaaatgtgggatatatacattaattaatattgatccctaagtaaatacttaaaagattgaagagtagtacacaaaatccaaatgtggggtgtgtatatacggtcgtgaaagtagagttaacaaaatcccaaattaattttaaaaaaatctggaaaatgtgtcttcccttgatgaagctcttgttcattattaattttataatttatatatgcactgatgccaaagcaattgagctggctaatgtctgcccttgattaatgcgacgttgtcggtctgtcaaaagaccaaaggccagagagactttctctttgcatgattggccattttctcaattcccccattagaatgccacttctgatctatttgatccatatctcagtgtttcagaactgccgaatcttcacctacacctaccattttctcttcattcatttcactgaggtttcttattatgattattatttattaataattctatctgccacatgtaattccttctatttattaaacttattcactcaaacatataaatttgtattgaaataatgaataataaaaaaaaacatataaaattaaaattgtatttgtcattaaactcaattctcatggccgggataaaaagtgtaatttgtgtaattacaagtccagcaaggcaaacagtccaacagacatgctaaattaaattaagtaatattatctatcgacccggtaaaaaaaattaagtaattatttcaaattaaacacaaatctacctataaagtgatttttcaaccacataccatagaaaataaatatgttcatgaatacaaatagcaatagctggttgcatttttttcccttaattagttgagactgattgcattaaagtgtgttctgctctcattgcatattagttgagattgattacattaaagtgtgctctgctctgagttctaacttctaagtgtgctcccaaaaaaaaaaaagcacactctcatatggttgaatttggttatgttttagctgatatttatctctttgtaattttttttgactgttttgggcttttaccattgtaattggttgggcaatattgtagctcatcttgctaattaagctagctcttaatttagataattctatagtttgggtgattggatattccaaattgtatgagctaatgctcatgttaccttttgataagggttaatttcacaaatgcacaaaaacaacaaaaaataacaaaaatacggttttacgaaa

SEQ ID NO: 382050 - DNA, 1721 bp, Cannabis indica
agtatggaaatttaaatttccctaattaatatgttctggacttcattaattgtaacatgtactgaatttaacataataaaaatatttatttaaattatttttatttttattttttttttaatagcaatgctcatatataaacattaaaaaggatgaaattaatgaaaagtaaaaaatgatgataaatgacatggaattatgtcggcaccacctaacctctattattgtcacatttacctttggcatttaaaatgagtttttttagatcaactttggaccttatgagaatgaagtatcgttatagagtactaatatctttaatgcttttatgaaatgatattttataatttgttagcaatttttttataatttttattaaattaaaataaataaaacttaacattaaattgtactaataacaatattacattttataaaagtgctaagaggtcatttattattatcaaactaataatgtagcatgagattgattgagtttataattaattaatggaaaagatccatatatatgatctttcttttcgaaaagtgaaaaagaaagaaagataaagtaatttaaatgaaatgaactacacctatgcgtacgtttcattagaactttcaagaaccactcactagctttcaaataatttaataagttttttgcaattaaattctctcaattattactctacttacatttaactttttaagtttaatttttgattgtaaaactctccaaactactgaattgatagtaaatttaaggtatcatctattttttacaattaactaccaatatagacggctaatgggaatatttttatacattgtcaaatttatattagtacacttaatagtattacttttaaaatataaaattattttaaaatttataatattttttattttttaaaaatatttatttttatttttataattttatttaattttgaaaataatttttaaataataatattagttgcactaatataaacgtattatgtgcacaagagtatgtacataaacagctcatagtgtcataaccaaatgacacataaaatttattgctaagctcaatgatttagaggattttatcatcaaaatttaagcttcaaaattaaatataaataaaataacagttaggagggtttaagaaaaaaaaaaaaaaaaactaattaatttaatatatacaaacaaattatacatggcaggttattcacaggcttcagattttaaagtaagtgggtaccatcgcgcctttaaagctcttgtacaaatcttataaattcaaaaattttataggatgtatttatattttatattagagtcatttgcggtataaatacttaagtttaaattctaattctaatgacttggaccaattagaaattgacacgtgataatttacttaaaaattaatagtccagtacctacaaaagttacagaattataacttaggtattaataccgttaaaaattaaacttagatatttatttgaaactgaaagttaaacttaaatatttatatcgcaaattactctttatattacaataggaattttccgcctttcaattatcatatttgtccacttttatcttgttgtgtaagctaaacaaatttttagaaaacatttcactccaattatattttactcatttttttttaaattatatatttttatatattaaaagtgcctatctaacggcatttcttggtt

SEQ ID NO: 382051 - DNA, 1763 bp, Cannabis indica
aaaaaaaaaaaagcaaaaaaagcaaaaaaagctcaaacactgtataaacttaaaatgaaaagcaaatgatcgatgttgaaagtttcacacacgcataagcaatgaacatcaaaacctaaccccattaattgataatttcactgaatccatagctatatgcatagcattaatctctataattatgagccatataagataaataaattacttaaaaagaacccaaattcaatactaatgtattatattcaattcgattgtcaatggggtcaaattcatgaagttagtagtaacactgacagtaagtaaaaaacaaagaaaaatacctcgtcgcggctttttggccatggtattggggctttgtaatccttaggcggcggaaccaagcaattcaaaacctcactagacttcgggcaatgtcgttcgaatcgttcacctctctccgtcgatttgagctttttaatggctttctcattatccaagcaaggtatatactccctcttatcgcttgaacacagctcaaactttttaactcgaactctacgagagccaccattattcccgtcattcacaacctccgtcccatttccaatcccccaattctccacaacctcatccggatcaaactccccgacctcgaactcatccgacatggtcccattttcgtctacaatcccaaacctctgaataggttcaggtgatggaggcggaagaggcaccgctggaggctcagagaccagcggaactgaattctcaggaataatggaggagatattaaacgacttgttgtgattgggagagatcgagaccgaagaagtttgggtagtagtggcgggtgtgggtgtggcggtggtagagtagaagacgagctgctggtagccatcggaccaatgctttcccacgtagaagaatgttagggatatgaaaagaaaggctgcgatcttcacagttagctgacctttgaaatcggcatagttgagacctttcatggcttggaatcaaatttgcagagtgtggatctgagggtgagattgttgttttctaatctttcctattttgagtcacattattaggaatttgagtttaagagaagagtagattttctaaaattatagttggattgaaattcagttgagtcagtgtcttcggatttcggatcggtggcgtcggtttggtagtcagtacaagaatcttagatcgacctcattgatggccagtttttaccccccaattgcttattttttttttattttttttatttttaggctaattgacaatttttctcaccgaactttgacatataataaattatacccttgcatttttttggccgaaaattcttcttgaactattgagattgttagatttaaggacttttgtctaatttcattcaattttattgttttagtgattgtttatgtactaaaacatgcttcccaaactttgatatctaccaaattatggagtgagttggcaaaatagactttatgaaaacttttattaggaaaatgacttttcaaatattttaattagtaaaatagccttcttttaaaattgatataataattaatataataaatacaattaatattaattttctttatcattaaaaaaataagatttggttggactcccatgacttgttttcatcttcatcttcaattgagttcttcattatcatatgagtttttatcttcatcttcatagcactacttaagtatttcttcttcaatggtattcatgcacatttgacctaaaaaattcaa

SEQ ID NO: 382052 - DNA, 3279 bp, Cannabis indica
gctagctgacagtaggaatatacaatagctatatttcaaccaagcaatcaaaaatagccattttccctcttgttagtatcacaacatcttttgttgctgaagaagaagccgcagccgaaaaatcgctagatgacattgaaatgcaagctaaaagaagaactcaaaaaggatttatctcttaaaaacaatggacatgaaatggaagaacttgtatctctagtaggtaacactttccctttatgaagcgttttaattaccaattggtgatcagtagagtaactcgtgttccttataatatttctcttttgttcataaaaactagactcagcttccacatcttcatctataacaagtgatgaatcagaaataatgatgcttcaacatgtcaaaaggcatatcccatcagcttcatcggctatggttatcggtagcattctcgggttaatccaagctttgttccttattttagcagctaaaagaatactgatttacatgggtgttgattctgtatgtgcttcaaacttttggtcagttaattttgtaatgaagatatgtaaatgtttttcattttgcattaataattgcattagtgacttgtttattttaatggacagaattcaccaatgcaaaaaccagcaatacaatatttgagtttgagatcattgggtgccccagctgttcttctctctttagctatacaaggagtttttcgtggattgaaagatactaagacacctctttatgctacaagtaatctaatttctctttctcattcctttcattttaagtattaaagttcactttggaattgctctcatttaaaaccccataaaaatgcttactttagtctcttataggcctgtttgactaggcttctgtttttagcttcttactaaaactgacttctgttaaaagaacttcttagagcgaaaagctgaatagaagggccatagcactttttcttgtgacaaaaatggtattttttttcattgaatttgacattagttaatacttacatacataattttaatgtattttctttattgcagtgattggagatgcaacaaacatcattttagacccaatattcatcttcttattaaaatggggtattagtggtgcagctattgcccatgttatttcacagtaagcttaatcttttcttgtttatgataatgatcattttttctagtcattttctcctttaaacattactttgtattgatcatattttaggtatttaatctctctaatactcttgtggagattgatgaaaatagtcaatcttgtaccaccaaggatagaagacatacaatttagcagatttctcaagaatggtaaggccatatcattgcatattccttttaatcacaactttagtcctagaaagttttgtcatagctaccatattatcttccttttttggtgtacaattcaggatctttcttactagtgagagttattgctgcaacactatgtgtgaccctggcagcgtcgttggctgcgaggcatggctcgacgacaatggctgcattccaagtctgcttacaggtttggatggctacttctttggtagccgatggcttggccgtggccggacaagtaagtccttaaacatttctagtgtcctaaacaaactgaagaaaactcacaatccttaaagaaaaattacaccaacaagttcccattatttaaaattttcaggcaattcttgcaagtgcctttgctatggaggactacagcagagtcactgccactgtttctcgtgtacttcaggtaaaaattaaagtgacgtttagttaggagaatgaaaacataggaataagaatgtgaatgagaatagaaataggaatagaataaaatttaaaatgcataaaaaattgataaaagaattattaatttttttctcgtgtttcctttcattttaaaatggaatagttactccaccaaaatagtggaaaggttattctattggaattggaatgatattccaatactttaaaatgcaaccaaacaaaggaattgaatgaaaattgtttcctttccatttcattacatcgaacaaaatgccacctaatagtcctcaatcactgaaaaattcactaagtcacattttaggggagatttacgatacaacactcttaatcttagaacttttcatgctggtgtttattgtagtaacagtggactttttatcagtttttgaaaaatttcaaattgtttaccgtgccgaaaatagaattcaaacaatttgttgcattgcatgcatatttctttttattgcatgtaaaagtaattgctttgaaatttgttttataaacactgtaaactatttagaattttacaaaaattaatagagagaatccaatggcactacttcaaacaccatcatgaaaaaagtcacaatttatttggactcatgtttgaatgattttgttgtgcagttagggctggttttaggactatttctgtctttgatcatcacaattatactcaaattctgttccaaattgttcacaaaggagccccaagtgttggagttgatgagtttaggcataccagtaagcaaaacaaacaaaaatctccacaatcttttcattacgagtttcacaagtcatcaccattcattgtcttcttttattttgttttagtttgttgcagtgactcaacccattaatgcattggcatttgtttttgatgggatcaattatggagcatcagattttgcatattcagcttactcaatggtaagttttcagatttgaacatcatcatcatcatcatcatttgtaattaaaatgaagagatttggtattgaatttcaggttttggtgggtataataagtatttggtgcttatttgtactgtcctcaacttatggctttgttggtatttggattgctttgtctttgtatatgactttgcgcacatgtgttggcttttggaggtaacttcatttatatatacacataattttcatacaatattctgtttttaaatttggaattggattaagaaatataagaagggtaacaagtttaaacacaaaaacttggatataaagttagtatttttttttaccagtaatgatataaagttttttcttgacataacatctttctacacctaaaatatacattcaaatattacatactttgacatgaccttttttctcaaacaaatatattttatgggaactttttatttttatagattttaaagtataagtttgtaaaaagatagtttcttataaaaaaaattattttgtaagaaaattta

SEQ ID NO: 382053 - DNA, 2307 bp, Cannabis indica
aaattttttgattatatgtagggcactctgattatcgcaatacatagtcaatttttagagtttaaacccaactcctgagagatatctttgagccataaagcttctttgaaggtttctgttgtagccatgaactcagcttcagtggttataaaggcaacaactttttgtagatttgatttccgacttatagctcttcctagtccagtgaaaccagacctataagagatattctggtgtctatgttggtcgtataatcactgtctacataccctaccacttctcctcgagaccctgggttcccatcatagatcaaacccaaatcaagtgatcctttaacatacatgatgatccacttgattgctgtccagtgagcatcacctagattagccatatacatactgaaaatacgtaaagaatgagctagatctggcccagttcagaacattgcatacatgacgctttcaaccacaatagtgtatggaaccttctccgtgagttttctttctgcatatgtcttaggacattgagactgagatagcttgagtttgaagtaaggggtgttgacacaattttggaatcattcattccaaatttttctagaattatttgcaagtagtcttgttgaatgagctttattacctttagagtactttgatcaatcttaatacctaagatcttcctagcctttacaagatctttcatctcaaattcactactcattgtgtttttagttttgatatctcagttttgtcgttcccaacaatgagaatatcatccacatataacaataaaaacacatcctgattaaaataaacatatggatcaaacttactcttattgaagccattatgagtagtgaagttgtcaaacttgatattccattgcctgggagcttacatgagtccctatagttaccttttcatcaagcaaacttcatctaaatttctattatcaaagtcctcgggttgaactatgtatattttctcttctttttaactatgtaagaagtctatcttcacgtccatttggtccacctcaagcttgtctttggcaacccttctaagtattattctaattgtggtttgttttactacaggtgagaaaatttcattgtagttaggccttctttttgagtgaaaccttttgctacaagtattgccttgtatctttcttcttcagcacatatgcccttcttttccttgtaaatcaacttgcaaactaattggccttgtaccaaatggtcttttgacaatgatccatgtcttattattctttgtagggtgcatttattcatccatttcctaattccatttcttgttgtcatgtctagtgatgacttcattgtaagttgttggatctgaactgatttcttcctcgactacagatagggcatatgggtgatgttgacagatttaaagctcgtttgtcgccaaaggtttcaaccaaaggcaaggcattgatttctctcaaacttatgttccagttgccaagttcaataccctcaaaatctttttggcccttgcagccatccacaattggcatatccaccaattagacataaataatactttccttcatgggggtctccatgaagaagtttacatgcaaattcctccgggatataaggccccccaactctgtttttaaattaaacaagagcatatatggcctaaaacaagcctctcgacaatggtactctaaactcagtaccacactcactaacgatggcttcaaataatcccaatctaacaactcattgttcatcaaacactcatagtcatatttcattgccattctcatgtatgtggatgacataatcgtggccagcaataacacgaataacatcatgcatttcaccaaacccgttgaccaaaaatttaaactaaaagaccttggtaaactttgttttttccttggctttaaaattggtcgcaccaaagaaggcatctcaatttctcaaagacccttcatcattcaattactccatgacacaagttacattggaaccaaacccgcttccacacccatggagacaaatttaaaacttagcaaagaaaaaggaactaccctgactgacctgactgcatatcgaagccttattggcaaattaatcttcccaactattattaggccgaacatcaccagggccggccctgaaatgtagtgggctatagggtaaaaattattttttgggcccttatttagaaaaaaaaatggtatttttcaaaatcagcaaaaaaattgtataattttaaaagggcaaaaatttttttttgggcccctggactaggtgggccctaggcacag

SEQ ID NO: 382054 - DNA, 1151 bp, Cannabis indica
caacataattatgatattggtagatagtatcaatatggattgccaattaaaagctggtctttggttgaccatgatctgtttattagttaaaattataacatttcaacataattatgatattggtagaatagttatcaatatggattgccaatttaaaaaattcaggatcatttactatcattctctagtagtataattatgtctgatcgtattgaagttgcccacttgttattttttggcagaaaaagcttttggggaagatggaaacttaaagcaaccaaaggaactgtccattaataaagttggccatggtaaggttgacaacccctttttgggttatatattgttattcttgttattgtgttgtttgcctgtaaattttaggtctaggtagttgtttctgtcttctgctttgtcttatggaaactaatcttgagaagtttggatatgtttacgcagcattacatgagattgatccagtttttaaaagcttctcgaactctgagaaagtttgcagtttgttctgttctttgggttataagaagccaattattattcagtctatgtacatatttaaggtattctattttctttccgtaggtggtttgatatgttattgacatttttgataaattgaacacaacaaatttcttcacatgaagtttaattttgagattttttgtggatttatagcaaccaggtattgggggtgaggtagtgcctcatcaagacaactcgtttatctatactgagccacaaacttgcacagggctgtggttggccctagaggatgcaacaacaacgaatggttgcctctgggcaatccccggatctcataaaagtatttaatactcttcccagtttcctttaatttatttttatgtacagtatataacttttacattgtgtttttttcactatgcagatggccttgtcagacggttcatcagaggtgaaaatggggtaacctttgatcgaccttcccccgattatgatctcaaagattttgtgcctatagaagtaaaagctggttctttggttgttattcatggtgatcttattcatcagaggtcagttggggttttctcctctatcattagataaaaattttattgaattttatctgtggaggtcagttggggttttctcct

SEQ ID NO: 382055 - DNA, 2779 bp, Cannabis indica
gagccaacacggtgaacctagcattagttctctttcgaaacactttttacaattgaagaactacacgaacatcatttttgaaacatttggatgatcggaaaaaagagaaaactgagtttataacatccaacagtgaccctgatcccagagaaaaaaagatagtcagtagaggggaaaaaagaataatgaataaagcataaaatgtttgaaaaatacttaaaaagataacaagctaatgagatgtaggataacagtgaaaagagggagagtaaataagttgaaaatcctaccatcagccagaatatgacacttttcaacccttgccaggatgcatgttgttaagggagtagttttactatataattcactttgacggggcaacctaatccagatatcggcacttaagggtgccaacaaagtaacaactgcacagttagcccctttgtccagctgtaagcaatcatatccatcatcttcgaaagacaagaacgaaaggaacaagtctcgtccaaatatatttaaacaattgtttttttcttcaagcttaggtgctggaaccaagtattcaggtggaatgccactaaaaatgtaatctaagctgccgttatcaatgaaactagagtacagttgctgaatgtcaacctttagaaactgacgttcactgctttcaacaggcaacattaaaatggagtctagtatctcacacttatatacaatggaaccttctttttcagtatcaccattttcatgcctttcacctccgtgattctcattagaaccagtattccaatcagataatgaaaaatagccaattagcaaagccagatagtcaggaggtaaaatacagtaaacatgttgaaagctgagtcctacttctacatgagaatttgatgatgatgatcctagtttgttcttccttacccttatatttataatggaagataaatttggtgttgcaggaccccatagaaactcatgaaagtttcttgtccaccacaatgaggtaagaatcgatccttccaaagagcacaaagcctccatgcagtcttcataaactattagagaacaaatagagctaggcagggaaactgtcccaacaatgcacgacaaatcatgaaaaatgcagactgattccacttaagttaaaatcaaaataaatgcaccgggcattgattttgcttcagagcttgtagaaaaaagatttgcttctgtatcagacattgattgtgatgctccaggatgaacatgatcattcctagatttcttcttcatactgaactttggacatctgattctcttgtcccttaaattgaaatattttctccattcatgattggaataaagcaaagaactctctaaatcaccaagggatccagtactggatatggtaataaaaggaaaacaatctagagggatgcttgcatgctccagagatccactctcaaaatagtttgagaggccgaacttttgaaaactgaaaccaggagatgtttttgtatcttcagcaactatggaagagttgatggagttttcaccatcacaaaaagtatcatgtgcagatagactcttgaaaaatacaattagcaatccagttacatcagggtagcagtgaaaatcagcatcagtcaagcatatggtaaatttggcgcaagcaaactctgtattctcattttcataaattaacataaagcatccttcagtaaataaacttctatcagcatggttttcaaggttatttccatgtccaatgttaatgtcctgtacagaatgggtaagtaattgactcccagaagaaaacacaatacgtccatcactttcacctctcaacgatgaagtcattacatttaatgcttttaagtagacataacactcttcagaagataaaaaggcatacctgcattttgtcaaacagagcactattatttggataacaaggactacaaaggaactaaaattagcttattggatgctaagtacagaagcagctataaaacacaaacattacattcacctaacaggaacagtatttcaagtatccaaacatccactttatgcatgctattcatgtggctagatccataaaatgtatagagaacaacaataaaagtagtgagtacatactggatatacatttcttgaagggcaaatatgaggactaggctgttttcaccattgtttgcaaggttaactaataatctgattgactccaatttaaactcaacaccgaaacgaaaatcagaaaccattggtctgtttgcagagtgcagttgcatggtacgaagatgcgcaatcaatcccaaagcagtaacatacactgctggagagaagtatgcagaaagcgacaacacactaacataaacctgacattgtaagacaagaataacacaattcacttcaacagacctagttcacaaatcaacataattccattcaaataatcctagtttataataaatatttaaattggtaaaaaaacacatttgcacaaacatttgattttacttgaatcagcagacaacagcaatgtcaagcaggaagcctgatggagatggtatgctgctagagctcatttagcagggttttgtggcaaaaatccacaacctatgcattcttttgcacttaggtcaccaactttaaaattttgcatttttttaccaccaaacaaagatataactgaacttcttggttgtaaattgttagatattagatgtatattagcggtaaaagaattagatatttagtagatattaagtctcctagctttgtatataaatatgta

SEQ ID NO: 382056 - DNA, 2611 bp, Cannabis indica
gaataaaagcccgatgtttcatggactccacactgttacatacactttgactacagaatttactttagatgactttttatttcatgactaaaagggccctaaaataaggatcaacaaattacccaatctgtggaaactgttgctatatacttttatattttgatttctaatatattgtatgtgtgaatatgatacagagagagtactagtataatagaggagtacagtattattattattattattattattgataaaatgaaatgaaatacacgagagagaggagttgctaaatggcttttatagttgtttaaattaaaattggtgagttgcggaaatcacgggttgctgttatgttatgttatgtacttaaatcaaagcccgtgtcgtgtcactgccattttccttgtggccttaagctcaacgacgtcgttttcctcttcttttatttttattctgacttccttcctgacaccccaaaccaaaacacaatgtcactctctaatatttttaccatattatttcactttctttctttctctctatataatttattatatatgtctcttttcgtaaatttcacagcaaatcacacagacttgatgatgttgatgatgtgatgtgactgcacagtgaaataattatttaagagtaagcaaagaattgcataatctatgatttgtcaattaattacattaagttttaggaaaaattgaatgcagattttgaccccagctaagctaataatctttaatttcattttcctaaatacacaaattcatctacttttctttacttcacttggatttctttatgtttttatattttcttagttaatccatcatttgggtttagaaattatgaactaattttatgataaatgttgaatgatattattttatgagttaatatcatttggttattttttttattattgtgatttatttatatttgcgtcaatacatatttaagattgatcaccttttacatgattcatgatcctaatatgaaatctgaaaaagtaaatattaagaatgctctaattgaacaaacatagattttgatgtgaaacgaaagtattcacataatttatgtgacttttagattattaatcgatacaaattatatgctgttttatttgagagatacagtaattgacatataatttagaacctttatgatttgaaagagtttaaattatattataatctatcttaagaagaaaaataatagttaaataacattaataatttgataattgaatcaactaaaattatattgttaatttcacacccataattaaatacatttaattaatttctttagttttctattatattgattgttctttccaaataactttacaaccaaataaaaatataggtctaatttagttcgcaatcaaatgtaaatcttgtgggttcaatctcatctctgtgagctaaattttataattatttcacctttctcttctctattttgaacaaatgagcattataactcatttcacatgagcgctctaaataacaaatatgtaaaagacacaagaattatagtaattcaatagattttgatgtgcttagtctactttagaaagatagattgtgattagtttattcttaattatctaatcacccctttatataatcatttagttatataaccgattagtcaggaccgttacaacattaattgcacacttaattaaaataaaaatcttttatgaaatatatctaagaatagttttgatcgttcttatttaatacttaaacgtgtgtgactactttagtcacacattggtcattcgtattcttaataatatgtaaactcccaggttcactagagttaccgcatgcattggatctttggaccatctgcatgcatgcataaacctctcaggatttttataaaggcgagaacctactgagatttcatattatagaatgcattaaaatggtcttgtattggacatttatgtactgataacataggactcgtggatccatgacgagttgtcgcgtatagtagtcatttggactaattaatcactgtaacgatgagatctttatgtaggacacaggagagaaatacttactcatcgcatatatattcgatgtatgttttgattgtgttaacttctttttatgtctcactttcaacttatttactatgcaactcatagtgtgtgactatactttatctcggtcacacattcttgcatgtttctattatgcaaagaaaatcctatcgggcttatacatcattatttttctattgagagttgtatacgtcaattaaatagtgtactttttattttaggtaaaaaaattcattctataacaatataaaagtaattaaattataaataactcatataatagtgataaaagggaatttgagaaaatagaatatgaatttggacatgtattaaaaacaaaggtatatacactactaaaaaaagtagatttctcgacatttttaaacatttgactactgtattatttgtattattatcggtttctataattattacctattctaccgtcataaaattatagtagaataggtgttacgaaaattctgtttattacgcaagtgtacgtatcaagta

SEQ ID NO: 382057 - DNA, 4770 bp, Cannabis indica
gtttcaatgctcaaaatattatttgctttttcactaatatttgacgttttcaacttttcatcaggttttgtatgatacaaatggctttctggaaaagaacaaagattgtttgcattctgatttttcccatctcttatcatcatgtcataatgagctcctgcagctgtttacctccaaaatgcaaaatcaatcggctccaactacagcatgccatatcagttcatcagactgtccgagaccgagcattggtacaaagtttaaggtacatatgcctctgaaaaattacagaatgtagcttgagttttagtatgcgaacctagttcaagacttctctatataaatatatatgcttttactgttgtttatcaaatacatcaatattaacccaagagggtagtttaaactgtcaagcttattgtttgctcccacaaggtttgaggttcgagtccttgggtactcatgtagcttgctagtttcttggtcctcaaatattgttgggtttaggcggggaatcccagttttaaacttgggcaatctcttatagtttaagcggtttttggatttacaataaaataaataaatgaatcaaagttaacttgagatgttacttagcccatggtcttctgtgtttcctcctttctgatgacctgctttttgtttcttgtataaaagatatgcatttaagagatgtgacctgcatttcaattttatgtgttacgaatcaagatacttggaatagacattatgttttatgagaataacaagaaacatagctgatatttaggagtaaatatcctttgaaacatgggtgatcatttttcatttattattataaaagttcacatcaatggaggattttggttaatgatcctctgagacaaggatgatattgtttactcttcggtataaagtatttaatgacctcttgcatccttgtagattcaaatgttcaaactaatgcatcagttggagagcaccagacctcattttatttgctgcataaagccaaatcaaaagcagcttcccagcatatatcaggtggaccttgtactacaacagcttaggtgctgtaaggttttggaggttcttaaaatatcaagatctggatatccgtctaggatgcaacttcatgagtttgcaggaaggtgagttgatggtagacctcaggcggttaggcttttgtttttggatagtaatcaagacaatagattagaaatctgttgctttttttaactgtcaattttgaatccataatcttatttattttctttctttgtgttttaggtacggggtcctacttccaaagacctttgcagctcgggatcctttaagtatatctattgctgttctgcaacaatttggtatccctccggagatgtaccaaattggttataccaaagtgtttcttcgaacagggcaggtaagctattgtctttttccttttcatatagttgctgtagtttaatgaaagcagtgttattgacaactacatcttagagtgtttgtgcttttattaatcttcaacatttaagggatctgtgaataaagtttatcatggacatttggattttttgtgcagggaattcataattctattgtgcttgttttttcagattgaaaagttggagcataggagacaacaagttctacaaggaatagttggtgtccagaaatatttccgtggtcgccaggctcgtcatcatttctatgagcttaagaagcaagtcaacccattacattcatgtatgtactcatctttttcggttatttttcatttgaacacactggagcagaatcggctttatatgatcctcttgtgtcatgtagtgcacactcatgtgtgccatgctatcaacaaatataaatgttgttagaagtcctgttagtttatttcaaacattcagttcaggacattgtaaaggggcagtcacatgatgcactcgatatagtgctttaaactcaattcttttgggtcatccaatcatgtttaatcctcaagaatgatatttcatttgctatttacaattgtatttgtttattaattttaatcttatcatgcagatgctcctagtgatctttccagagggaaacgtaatattatggtcaagtggcgcacagctagtgctcctaaaacactagatgagctgcaggcagttatatacttacagtctggtaaaattggttttgtattcttttttcttcatttttagtggtgtaatttcataatattattatgaaattgttatttatatttttatgcagtgatccgtggttcactggttcgaaagcaatttatagggacacctgagttgaagaagtcaaaacctgagagtgtgagatatagaaagaaccatggcaggaagatgtctgaagtaaaggtatatagttactaattgcccacaagaagataagaatcttctcaaaatttggtcaacatttgatgatgtgtttttcataatttctaattgttccaatgtgaatgttttgtatgtttttgagtatattttgtgccatatttgttgtcatttagtagctaagaaaacaaatcataacattggaaagctgggttgccttataattgagagactacagttcatatttgtgtgattgtgttcctaagtaaactttgcatttggagaaattcaaaaacagaagatttgcttactttgtgagatcaatgattttaagagttttcagcatgtatggagtaattatagggctcttgtcttattctttttatctatttgcttcggcaggtgtttgctgagcagcaggacatgcaacatgagaaattatactccgtgccttcgactgtaaaagagcttcaacagagagttattaaggcagaagaaactctggagcaaaaggaggaggaaaatgcagcattgcgtgagcaagtacgacagtttgaagcaagatggtcggattacgaggcaaaaatgaaatcgatggaggagatgtggcaaaagcagatggcttctttgcaagtgagttttcatgtgcatgcttctcatcagttttaaaagtgtgcctatctagcatagttaattatgaacaaaaagcctgaaatatagtcgtaaataaaagataacaccatgatgtgagaattaaaaaaaatcaattctttataactaaaatgaaactctgtttttactacaggtgagtttggctgcagcgagaaagagccttgttgttgatactgcagttggtcaacctggaaggcttgatgctgctttctcacctcgttattatgattctgaggatgctacatccatgggttctcgaactcctggtgcaagcacacctctcaaattttctaatagtgttcaggatgtgggatcaggacgagatgcaaatggtactttgaatgaagtcagcaatctggtaaaggaattcgagcagcagaaacagactttcgatgaggaggccaaagctatagttgggatcaaaacagggaagtcagcttcaaatataaattctgatgatgatttaaggaaacttaaactgaggtttgagatgtggaagaaagagtacaagttaagattgcgggaaacaaaagcaaagcttcataagcttggacattcagaagcagagagaagtcgtcggagatggtggggaagaataagcacaaaagcctcctaggaatctggatcatggcaaccatgggaaagtatatggagaattctacacaaaataattggacaaagcttttgtgagtttttcccttttgaggagctgctcgcctgcatatttatggtgctgctgtcttaggctggagcagcaatggaagagtgaaattatagatcaacaaggttttgggaactcaagtagaaatattggcaagtttgtgcataacaacgccagatagttgtagtgagttcaaccccaagattagttaatttgtgtataccccctctgttagtgtagataccatttagagctcagaactggatatagagaagaaaagtgttcataatgctcttctttatgtagttcgtgttgtgacatttttacccataagcaaatgttactatttcatgccatatctcattctctttgatcccctactctgctcaaaaagtagaaaatctaattatgcaaaaacaaagttgagttcttacctcatccatttttcttttttatttaatatttttctcacgattaaagaatataaataattattaaaaaatggccggtttataattgaaggaatcttttggtgggtagaaggaataagtacaattttgacttgtttttttttataatgtaccaagtaacaaacatatataatttgatgattggtctattcttttgataattatatctaaaataattggacacgaatttacagcaaggtgtttatatattccgggttatagatctataattttgtaattaaaatacacaattttaactgtattgctaatgtacaaaatacatttttatagaaatagttacgatcaaattaataagtttagttgcacaaattaaatgaagcttcgttcgagtatgatgcacttgttcgaaatgaaacatgggaaatggttccttgtaatcacatttctaatctggtaggttgcaaatggatttactatataaaggtactttatggtagttctattaattgatataaattcgtcttttaactattgactttcatcatcaaagacatggagtgaattaacatgaaccttgcattcagttcatttgttaagcctgtcacagtaagactaaaactatctaaaattgcatctgttggaaattatttta

SEQ ID NO: 382058 - DNA, 3543 bp, Cannabis indica
tccaaagactagaagcagttatttcttttgaaacctccctcaagaccttgtcaccaagactcaagatgatcataatgtgagccttctccaaaatttcaatcttctctttctcagtcatgacatccttgatcttttcagcactaaccagagcatcttgaattccatattgcaccagtaaagctctcattttcaccctccataatccaaagtcgttcttccctataaacttctctaaattgaactttgcacttcccataatttccctggatgctcttcacactctatcacgcttggcttttcttgaatcaagccgaagaacttgtcgagctttaataccaaactgttagggaatgcagtctcgattcctagctacacatacctgagttctcagacagaacttccacacacaaaaacatagtatgaagaagaaagaggtattgtattgtattgatgaatctttgtattacaatatatacatatgtctaatatgaactcgataacatgactaaaatggactaaggtcctttctacagtaaaaggccttagtcagtataatgcatacatgttaactagaacctagtacatatagacagttagaaaaataactgtcaaccatcaatagtaactaacaactacttcacagctacccagcttgaagtcgataagtttagtggtgctaatgattttaatgggttattgaggatcaagatgaaagccctttttatagtttatcatggtattgcaaaagctattgatgaaaaacctctaaaggaaattagtgatgacaataagaagcggaaggatgctgagacgaaggtacataaatcctacgcaatttgagagatgaggtctttagagaagtcttgaatgaagagaaggcattgggtttgtggaacaaacttccaacgatctacatgaagaaattaatcactagcaaataaactttatctcaataaatttttgtacactttgaggatggatgatatcaaagatctgagaagacatattgatgaattaacaagattatgctcgattattcaacattagagtgaagttagatgaagaagatcaacctataattttgttgagttctcaacttaagactatctccaatggaaggtgtaaattttgtgctaaatttagctctaaaaatgagtcaatgttttatatttagcctaaattttacaattgtgctcctatgcattaagagtaaaattaactttatttttgataaaaatgtgtaaaaaagtcaacaaaagcattaaattttgattgaaaatgtataaaaatcttattaaatatactaatataatgtaaaaacttattaattatattaatgagctgtagaagaataaatagaaaaatcacatttattgtcgtataaaatttggctcatgctatatttcatgctagatttgagataactttttgcatgtgccaaatttaaaccacattatacactaccactagagttcaattttatgaacatgggttaaaaaatacttatacactatctttatagtactccattgtagatgttccaagatgtatgaccattttggttatacaattctctatggcaaggagacattaacgatgtctgaggtgaaggcagcattgaattcaatgatgattcataagaggatagattataattgttgaccttagatttggccaaccgatagcagagttgtatttattactgatgcttgccacatgttaaacaataagaatataaaagtaaatgagacacaagatttaatagaggttcaacccccttagttagcgggtaatgacctactcccctttttattgtattaataccaatgataatacaactcagatcacaagtgttgtggaatctgaagtggctctcttaagattacaatgagaaaatcaagttggcaaatctcaagtgagggagagagtatgcctttggcatgtgagagaaaagggagtgagagttgagtttcaaacttagagcttgagaacttagagacttagaacttaagacttagggaattagagtttaactaatgccttttatatagtagagcttacatcaagattaactagcaatatcccttaaaaattggtaaataaaactatatttacataattgaataataaactttaaatgacttaattatcccttaaaaataaggaagttgctaatattttccccctattttatgggttgtgaaggcctaattcgcagcttagcttgctgtccacggatgaaggttgcacaccaaaggcctgctaggaaaaggctggccacccatggacttgccaagtgtaggtcgaccggacacacaatgtctacaggctagttggccttttctggccatagggctggctagaggtggccggacaacccattaagggcggctcgttcgtcatttcattatccctcctaagtactcaaacttctcatcaattgaagtattgcgtagatgacttggccttcatgttgacgagttgtactcccacgttgcataaattttatccacgttgacacggcagttcaggtgagaaaaattggaatacatttgccctccaagtctctatgcaaatgtgcgtacggatagggactttcctacttagttgagactgatttagtcttaatcgagaaaattttacactattatttagccttcaaaatattttctcttgcttgtctgatcacattccttggcaccaaattaataaaattatatttttgtatttttttgatgtgtgctgcatggcaagtgagaaagggtcccacagaagctatataagcttctgggagtaactcacttctcattttccacactttattctctctcttcaagaaagcaagttaggaaagctcttcacttcccttgaggctgatgcccctttgtcttccaactctcaagattttcacgttatttcgacaatccaagctttcccccatcttcctcaacagtttttactagtgggcaagctttcaaatatcgttcttcacttgttcatttggattttccatggttgctttaatgctttcctttactttgaaatttttttaattatcatttagattgtagtctttttggattttgatccatatgatagttctagaatgcataatgtgtgatttcttgatgaaatgattcgattttgaacttcgttatgattcttagctctttgagtcacgaagaacatgtttgagatttttaaaaacaaaccttttaatttcaccatcaaccctggcttgccataaggatcttgtttaagacctggccagccatagggtcttttcattggagctagccggccataagggtccaccctagagggctggctggtccatgcctaggcctaagaccctagtcgattctcgacttggtaaagggaccctagccggccctctcatagctcgggaactctggccagcctagtgggcaggcaattttttgtccttttttgacctcgacaagcatctcgttaaagccttgtaagcaagtgtaacgtccccgcttcaagcctccattgggcccatacacccacggactaatg

SEQ ID NO: 382059 - DNA, 1226 bp, Cannabis indica
aaaataataaaaaaaaaactcctttcttttatgatcacatgtattgtaattagttaaagttatttaaacattttaagaaactttcgaatagtttacaatattaaaaagaaagcttaaatagttaattatcatgtgtctaagaaaaaataatcctacgtacaacaaaatatgtaaattttatttttggtattataaattatttaaattttttaaaaaatttacaaatacttttaaataacttatataaaaaattggattaaaaaattatcttaaataccaacacttcctttaggatgtaatgtagacttactttcttaccatcggtctctaataatatttagtgtatatgtatcaattattattcaactttcttagcaacttgcgaaccaaaaaattgaatttatgaaacaatattattatgttgaccaatctagttggctccaaaaatatatgtatatatacataaattatagaaaataataatttatgtacacttgtttattgtttttgattatgtcgtgagaatgatctagttgaaatttttactattggataataagattgacctagtcatatcaaatcatcatattcatatcaattaaaatatattttctgaaaagcatgatcataataattagttagtacttagaagtatatatatattaactaattgattataatttgaaagctactaattaattgtgactgctttcttctttctataaagcaggtgctcttgaaagtggtccacatgagaaacaaaaccatactttggtaactaaagaaaatgaaacccaattaattaaatgtctacacattctgaaaatactactcaatatacatatactatatgcttattaattaaaaaaaaatgaagcttaattatattgttaataattgtgataaatttataatgactaattatagaataaaaagaaatcccacttgtgattagctcttttgtttatttagccgtcgtcgtataagaaaagttagttattttaagtgcattgaatttttattaattatattaaaaaaatttggatagtttggtttaggatttgaaaattaaaatggtgggggttcacataagaatttttgattggtggagtgtttttaaaaacaaaatttgaatattattttgagttttaggctaaaaaatgaaaacaccattttttttttttttatgttttcaaatcataaaatccaaaaattctccaattatt

SEQ ID NO: 382060 - DNA, 1126 bp, Cannabis indica
aattctgggtccgccactgcatagaggtacttattttgtactacctttttcgcattaatttcttagttgaaaatattacacgccactttgattatgttatacacaaataaaacagagtcgcgtgaaaatatgagtaaacaaacataaaagctcattatacctaaaaaaaaaaaacaaaacaaagttcattctcgttgttagtattatattattattatataaataaatgaagggatcgaagggaagggcggctgaaaatctccaagaacatggaaagaagagaaatagaatgacaactgtgcgtgcctcacttgcattattggtcaagcaagtgagctttggtatggttaaggtgataattgggtggctgcctaattcattggagaagatactatataattaattattaatttttatattaataacaataatgaaaagaagaacagggtgcaatctattttgttctttctatctttttttcatattgtttgttgagattcatgtcgtgcaggactcaaattcttcacgtgcctcaatatataaccccacatgtcatagcatatatataaaaattaaataattgatattgaaatttttggatagagctaaatgttattacctcacctttgacagctaaaatgaacaacgaatggaatacatcacagtgaataaaagaataattgaatggaccaatagcaatacaatcctttatctccttgttgaatcattatgtttacaataatatagtttacttgttttttttttacttgtaacattcattaactaatataaaaatgtaaatcagttaaagtggtaccgatcgtggagagagagagtgagaatcatatatcgaaatacatatttatgaaatttgattggatagacaaaaaattgaacttcacatacataagcttatacaagtaggtaggacaaatgtttacgtgaacatttcttttacagtaacaaagctaccgtgatttctaataaaaataaataaattataaataaggtagcgtttgataagacttttttaatcagttctttatttttaaaagtgaaaaagtaaaaatattttttaaaaacatgttgtataaaactgtatctactttttaattttttaattgag

SEQ ID NO: 382061 - DNA, 1532 bp, Cannabis indica
tttaaagcataaaaataaaaaaacctcttttaattattttctactttttctttttcttttttacaatacataccgaattggttgtatataatcaacatatttctaagtttatcttgaatacccgtcatgagttatgtaaagtgtatatttcaaaaaatgattaattaaaatatataaataaataaataaatgattcaatttttttcttcaataaatgattcaattggaaaagaatcaatcgcaaaagttaaactaaataatatataaataagtaaatagcttttaaaagatgaaaactgtttttttttagattttctttttggacatattttttagattttaattacacatagcatgtagctatgaaaaagcaaaaatgtcttaattaatacttttcaagcccaaaaagtttcttcacttacaattatgtgtatttgtttttcaagcgcaaaaagttttcttcacttacaattatgtgtattttttttctataaatattgtgttgtcttctttcttttttcatgtgttaaatatatagtctagacaatagtaaatgaatgaggaaataatttttatggagtatcgctaactaatcgtaaaacgatacgcctaaaaagtactacgcaatacacaataacaataatttaaatcaattagataatctacccatttgaatatacacaattaatgatttatatcatccttatgtttctatttgatttataccacttttacagtattttagtacatagtaaacaaataccttacaatatttttatatatatatactattagtgtggttacaacttaccaatccttaattattaatcgtctaaaatttgtatggatttgcaaaactttaattagccagctttattaataatggaggaacttatttcatttcagaatttctttaaataatcctaatgagtgataaatgattcctattaaagatttaattatgtgcatcatgatgttgttaagtaggacaagttcatagcattaaaaatatgaagtaatattttaatttgtgtcaagaaaataataataaaaaaaaaaatgtgtttgccgcctactccgtatattttgtctgtgtatgagaactggtaattaaatgttaaaaagtgagacattataattattggtaggtatatatagtacatttgaaaacacacaagatctcaatttatataaatatatttatatatatatatatataattaaagcagaggctgactctgatgagctacctaccatattctgattatattaatatatgatgaacagtgataatattggaggagaaggggcatcgtcgtcatcggatgatcttggaaaagacacaaataaaacatttggaatagtaattggtgtggtggctggagtaatagggcttgtgttgataatttggctatgccgtaaatacataaagaaatcttgcacatgtacttgttgtggcttattctcttgtaccatttgtggtgatcgtgattgaaatgtaatatttggcctctatatatatatatatatat

SEQ ID NO: 382062 - DNA, 3032 bp, Cannabis indica
tatttgtttttatatatatacacacacttttgtacatataacatttctctgatcaacaataaatgttgggttttttcgcataaaggtactggctttcaatccaaaggttcttatttgtttgggcacttcagtatgcaaataaaacttgtcccgggtgactcagctggaacagtcactgcgttttatgtgagtgaatggcttctcatttctcattgtttgattagataaacgattgttaatcttgttttccattttggtatggtgtgtagttatcttctcaaaactcggagcatgatgaaatagactttgagttcttgggaaacagaacagggcaaccctacattttacagactaatgttttcacgggaggaaagggagacagagagcaaaggatttatctctggtttgaccctaccaaagattaccactcctactctgttctttggaatatgtaccagattgtgtgagtacccttcaaacataaacacacttcatttattttctcatttaaaaactgcactagtattagaattactattaggtggtggggggtgtatgtttgatcaaatgaaaaattgaatctttatacttttgaaaatataaaagagaagaaaaaaaaacctcttttctattgtctgtaatcatagtacatgttcctctgttctaataatgaaatgaacccgtgagatagttttctttccttttccctattttggagggtcccactggattgaacaactggttcatgggagataccgacaaaacattgaaaaggagaaaaagcagaattcttttcaaacaaaatcattggaatggggaaatccacttttgaattttagccagtcttttgtttgttttgctattatcatattcatatcattcacagtgtgtagtagtagtagtagtgggtgcgtgtcagtaatgtaacacagatcaacagacatgtctagtaatgtgtgtaccttttataaatcatcatctttattctgataaatatttatttttggggggtggttgtggggtaatttcaataatcagattcttcgtggacgccgtgccaatccgtgtgttcaagaactgcaaagacttaggagtgaaattcccattcaaccagcccatgaaaatatactcgagcctttggaacgcggacgattgggccacaagaggtgggcttgagaagactgactggtccaaggccccattcatagcggcctacagagggttccacatcgatgggtgcgagtcatcggttcaagccaagtactgtgccacccaaggaaagaggtggtgggatggtaaggagttccaggaccttgaccagagccagtggaggtatctcaggtgggtcagacaaaagtacaccatttacaactattgcactgatcgtgtcagataccctaacatgtcacctgagtgcaaacgtgacagagatgtttgattgattaatattatttccatcatgatcactctctcaactccattttaggcttgtgttttattaatcgtcaaacatcattattatcatcatacatcaaacacaaaacaagccataatatttatgttgtatctattattctctactatgattgaagattgaagattgaagattgatatgtatcctaagcttttagtttatcattcattttcgaatatgctcttctactactactctacctagtataatgattatggttgtattattggatctttatatattttatatatgatttactttacataaagttatatttatgtgcatctcatcacgttcactcatacatctttttcttattcaaaaacgcaaagaacatttttcctcttgtcatttgagatgaggcctaatttgtttattacgtcccaagattttgatttttgtcgtttacattatatttgtcgatgaaaaaagtaaagggaaaccaacttaaaagtagaaatggtcgtatagtagataatagatagatagatatgggtggacctagctgtccttggcgtaatagatttgtctgtacatcattattgattcttaaataataaagataattttcggtgatgggtttttacaacttcaacttcctcaatcaatttttgtggcccaactacgaaattctccaattcgtttggatttttattaggctaattatgatttttatccttcgaacaaatcatgtctctgaatttttaatgtcgttaaaattgtttagaactattgaaattgttaaatttaaaaatttttgtccaattttaatgaaaaaaatttaacataaatgaaagttcagaagacatgatttagtatatgtaaaagtttgaggggtacgatttgacagatatcaaagtcggggagcatggtttagtacataaataatcactaaaatactaaaattaaataaaattagataaaagtctttaaatctaacaatctcaataattcagtgagaatttttaacggccagaaaaatttaagggacatgatttcgtacatgttaaaatttagggagtaaaaattctatttagttttttttattatgtgacatatttttttactatgtgataataaatttatttgaaatatctttttttcctagaatagagttttttagaggtagatttcacatgctaaattttaacctaaacgaataaagttctattgactatgatgcaaaacttaagtgccctttttatgttgcaataaattttatatgatgccaattaccacatcttatcaactatgtctttactggttctacttttaagctgacaaactattattatgccataaaatttcaactttcttaatgaatcctctgcaacttttatttacatacaaccaaactctcatcagtcattgttccgctagataaaaaaaagtcattgatattgttttctacttttcgtatatttttaaatgatgactctactcttatcttagcttgaaaagtagtattatagggtctttcttttaagatagcattttagcttcaaaataaatattaaaacactaagattgttttttggaaaatttacaattaaacacg

SEQ ID NO: 382063 - DNA, 914 bp, Cannabis indica
aagttgatagtcttctacatgcagtgataacacataattagaaatctcttatttaggagacatatcgatattgatagcatgtatctatacttccgagcctttttcaatcataacaaaagaatgagatttagtagaagccttctttaaagccatatcacaagcaactagagggtcatggaactctagtctctcagtaaacatccacaaaatttcagcccaatggtttctagcgaaagccccaatcatcatcctatctatcttgtccaaccgcaacatcagaattaacatttatctagtccattgatggtggagaccaaccattaacagagccaatagttagttggtacaacaacgaagcaacatattttgcaaacaagacgacactaataaaatatggtacgaaaagttattaagtacattattatgctctttctcatttctagcccactatatttttttattaagaaaaaataattttattaatcaactaatcaattacaaccaaatcaatacaaaccaaatataaatttttatggtccatatcagagttaaaaaaacaaaagcggattttaattaaaaaataatttaatccaatatgaaccatatataatcttaagaatctcaatataatatatagattaaatctaaactacatgaaaatgaagtaattcctcttgtagcatatcaggagatttttgattcttctcgtaataaataccgatcatccaattttttgctatgaacaacgatgaaaattttacaccacagtctttcagactagcctcaatactcaagataaaagtaggctaatagatcatataaagggaagaagaatttctttcatagtatgtattcagctcatgagacactgtgattatgagatgaagatgaaaaactctatcacaaggagagag

SEQ ID NO: 382064 - DNA, 1395 bp, Cannabis indica
gagagagaaataaggataaaacaacaaaaatatcttatttgagttgaaaatcttatcactctgcaaactcacttcttctttcttcttcttcttcttcagcttaagcttcttccttatcctaacaatgagacttgttatacaacaactccattaactaccaaacatggccttaaccgccaccaaattctccgaattacccctccgaaattcactccctttcactttctctaccccaaaaccgtcatttcacatcatcaaacccttctcttctctcaaaaccactgaccaaacccctaacccaaaccctagaaccaccagatcaaaatcatcatcttcttcttcttctccgtggctcaacaagtggcctcccccgccgggccggaaacttcccgaatccacagctcgggaacggtccggtttgaaaacggagtatttggatagggatagaggacagaatgctattgagagaattgttcttcggttgaggaacttagggttgggttcggacgatgaggatgaggatgaggacgatgatgtgggattggagggtgaggatgcaatgccggtggcgactggaggagagaagcttggtgatttgttgcagagggagtggattagacctgattttgttttggctgaggaagagggaggagaggatgaggagatggtttttccatgggagagagaagaggagaggagtggtgaagaagagagaggggttaggggtttggataataagaggaggatgagagcgccgactttggctgagttgactattgaggatgaggaactgaagaggttgaggagaatgggaatgtttcttagggagaggattagtgtgcctaaagctgggcttactcaggctgttcttgagaaaattcatgataagtggaggaaggaggaattggttaggcttaagtttcatgaagttcttgctactgatatgaaaactgcccatgagattgttgaggttggttaaacttgaattttataactttatttatcatgatagaattgttgattgacacttttgattagtaatgtgatatcttagagtttcatgaagttattgctactgatatgaaaactgcccgtgagattgttgaggttggttgaacttgaattttatcactttgatcataattgaattgttgattgacacttgattagtaatgtgatatcttagtgttgatgttttcatttccttttatctaattgtgttagagtttcatgaagttcttgctactgatatgaaatctgcccatgagattgttggggttgattgaacttgaattttatcactttgatcataattgaattgttgacacttttgattagtaatgtgataaaaatattgttctcgaactatgaaaataattgcaaatttggccactt

SEQ ID NO: 382065 - DNA, 3673 bp, Cannabis indica
agtgtagacagaatctttatatcctacaccaaatctcacaaccacagctgtttgtgatttaattaattgactttaatcaattttgaagagccatttccataaggtaaaagtagttttgtgggactctcaccagtttttgggtaaaaaatacttaagtaagacaccaaaggtgtccatcatttttagaggtcactttgtgattggttacttatattatataaaaattattatattaaattatatatcaccaataaaacaataaagaaataaagtaaaagagaagaaaaaatatatcatatattgaatgaatgatcaatctgactacaaatgaatacaattacttatagtaattcagagttagttacaagacacactaactaactctatcacaactcactctaaactactaaccaatcaactaaattttaatctaactaacttgatactctccctcaagatggactatatatatatatatatatatatttttgtgattggttcttttcatagaaaattgaattggcagcaatgtgttggatgattagttatcacagtacaacaatgcaagttcgttgtgatcaactataagctcttccaggatagacagaagctaaccaacttcacaagttgtatttgccattgttatgtattcaacttctgttgaagatctaggaaattgtgtgttgtttcttacttttccatgaaatgattgagttacctatgaaaatacaaaaaccaattgttgatctccttgtgtctaatcaagcatcccaattcgagtatgtgtaggccttaagttttatttctgaatcagtaggaaagtaataaattccttagctaggagaccctttcacatataacaacattctaatcgttgcattcatgtgactaacttaatgtattgtaagaaattgactcaatttatttactgagtaagatatgtttagccttataattgtcaattattacaattttccaacaatcctcatgtacaaagttgaatctcctagcgtttctttctcatcttctccaagctttagattagcttctattggtgtattcatcgacttacattcataagttctttttccctaattcacacacagtttacactcaaccactacaattgattcacacagacttatggagaccctctctcatggtctcttctaatggatattattactatgttcacgttattgaggcttattctaaatttacctgggtttacttactcaaaaacaagtctgatgcaattcagacattcattaacttcaaaaccccggttgaaaaggaacttaatctaccaattaagaaccttcaatcagattgggggagaattccaagcctttacctcaaatctgattgaacataggatccatcatagactttcatgcgcccccactcatgaaaagaatagtgtggctgaaaggaagcacagacatctcatagagactgccttaacactcctggcccatgcctctcttccattaaaattttaggatgaagcagtgagagccttagcctttctaatcattagacttccttcttctgttctgaaaggtgacactcccttgcacaaactcttcaacctgcagccagattacaactaattaagagtctttggttgctcctgctatccaaacatagaccctacaataaacacaaattagattttatatcagaatagtgcacatttcttaggtatagtatcaatcacaaaggctataaatgcttatctgctaatgggagaatctacatctctcgagatgtaatattcaatgaacatagcttcccttatgctgtttaaactaaaacttgtccctcatcttcaacatctactcatccaaacacgcttattgtccctgtaccaattatctcacccactcaaacaacacagagtcaacatacacctcaaatagatcctgcagcctctgcccattccccaatgcctgaacttggatccataccaacacatacaactcttgcaacatcacctatcattccagcagcagcacctcagccaccatctaatacacatccaatgacaatatgggcaaaagctagtgtctataagcccaaggtttacatcagctcaaaaacacatctgacattacaggaagccttgaaagatcctacgtggaaatggagctattaatattgaaattgtggctctaaaagcaaatggcacttacactgttgttccacttccccttggaagaaagactattgggtgcaagtgggtacacaaaataaatgaaaatgcagatgggagtgtctcaaagctcaaggctaatttggtggccaagggatttcaccaagaatatagttttgacttctctgaaacattcagtccaacagttaccaaccattcgaatcatcatcaccattgctcttcgtaatcactgggagataaaataacttgatgtgaacactgcatttttaaatggtgacttggttgaagaggtgtacatacaacaaccaccagggtttgaggaacaaggtccacatatggtgtgcaaactgcagaaggccatttatggcctaaaacaggctctcagtgcttggtttgacaaattgagacggtcacttctacactatggttttcacagctcaatggctgatgcatcccttttcataaggttcaagaaagtcataacacctatgtgttagtttatgttgatgatattctcatcactagtagtgacacagctgaaatctctctactgatcactcaattgaatagtcaaatttctcttaaagaccttggtgacattaactacttcctgggcatacaagtgacaccaacagatcatgacatgtatctctctcaaactaaatacatcacaaatgttatatgcaaggctaaattgcaatttgctaatagcctgcctactcccatgactagaggggaaaaattgtccagcattggaagtgatccagtcaaagaccctcagctttatcgaagtctagttagtgctctgcagtatgcaactctaaccaaactattaatctcatatgcagtcaacaaagtctgctagtttatgcactctcctctcgaatctcactagaaaactgtcaaaagaatactaagatatcttaaatgtactcttgactatggccttgacatgtctcactcaccttctctagacttgataggcttttgtgatgcagactgggcatcgacacagacgatccaccacaggtttctgtgtttaccttggttataatctcacctgctggtcctccagaaagcagcacacagtgtctcaatctagcactgaggcagaatatagaagcttagctagtctgactactgaaatcacttgaatataggccctccttggtgagttaaaaatccaaattcctcgatctccaacaatctggtgtgacaacctcaacatagtgctgatgtctgccaacccaattatgcatgcttgaacaaagcacatcgagcttgacttatactttgtcagggaaaaggttctggccaagtctcttgtggtgaagcataccattgcctatgatcaaacaactgacattctaactaaagcactgtccaatgctcgattccttcttctcagagacaaacttaggattcagtctctctttccacccttagtttgagggggatgttaagagtataggtcacagtttgttagtataggtcaca

SEQ ID NO: 382066 - DNA, 975 bp, Cannabis indica
acattaattaatatataatcttaaattaatagatatattacatatccttagctaggaaatctatcccccattggaatctccagtactactccatgtgttaatatagataaactaatacaacattactgtgttcctttattaattaattatacaaaatttgaaaactccatctttcttaaatcctatacctatattaaagcatctaaaaaatgcttgaatattactcttgtgtgtctaaatacgagacatgtatactataggggtatatagcattaacataggggtatgtaatttagttatatgtgaattatatattactatacaaaagatcaaatgaggtaagataatgtcgaattaattatctattttaaatgaatatatgcctttcgtatatttatttatttatatagcaaggaaaatctttgttgaaagatataataccaatgacaatgtgccatgtggtaatctttattctaatgatcatgcatgatgctacatataagattatgtcaaagagtgtttataactatagaatattgagtaggtcagatcatattaatactgacttgatcattcgaatggttttgctaactccttaatttggaactggtataattataaggtttgtttataatagctagattagacttttataatcgtttttcaaacattaattatttaattattctacatgctttttcttaattttctttttgtgttcaatatataatcaacaagactaattaattaattaataaaacttaatataaatatattccagtactatagtactaatgatttttatatgtatacaagcaccatatatatatatatatccatatatatactagaagaaagttacgtgcaaggcacgtatatttagttttatattatgtgttctataatttaattaagaaaaattcaataaataatcatataatttaaaatgatttaaaaactaattttaattagtgt

SEQ ID NO: 382067 - DNA, 3621 bp, Cannabis indica
ttttaattgtacacaagcagttctatcctaagaatatacacattatatcataataaccacattatctaaaatcaatggtcaaaaagagttctctacgggtaggaaacttttgttagtcctatcataatcttgtcctatatatatatttattttatttttactttttattctatgtctgttcaagcaaatctatatcattattttataatattattaattaataataagccaaaatttataaattcaaattaaataaacacttttattaaaaaaaaaattagtaaatagttacaaacaattaaaatatctgtagataacaaacttattaggaaagatattaaaagtgagatacaatgatgacataagtggtgactgttggggtattaacccaagtcttacattcgaagaatagacaagagttgccttggatataggtattccacctactccggtggccggacattatatatcatactaatgtagtagtcaaggtaaaatagcggcatgacaaggtgaaagaacggtgatatcagttgttttatttaaagatgtttctgtgtatgttttttcataagaaattaaaaataaattttgaaattatttaataattttattgttcaattaatatttatatatataattttaaaaatttataaacaatcgcatgaaaagtgcggcctatttactagttaatatatattactactacactaatgcgactgtgttgtctagttaaataaataaaaataacatgtacaactaactatataaatcatattttcaacaccataaataatttaaaatttctcaaaaattgagaaaatatttgttataattatatatataatatatgctgtcatatataaaaaattgagttataattcctgctattgtcaaatatagaaaataccagacgatcaataaagaaaaatatgatgctcctagctaagctttttgtttataatttgtttttaaaaatgagttctttttttcaaaaagaatagaaagaagaagaaacaagaggcttattcactaatattttttgtgtgtatataaataattaatgaaagagaaagtacatattttattgttcaattttttttttctttcctgctaaacaaggcttaagtaatgaaataggtttctaatgtactattagagaaagtgttgaatacaatttcaattttcaaccacccacacatagtagctcccacaaaccccataagttaattataaagtctcatcacttttcttcttgtctgtattatatgtggtgtaaggaattgactaaatatttccagctttacacatatacatacattcacacgtgtgcagccaataaatcaatataataatttccttctccatctctttaaagcctatatgtcccaactcattaaacaatttatacaagaagtactattattcactactactagtatctctgatatttatcataagttattgtgtccagtccacattatattattctcttttttctccaaaaagagccatatcccagttcacagttcccatatcttaattttggttctcaacacaaaaaaaaaagaccatgtttagtactaaacaagtagtacttaataagggtctgttcatgatgattttgttgatgagtactgttattattgctctacagtacaaccatggagtttatggagctagattattatcaagtacggagaagatggaagatcttaacaaggttcaagcttggagaagtagtactgaaagttctactacttctaacattaatgaagatcatattattgatggagaacaaggcttttatgcaactatcaacagagaagtgccctcttgtccagaccctttacacaataggtagattatatatatatcatatacatatatatatatatagagagagagagagagagagagagatacatgacttttacaacttacaagctactgcttctactggattaaaattcatttacagttgtatataaactataagccagttatatattaatatattatattgatgttggacgctgaaaatacaatgatgctattattattattatgtttttttttttgttatcacttagtgttgaaaagattttatgtttttcttaggagatattgttaaagaacttagtaatagttatgattggttgtcattaatctaaataaaactagttttttctttatttccctgaaaagcagggaaaatgtgtgttcttatagcttagtgaaggaatatgaggtttgacttgtattatgcaaaagaacaaaaagtttgtactcttatattgtctaataccaataatgcatctttcttctaacttttgcttttgggggtttggatgcaaatttcaaccactatattcatatccattttcgtttatctaactgggtttgcagccatatctgctatagttccgagtactattcaagattgcatagtgaaattaggcaatgggggttttataataatgtagtacaaacagggacattaaacatatccatagtacccaacagagccccgtgaaagtgaggaattcgacaaagttttttgaattcaagcaatatatgttgctttcttgtttttattgtactgtctctttggggtaacgtgtctactcgttcatctctatttacttttttttttttttggtaagagagaattaatgagaaagaaattcacaaatttgattggttcgagtgttaattgtagtggagcaaagttaaaacattatttatttatattaatttcttgtgaagaaacgtgagcaataatcatgaagtagaagcaaattgtctattggggaagatttaattgtccagcatgaagattattgaaagaaaataaacaccttttaagactgtgagcaatgattcctttgacacaaggaagatcattatagtcaaaataataaataatacaaaactctttacttaattaacaaaccttaacctcaaaactccactttaagtgaattcagaattttaaaaatgaataaacaaacaagaaaaagtcttctcatttcaatcttaagctcaattttctaaacccaagatcccacgcccaattgaggaatgacttcttttcaaaaagtttcataaaggaaggaaattgtgggccagcttgtttgaattgatggggttgggatctgcgtgccctgcaggagtcaaaaatggaaaaaccaatgttcagaagccatcaaactgtgcagatttgaatttaaatttcaagtcttatgttacttgaattgcttattgtacatgtataaaaaaacaagaagacatttttccatttctgaccaaaaactaaaagcgaattttctgcatttaattccaaattcaatcaattaataataatacatgaaaagttctgacaaaaaacactgaaattccttaacaatgtcaaaaacaaaacttcaccacaacaagacaaggatccaaagatcaaggtactaatttagtgtgggaacaaatatgcattggaaaagatatggttgaaactgtttccacgagtaaatttgtgttccaaatgcttttccttttttcacatggggttcagataattcataactaaaatctcaatggtcaactagttttcatatgaagttgtaa

SEQ ID NO: 382068 - DNA, 1405 bp, Cannabis indica
taaaatataaatgcatgcctaaatagagatttagcataattactataaggtatcaaactatcaatgttgccagttcattaagttaggttaagtatatggaattttgagtcaattttgtctaaaatttcacttgtcattctttttacgtcacaacaaaaaatatctaataatcaaaataaagggtaattaaaaatatgaaaaaaaaacttattttacacgtatcacttttcacatttgtttgtattttttttaagagaaagatcattgatttcgttcaacagaggaacaaaagactacatccattacaaagctcaacgataagcgaaagcaaatcaatctccaaaaagacgagcaaacaacaacaaaactaaaagactgacatacattcatagtagtcatagtcgttgtaaagtatcataacactattaatggaaggtaaagaaaaaaaactaaggatgcaaacctccaaatccctagcaacggaatgtccaacattggaccaaaaaactaaagcaacaaaccatacaacaacaaaactaaaaacatatctaaaataaaataaaaacacaaaataaaagcaaaaccaaagactcgaactcaacgggaaatgaagaggcagaccgccaccaccaagctttaggtgccggaggagaaacgacattaggccactgaaccaccacaactcatcgtccctaagtctttaaagagaaggtcgggagccaactcctgtaacacgaccgagcatgttgacggcccccaacagagacccaccattacaaacggtggagcccccaacagaccctatctctaaagtccacggagccccaaaaccaacaatgtcggccaagtgaggtcgacggtccccatcggagacccattattgcaaccaccggagcctctggcagacactcactgctatagaccatagagctccatagtctacgacctccctccaaaggcgactctttaaaagccaccctttagccaactttcccatttctgaatagcaaagagccatgaccaaaagaaactccattcaactctctctcggctagagaacaccagacacacaatagggtcgatgactatgtccctagttgagaaagagggaagaaaagaaaaaaaaccctaacacagaaagaagagagaagaaatcttagagagaaaaaagaaataaatatgcacaacaaatttacatttgtttgtatttgatctagtttttcacaatataaaaaagggtcaatactattttggaccctgtgttttgcaaaagttaccaagtggaccctctgttttgttaaatgataaaatggatcatgtattttctaaaatagtacaaataggatcctgaactgatttttttgtcaaaataaaatttaataataattcgatctaaatgtgttat

SEQ ID NO: 382069 - DNA, 2934 bp, Cannabis indica
tttgagagaagcaatggaggcatgttcacaaagaggagaggctgctctgttacagaatccttcaagctatatcaaactgaaatggagcataggtgagttccaatatgctgagagccttcttctttggcacttagcactgagctttgctacaacgatcaggccaattcaagtacttcagaaggagataagtcatgttggaaactctttgctgaacgttgttgtcgcacatgcgtttgtcaaggtcaccaagatgatcaccaatcaagtgtaagtgatcataggaatatttgcaagctcatttcgaattacatgttctatcttctagtaaacaaatcagtgatgttggcaccaattatgggcaactggaacatagtgtttggagatacttgtgcagatgccaatagatttttcgaaaagcataagctttcgcgtcatggtaaggtgtgtgtgaagattctatctgtgaaaccgaagattaaatcgacagctatgaaaggcgagagaagcaaatctgtgttctttgatgcttgtattcttgcgcaacaattacaaaatgaggaatcacagtggaagattatgagccaagtttgggtggaaatgttgtcatatgcagccattaattgcacgccattcgttcatgctaaacagcttagtaaaggaggagagctcttgacattcacatggctgctaatgaaccatttgggtttgggaacgcaatttgtcgagcaagaacaccatgctggaacaaagatggtcacagtcatttgaggaagaacccatgtcacctcactattagtatttgtaaaccaatgaaatattggttaggtagttagttgtattgtttagttagaaaactggttttgtattctattatgttagttaactttgtagctgaattgtattgaacattgtgcttataaataaggtctcaagctaaccgaataggataagcttttctttgacaattcatttctaaagctttgctaatatgctatgcatttctcttcttctttctcttccaaactttaccgccattgataagctcttacatggtatcaatcgccactgaccactgtcttgcctgattctggtgatgacatgctttggtttgctgacacaagggccacaaaccatatcaccaataacctggaaacacttgacactgcaattgcctatgctggtctagaaaccttagccattgcagatggtaagaaaatttgtatctctcatgttggtacctgcacatttaccttgtcaaaacatctgttctttgcaattaaattttgtccttcaaattccatccatacaaaagaattagttagtgtttccaaactaactgaatataacaatattttttcttgaatttcatcaacactgctgctttgtcaaggacaaaggaactggacagatcctactcaaagggaaagttaaagatggattgtaccaattgggagatggttcctcctccaccactttagagtgtaatcttgtgtctttcccttgcactgataggctagttttaggtacattttatgaagtgttttaaaggtgtgtttcagtttgattatattcattttgtgcagaattatgcttgtatcctacttatttcaggtttaaatagtaaaattcataatatgaattgaaaatgagaagaaacatactaaagtatatgaatatgatgaattcatcgtggaattttgagttttaagatataatggtgtgaaagattctaagttttggatgctcaacacgctctgttttatgattgaaaatcaaatctaaaacttcaagccaatatcaataaaacatcaactcttttttattattccatttgtgcacctgaactatacaattctagtatgagtaacgatgtgaactctcttggcactgcaaacttgccacccctgcctttaacactcttagcaaactcttacctcaattatctcacattggatctgttaaagactgttgtaaatttttttagcacgcaagtatacgtgatcaaagtaagtaatagactcacaagagtgaggttgatcccacaaagattgtagttaattactaaacaattaaattcttgaattctttttggcgacaataataagaaaagatttttaaattctattgacgaagaaaacaaatatattaaagtggaattaaaaattagtaaagcttagggtgattaatttcaattgaatctactttatgtggtttaacataacttaattcccaatttctaatttccatacgacaacagatttattaaaaaaacttatattcgagctaagacatataaatatcaacctatatgtaattaaacacataggaggcattaagtatgaaaatcctaattgctacacaaactatataagtactctcgtcctatatcgaaatctttacttatttcactatagacaaaatcaatactcacttctcagatttttggattgatatcataaacagataattgatggctggataataaaaaaaaattaagtacgaatgaaataaatacacaataaaattggagaagaattaaatcacattaagccaaaaaataaaagtgtcaaaccaatctccattaataacaataattaaaaacctagttactcatgttcattgtaaataagtgacaacaattaaattaagaatataagagaagagtagaagaagataactcgtcaaaaaatattgataaaattctttaaaagccgctttctgcttccaatttttgtccctaaagattgctgctttgaaaagtgttaaaggggtctttatatagtttttcattaaaaccctaatttttgccagattatgcaagtgggtcgcgacactacaaaagcatgttgtgacccgtgtctttttaactagggatgtacataaacttttataaactgcccaatccaaataacccgcccaaaccaaaccgagata

SEQ ID NO: 382070 - DNA, 2176 bp, Cannabis indica
tttttggagaaatgatttatctttttttctttgtgtggtacggaaaaagggtttcttgtagaggaaagagaccttagtgggttgataccaccatgggagacgacgcggaggattcttgcggacggagcagtggataactcatctctgttgttggctgaggatagaactcggagaaaagacccgcttaatggtctcaaccgctacaatggcggttggaatattagcaatagtcactactgggctgtgagttactattaaattgtttattttatatgcagtttctaagtttgttggtgttatctttgccattttggtttttgtgggttctgtgattctgagatttacaacgagtaaccgtacaagttttatgggttttattattgctttgagttattgaagttttatggtactttcatgcgttgaaagtaattatctggactcatattttgctgtgaatctgtgaaatttttaaggatttatattgatttacatttgttgtgggggttatataaagttgactcagttaccttatgactgatgttccaagttctctgatgaagggtctttgagttttgtttctttcaattgcatgctttatagtcttttgatgttgatttttcagttttaagttagtaaattgtgtttaccaagtttaatttattattagcattcatctggattaccattttgtgatgcagtctgttggtttcactgctgctccatttttcgtcatcgccctcgtctggtttgtgatttttggactttgcttgtccttgatctgcctctgttattgttgctgttctggagagccctatggctactctcgaattgcctatgctctctcattgatcatgctcattctctttactattgctgcaatgtaagtctgtttctctcatttaatgttgattcaaggatgttttaacacttgcacatggctttgtaatggtgatagtgattcaggttactgatttgtgattccttcaatatatatattcaatatttcagcatagggtgcgtagtgctgtatacaggtcaaggaaagcttcacaacagtacaacaaacacgttgggttatgttgtacaacaggcagatgtaactgtcgaaagcctcaggaacgtttcagattatctttctgcagctaagcggatcggtgttgatgcagtgtttctgcccagggaagtccagaacaacattgacctaattgaaacaaagatcaactcttctgcaaccatgctttctgataaaactgaagagaattcaaagaagatacaagatggcctggatagcatgtaagttattcttctgcagctactataacaacctgaattaatgtttacagtacatttagataatgcttgtatttcttcatgttctatgctgcaggagattggctcttattattgttgccgctattatgctctttttggcatttcttggattttgtaagttattgaatttcttcaattatgattacaaaagtttccttctttcattaattgtaattttatacatgtccttgctacttttttttgcagtgttttcgattcttgggttgcgaacacttgtatatatgtaagtaatgaactttttagctgtatcttgttccttattgctcctacatagcacaccaaaagatattcaaagttatgtttttggtagtctaatattcataaaacaaaattattattgactgcagtttggtggttgttgggtggattcttgtagcgggaaccttcattttatgcggtgtatttcttctccttcacaagtaagttctgtttgtttgagaggttgttggaaaattgcgacacgctcttgatcttatgttaataaaatgatggtggaatgaaatacgctaatctaccaacaaaaatgtgacatcttaaggagttgaaattaggattatatgtcaaatataaatataagggttataatgcactggaagtatatttattagtaccaatttttgagttgatcatttagtagcagctaactaatacaatgtatttaagggaggacaaaactgaatatatttcttaaaatgcttgttgttctcagtaagggtgcgtttggaaagccacaatgtaattggatttgtgtgtaattggaggtaattacacaatttggcatgtttgtctgaccatgtaattacactgtaactgtgtaattaga

SEQ ID NO: 382071 - DNA, 3113 bp, Cannabis indica
gcactcctaacagtgaaaaactcttaacgcatcatgtactcagtaccataaatcagtactcatatgactactgagcggaatcttccacaccaaacgagttgaccaaaaattatttgatttaattttatttctatgacaaaaaaaaaaaacaaccacggtgtcgttgccaaacgagttggtaatcggtgtggagtggtcaatcttgtttttccagaaggaaaaaaaaaaaagaatagtcaattttgacaattttccaattaaaaaaaaagaaaaatttggtaaaaaaaaaaaataatcatagaaaagctcataataaggaaaaaacgaaagaaagaaaaaaaaaaaaacaattgctagaacttagaagagacccaataatctcgactctccctccttcttcccttacctctgcttactcaattctactaacatcttcatcttctccgccatagctacaggtctacaagacctattctttttatattctttaccatttttacttgctcaatctttactttggaccaaaacccattttggccattgactagttcaactttgtttattcacagacatatgtttattataatacggatttgagattgaaagaatctctttgagctttacttttggattatggggggtaatggtaaacacaggtggaagatctccttctatcgttcctcttcttcttcttcgtctccctcgacctcaaaaatggatatcaagccaccccctaaggatttcgtctgccccgtttatggtactttgatggctgacccagttatcgtctcctcaggtcagacctttgagagggccactgtacaagtatgtagagatttagggttttctcccaagcttgaagacgggtcccgacccgatttctcaaccgtgattgcgaacagagccatcaagtccacgattgctcattggtgcgacgattccggtatggagcacccgcgtctaccggagtacgaatctgtcgagaaggtcgttcgagctttaatggaggccgaggaggaggaggttaacagagcgcggaaaccggaccttagggtttcggaacgggagcttctccgcggtgtagctgagaatccgcctgtgatattctcccacgcggcgactgagttgggcccccgagtgaaccatttctactctagctcatcggaggaatcggttgtcattccgggcacgtcgaacccgggtactcctcttcccctcgcgactagacctctatgctactcttcgtcgtcttcttctgaaattgcggagctcgatgccttaactggaatccccaattccaacggcacggtgtcggaagaagaagagaatttgttgaagaagctcaagaatcctgaactagtggagcaagaagaagccgtgattttgctcagaaagacgaccagaacgaaagaagagcttagggtttcgctctgtactcctcgccttctcttggctctaaaacctctgatcacttccagatacgccgttgtccagacaaacgccatagcttcgttagtcaacctttcgctcgaaaaaccgaacaaggtgacgatcgtgcggtcaggattcgttccattcttgatcgacgtcctcaaaggcggctccagcgagtctcaggagcacgccgccggagctcttttcagcttggcattagaagacgagaacaaaatggctataggcgtactcggcgctctgccgccgcttatgcacgcactcgtccgttccgagagcgagcggactcggcacgactcagccctggctttgtaccacttgacactggttcagagcaaccgagtcaaactggtgaagctcaacgcggtcccgacactcttggccttatcccaaacgggatcttcggcaagtcgggtattgctgattctctgcaacttggcggtttgtccggagggaaggtcctccatgctcgatgccaatgcagtggagtgccttgtgagtatgcttaggaggaacgagttggaatctgagtcgactcgggagaactgtgttgcagctctgtttgcactcagccatggaagcatgagattcagaggattggctaaggaagccagagccgtggaggtgttaaaagagattgaggagagagggagtgagagggctagagagaaagctaagagaatgttgcagatgatgagagggagagatgaaggggaggatgaagaaggtgactgggaagctgcgcttaactccggcggcagcggattcacagggtcaaggtaccgagttggtggtgccggaaggaatatgcatatgctacacagtgcaaattcaacaactttttaattttcaatattattatttttctttttcagttttttttttttttggttatctttcttttaggtttagtctgtaaattttctattttggtgcaaaatagaaaggaaaaaaatgttgtaatttttaatgttggttttggaggaatgagtttgggctgactcggtactgagtttagtgtcgagtttggcaattgggtatttttgggtagatataatatgggtgtaattatttggtgggttagagcatcttgatgggtgtttgtgtttgggttattttttaacacatattttgattgtttgttgtcttgacaatgtatgttcaaagttttcattatgtagaataacatctgtaatttaattttggtttaattaatgatttcatttcattctattactgttacttagttttgccaagccaactggctaaaacaataacagctcttctccataagatttggtcgtttgctttgtgttgtttttctgactttggaggggctaataataagagtactaataattggaccatatgagatatgactttgattttcaaggtactaaattggtaataactttttattattactttttaaaaaatgaaaattggtgggtacataatagaatagaatagggtattttagttttacgtataagagaagtcacggagacaagtgcttgtgcttgtttataataataataataatggatgtggataattacgtatctgttataaaataatataaaataatataaagtagatgagaagaaagaagaagaagatcaagagagaaagagaaagtgaatgagaatttctgagttgtt

SEQ ID NO: 382072 - DNA, 1763 bp, Cannabis indica
aaacataagatgggggagtgacccaactgggacctcaaggaaggttaaatgaggaaagtatttagagtttaagaagggtggctaacaggggatatcaggttgagttggatgcgccaagcttgcttcgcaagcatagcttggttgaaagaggttacccaagacctctattgaacttggagttacaaagatttctaattttccaatgaattttccttgtccctctttgtttcccaccagaaattggccatctctctttcaacaaatttgcaaaaagaagtgggaagcttgaaaactgacataacataggaaggtatggactaaatgacaactttcaaaaggatcccccacctttagagaatagtttacattttcatttttcaagataggcccaaattctatccttaattaggttaaaagagtgcttcttacttctgtcaaagaattgtagcaagccaaggtacttatccaagctgttggtggctagtatgtttaagtaatcttgaatgagcatttgataagtttaggaagtgttgggagagagaaaaatagaggatttgttaaaattcacaagttgcctcgaaacagactcataggttgcaagagtgtctctgataggattgggggcttgaatgttggacttgcaaaagaggataatgctataggcaaaaagaaggtgggaaattctttggatagttctggcaattttgacttccaccgctctttcctccacttttgcttgcctaaggagggtggaaaggccttcagagcaaaggagaaagaggtaaggggatatggggtccccttgcctaatgccacaggtgggaacgatattgccaagtgcttggccattgatgttgaatttgtaagtggcagtggtgaaacaattcatgaccaaagaaggaaatttggcaggaaatctaaattccagcatgattttattaatgaaaggccactccactctatcaaacgctttgtccatgtcaagctttaccaccatccaactactttttcctgttttcctccctttgatggcatgcagaagctcctgagccataagaatattgtcagaaataagccttcctttaaagaaggcgctctgatttggggagatcaaggggttgaggactcgtttgattatattagccaggatttttcgaaacaattttataaatagtggtgcaaatgctaataggcctaaaatctgagagggttgagggttctttttgaaattgaaaaatatttcactcatctcttcacatcacaaagcccatgcgacattgctatagatcaggacattactagaattactacctagcttaacccttatcagcgtcaatttcttgatcaggctttctcccctaatgaagttgctattctacatggcccacaaagcccctggaattgatggcttcaataaccagttttatcagaacaattggaatgtagtaggcaatactgttactgatgtagtgttgagtatccttaatcatggagttaatttctcctatttcaacacaatgctcatcaccctgatcccaaaattcaaaaagcctaggaggaggccatgatccgggatgaggccctgcggagagacaggctggaggccaagcatcaagaggagctgagggcggaaggtgaggccactgcaaaggccaagcaggagctccgggaggccagggaagccttggatgagatggttgccaaggtgagatccttagaggaaactcaccaggaaaacttagagtccagggccgctctagccg

SEQ ID NO: 382073 - DNA, 3106 bp, Cannabis indica
aaaaaaaaagaataaaagaaaaatgtagagtttaattttctcaaaattatatatacttagtcctcttggaagattggacctgtcattattgatgacccataaaaacagaaggtactcatgatgggctattagcaggcctagtcttaccaactgggctgggccataagagctctcgctgaacgagatgtattaatttgtgaactcaaaaacagttttcaaattaatacatatacatgtggttttaagttgaaaaatataactttctaagagcaaaattagtgcaacactacaacatgtaagaagaaaagtaaaaatgataaactttcaaaaagaaagtaaaataaaaaaataataatataaaaaagatatagagtataattttctctagtttccactaaggtacaaaccattttcggatttgaaaacacaacaaacccgaatccaatacaactggtagcctggtagtaccagtagtggcactaatattccatgtattttttcatttcagtcccttcccctaattcgaaccaccaccttctaaccctaaccctgaatcctgatcattagtgtagtgtagtacagtgtactaccctacccccttccttcttcctcttctttacaagaatttacaggcaaaatttgatgcaaacaacccagagaaaaggggaaaaaaaagccatacataccgtattaatatcttcttaactttataaactgtaaaagtatatgtatgtaataacttggtggtctctttaactctgtagaagcttccatgagggtacgggtgcgggtcttggagccgaagcgaagaacgcctcgaggtcgggtgggtgaaaatacccattcttgggggaaacccgttttttccctatcacagacagattcctcttcttcttcggcggaggcggtggcacgtaacgtaccggaatctgaaactcgggtcgggtcggtgttgaacatccgggttggtcaagatgattatggtaatcttctactgccataaccatattgatgtcctgatcagcagtggtaggactaataatttccatgattgttgctgtaattagaaaattgcgattaaatattaaatatatatatacatgtattataagagagtgggtgggtgtaagagaataagacttgtcgaagaaggaaggagaagaatgtgagctgctttcttccgaagttagtggattggagagcttcgacttcaagcgttttttttcaatttgttatatatataagaaaatgaaaaacatggagatttgaattttgtttacttattattataagctcttctcagagtatttggcttgttctggaagacgcggcagatgtgatgactcattttattttatttttgcggctgtggtggggacacctcagcggtgtacgatgtctacgtgtcctgcaatcgttgagcttttcccacgtggatatacacgtggcttacgcacagcctttcgctcataataaaattggcgccaattgtctccaaaatgcgcgggaaaaatacctattactatttgtttgaatggtggcacacagatctccaataccttaatttatttagttttatttggggttagaagagattgatattatttcaaaataaaaaagtatgattggaaatctgtaatttatttactaaattttttatactggtgtggtgtcaatttatgacctatgttattcataacatataaactacactcttattacgataccaggtttttctttaaacaagatctttttcgtatatatggatttatagattccaccttacatatgcaaaatgcaagtctgtacttctacgaaaaaaattatgagaatgaatcccattgtccgttaataagtagttttttttttcatacaaaaagtaatcacattaagtttttataaaatttgcacaatacatttaaaataaaaataaattttattattattatttacgtttttagtaattttttttttaacacttttacaaatttattttagtgttatttatagtttttcaaatttgtatttacatgttttaactagttttatttttaagtaaaaatattattttctcgtagcagcaacgtcaaaataatattattttaaaataatataaaaaacaaaactttgtattgttgttaaaaagataacgttaatttcttgtagcaataacgtcaaaataacagattttcaaaaacaatgaaaaaccaacagtgtatttttatacggaaatctgtaacaaatgtaaaaagagaactgtacatctataaaaatataatttttttgtcagtgttgtatatttataaaataatccatatgcaaaataaaagaacccaataattctttatactctacttttttcttttttgagaaagaaaaaaaaaaattatatagaatcatttacaacaaaagaaaaaatggcaaagagaatttcttctaaccaaatataattattatccaacattaaaatttatttaatcaaataatgagcgattaattttgcatctcgtcaaatatgagatacaaaaatagtaaagaggtagaataattgatctgtaacatcaaatatcaactcttgttgaatcattgagagaattggcaagtatcacagaaattgtttcaaccaaatccactttctctcttttttttaaaaaaaataacaaaaccacttgaaagttcatatgtcttgcctattgtaatccatgaaacaaagatttagcttccatttcttgtaatcgaaagttccatttatacactactttatatctttaggaatataaaaatatcaaaaagagtagtctacccttaactttcagttttattggcaggccatgtctatcaaaatttattgggcattgcacacggcccaactatagttgggtacgtaggccattttattattttatgggattatttcacaaagacacaaaaataataaaaatatgacaaaaatataattttacagaattttaaatatttgtacaattttagttacagaaaatacagtcttttgatatttttatattcctgttacttttatgtagttttcttattaattttatagaacactaagtaaaaaaaaaaaaaaaaaaaaaaacttaaaact

SEQ ID NO: 382074 - DNA, 5891 bp, Cannabis indica
tcttgtcttgtatatatgatgtcacaaatagtacccttaaatctaattattactctgatcaggaaaagacttttatatttattaaattattgttacaaaattcaagatttgtatttaacttaatatttttcttttggaggtttttgggtgtttgactaatgtaatttgtagtcttatgggatccgtgactcttacacggtatttcggatgagtttgcttgttcggcatcatacattgaagattacttgtttttttttttaatgaactttcatgtgatctcatctgttggcttaaatgtaattgtatatttaaataatatatgtcatgatagcaaaagtttctattttaaatgtcgtttcatcatcgttatcatttccatctcaatccaactaagtctggccttttggccattttatacattatcttattttctcttcttatcgatttagaatttgataaatatttatcttttgttacgagttactcagtatttttttttttacttattcttcttcttttcatttgtaacctcagttaaaatgcttgactggggtgaagagggccacaggacagaagctgagatttcttcattaagagcagcttttacgcaagaagttgctgtatggcataaacttgatcatcctaatgttactaaggtgtgaagtttgatatttatgttgttttttcaatttcttttgggacttcataacatttgtgaattgtgatcgaagtgttgaactgggaacttagtgttatgtttttatagagcctcatgcaagcagaaactgaattgaattaaccttattatgtcagaaaagcatttctatgtgatgctcaataggttgtagttttaacttgtacaaggctcttctgtttcaaaatcacagtaaaagcaatgttgtatgtttctgacttctttctaaatggctagcacagtagcatttatcatgaatgtatacataaactgataagtttctttcatatgatagtactacattgtacattgaacactcactaaagcatagcttatttgaattttagtaatttaaagtaatcaggtcatgagaattctcagagctatttttcatggcctctttcttgatatgatgtggagcttagactcctgatgcagattcattattattgttgaaatgagtggtgtttaatcaagagaataattgtgcatgaacaactagacacatttagagatggttttctgttactatctcctctgagtagattgataatattctgcactatcattttccagtttataggggcaacaatgggttcgtctgatctacgaatacagactgaaaatgggttcatgggcatgcccaacagtgtttgttgtgttgttgtggaatatcttccaggaggtgctctgaaatcttacctcataaagaacagacgaagaaaactagcttttaaggtcgttgtccagctggctttggatcttgctagagggtatattactcgtctcttgtttctatctcccctacactctagcattctgttttggcacttaaatatttgtgggttgtgatcttgtcaagcttaatacttagacgatcatgaactttgttttgcagtttgagttaccttcattcgcagaagattgttcacagagatgtaaagacagagaacatgcttctggacaaatcgcgtacagtaaagattgcggatttcggggttgctcgagttgaggcttcaaatcctaatgacatgactggggagactgggacacttggttacatggctcctgaggtattttttcgtccatttacttactcattatataatttagcttgatgtgttgtttagtttgtctacattttttccccaactatactaaaccagcttaaatcccatacatgaagaagtggatgacgcctcctaaaaattagttatatccttctaaactatagttcatttactttgcttgaaagctctgtcacttgctattaaaaagaacaatgctatactagtcatccgaatgtttcagctacgagagtcctattctctataaaacaaataaccaaaactggtggttacaggttctcaatggcaatccctataaccggaagtgtgatgtttacagttttggcatctgtctatgggagatatactgctgtgacatgccatatcccgaccttagtttctcagaagttacttcagctgtggtccgccaggtgagttttcccttctcttctcttttcctcagcctcgtatttgtttcttgagaaatagttttacacgccgaattaactcactctacttcatgttgcatttgcagaatctgagaccagagataccaagatgttgtccaagttccctctccaacgtaatgaagcgatgctgggatgccaatccggacaaacggccagagatggacgaagtagtttcattgttggaggccattgacacatcaaaaggtggaggtatgatccctggtgaccagcctcagggttgcctatgcttccgcaagtatcgagggccttgaagctctcttgctttcgaccagatgaacaaatttgaagtatgattattcttaggatcggagagatttcgatctaatctgtatttatgatgatgaaaaagaatagaaatttgggatgttcaaaacaagaggtcaagattgctgctgggtatacgctgctgaaagaaatacatctcgctttttcggaggatgtaaagcttttgttagtatttttttttccccttctttttctctgtttttcttggttcttaagcacctcctttgtaagatctcccatcatataccataaataataatattgttgttataattaagttggccaggccataccacacataacctaaaaagaaactctcaagtacatggccttcttgtgtattggtgaattcttttgcttgatgatttggaaatgtaggcttaaggtgaaaaggttttactttactcttatgaggcttttctgtaatatgaattgtttagggtttgctattttctttttctttcattttttttattattgttatttatttttttgtttacacttgtatcaatcaaacaacaaatttctctactcactgtctgtctttatagtttaagcaaattaagcttaagagcacatggtgtgctgcaatattccatttagttttggtcttgtagtaaaaatgtaataatacttcttgtgaattatattaagtctaaatagaaaaatttagtcacgacattagtctagaacttatatatatcaccaaaactagtagctcaaaaagttgtaccggtacacaacttaaaatgggattaatcttaattaaggacccaaaaaagaagtgagcattttctttttaattagagtacttaataatattattgtgtccctctaattctaaacacttgagagttgaacttcagaggtagacttgtcatcatcattatcatcatcatcatcatcccattttgttgttttgtaatatgtagcatatagaatcagctgtactaaaccagataaagctcccaaaccatttggtatctgtacatataataattaagtaattaaaaccttattatgtacacaattatgcagtggttaattatttgagcaaaaataattaccaatataaaggggtcaaatttaaggagggcgtagataacccagatcagtccattgcagaagttagcaagtgataaatagaatggcatatacttcacactctttgtcctaatcaccatacgctgaaagtttatacacataattaattacagacatatttgcaaaatatactaaaatctgaataaatatatttatattaccatgactgtcaatggtgaagtatacataatgacattgaagattatagaaagcatccctacaagcatagaccgttccttggtggtatgtagaactctgagtgtgatgattactataatcagaaagaatatagtttcaatcattacagcaatgatgatctttttctgtaattaaaaaaaaattagtcataaattataaagccatctgaatagtaatgtttactgaaaaaaatgtgaagtaaattaagttttgagatagaaatttaggatacttacgcgcttggagggtggagaaaataccaaaaagatggcgacataggcgagttctatgaagaatcctgtgccgttgatggtgacgacgagaatgttgtctggccggacgactggaaggccatagaatgaccacaatgcacaattgagaagagtggctacatagggatccggcttgaaatcttctactgctctttgtttgcaaattttcacaaatgttggtctacaaatataattgtcacacattgatgttattaataattagtttccatatagtatgaaatttaacaacattcaaagaaaaaagtattattagtgagaagaatattacattggggaggtgaataaacagaaagatataacatttcctgcccaaacattaaaacaaaaagagaaaaaagattagaaactatatacataataatattatcgatggaaattaaagaaattaaatgaaagcatatagctagattaattaggatatgttatgacagaccaataatccctacaacggttcttatgactcctgtattaaccattgttgttatttttgtttgttgttacattcaaaaataactactgaactgaaaaaatcagtacaagtaggaaggaagaagagaagagtgtaataagatagatagatatattgtacgtggtagtggtagaagtagttgagtttgtaatgagagaaggtttttttttattattatttataaatgtttttttatgcaatcaactttggaaagtaaaaagtagatgcaatgtagggaagataaaactaactgttacatgtgtgagtgaaatctgtaactgatcactgaaaaaaagtctcaactttgttgatggcgggtattaaggagatggtaattgtgggccaaataaaagaaaaacttacacatgcatattggaatctttcatttacatttatagatattacgtgggaaattgtgttacagcccacgttttttattatctcacttttttaattttcttaaaccaagattaatcttgttaggtgagagaatatgttggaggtttttttttttttttacatttatgatgctgacactcaccatctaagatagttccttatttaatcgaaagacatattttgttaaattatgagccaagaaataaaaaaacaatatgaaacaaaattactctcaaaaaattacacaataaagctatacatcctcaaatagtatactaagattgtctaaccaaaaaatatgctttgttaaaccataagctgcagaaataagaaaacaacatgggacaaaactaaccctgaaattaagaccataaaaatatacattcccaaatagcataccaaaaaagttagagtttcaacttgtaattaaaaaactacttgaaatatcacaaaacaaacgcaaaaaaaaatattgtattagaataacaatctttaaataaaataatatattgataaaatactaaattttgagactcttcattttatcaagtgaaaattaataaaaaaacttaaaaatactaagttaaaagtgttactatttagctagtagtaacgtgctaacacacaactatttttaacctatcaaaattcaataatcataccacatcaatatcaatatatatataaaggaaagcataaagggagtttaggcggcaacctattatttttttcttcttattttttctattttatcacacattctcttattttatttgagaaatacactatactataaactaaaagtcccacatcatttaaaaatcgtttagaagttatccatgtaggttataagtagtagttttatcactttactttcttttatctaaaaaa

SEQ ID NO: 382075 - DNA, 3808 bp, Cannabis indica
tttgtgacttcattgacattatctaaaaattaacctaattaattaatgtctatttcagctaatcccaagaaaagaaagggtttggtggcgtgcgttaaacgcgctaaaggtgcgcctatgggggaaacatgtctccttctcgctaacgtacgcttggccatttcatcaagaacccaaaggcagacaccacaggtaaaagagctagtctttctctctctcacagtgttcttgcttctaaagtatacaaaagcagtcctctcctcaaccctccaatccaacaaccctcgattaaaaactaagctaaaaaaaagcttatcatcgagtcagccatggcggtaacctccacttctctagcttcccaactcgcgggacccacaaacttctccggcctccgacgctcctgcttcaagctcgaccactccaactcactctcacccactcaatcccttttccaacacctccattcccatctccgcctctcttcctctcgcaagggctctagagccgtcgtcaccatggccggcaccggaaaggttttctttttctccattaaggaacaaataaaaacaaaactatgtcgattcttaaaaaaataattattcttagatttctgttcatggtttttatttattttatgtttgtattaaggaggaaagtactaaagattcattgttcatttgtattttttttttgggtttagaagaagtgaagaatttttagacttatgattgaagaaatgaaataaaatcaatgtgtgtttatagactaagctttcacaaaaacaaaagcctaaagtatgtagtggccgtatttctatttgatcttcaaattaggaacaatttttaatttcttttcttgctgcagtttgttccaactcttcagatttatagttgtgtaatctctctctctctttaaataatggtttgatatatgtacttatgaacttgtaagatgcaattctgaagcaattagacagttttaatcataatttatttattctggtctgttctgttgagtgttttttgttttggaatgtttggtatttctcaattctcatgtttctgtattctaatttgtcttctcgtatttcacttgcagtttttcgttggtgggaactggaagtgtgtaagtacaagtactatcttaaaaaagattcatttattataccaccattttatctttttatagctttagtgtaaaatttagcaccctctttaaaagattgtgtatataatactgttaatagtagatcctgactttatcagtagaacaagaaagtcaaattagaatttcctttgaccacgaattttaagatgcatgctaccaatattatttgcatatccacttctgttctactttagagatgcaaattagttgatgattctttttcttttttactatttagaacggcacaaaagactcaatcaccaagctggtctctgatttgaacactgcaaaattggaggatgatgttggtatgttaaaaatattatcgtgcaaattttaatagcctgcgtagttaagcttgttttaggatatttttttttattttgtgggatctctcgatacatgcagacgggagaatagttcgtgtggatgaattataaaattgtgcttgtaggtattggatcaagatcagtaattaatattttaactacttaagctccttggacttttctatgttatgttgaaaaggatcaaaacatggatatttgattgtgctcaaaactgctgttggatgtgtgtgtttctctggccagtttgtctgattagggtttcctaagcagtagaatcttagaagttggttcttagtttcatctaattcacaatttttcatatcaataatttgattagtttcatctaatgtgcagatgttgttgtagcaccaccctttgtgtaccttgatcaggtgaagaactcattaactgatcgcattgagatttctgcccaaaactcttgggttggaaaaggcggagctttcacgggggaaattaggtttgtttctttttttttttttttggaaaacatgttattgtttcattacagcataatatatgtattttcctgggccttttataacgctgatgtagtattctatcaatgtttattctctacaattatctagataggaagtatgtctagagcttttagtcatcaggacaatcaccatatacttatgtttgtgcaactttgaacttgcatgtgtttaatatgcatattttgtttagtgtcgaacaattgaaggatattggtgccaaatgggttattcttggacattcagagagaagacatgttatcggcgaagatgatcaggtgatacattaaagaactttagttttagttaggtttcttggagaacatatctgtccattatatttgatggtgtgtacttggaatcacactcagcttttgttgccttcagtttataggaaagaaagcggcttatgccttgagcgagggtcttggagtaatagcttgcataggggaactattagaagaaagggaagctggaaaaacttttgatgtctgctttcaacaattgaaagcttatgctggtaaaatttttgtgcacttttttctttttcatggattatctgttcatgtggaaatatatttgtatttgtgctattgtatctcttaccaattttagatgttttcttgtccctattttgcagatgcagtgcctagttgggataacatagtcattgcttatgaacctgtatgggctataggtaccggaaaggtggcttcacctgaacaagctcaggaagtgcacacagcccttcgtgactggctcaaaaacaatgtgtcagcagaagtagcatctaaaacaagaattatttatggaggttattatatgcaacaactccattttgtttgtcattactctgtattctatgtatttacagaacttgctagtgattccaacgatttcaactcttgttttagggtctgtaaatggtggaaattctgctgaactcgcgaaaaaggaagatattgacggttttctcgtcgggggcgcttctctaaaggtaataataccttacatttatgttgaagtttgttgatgatattaattttccaattttatgacaacttcaggggataaaattattttcttttttgtgttttttgttgcagggtcctgaatttgctaccatcataaattctgttacctctaagaaagttgctgcctaattttactctgttttcacctacaagtgcaaaaataagggaagagaactcaatccaagcataatatgagaaatgtaaaagtacgagtgagtttcattgtatggggtttttgtatcaattttgaatgtcttcctcattatgaagaaaatattatttgattttcatgtaacatcataatgagcataaataattcctgaacaatatatattgggagtgtatttcagggtttctgttttctggttcaatgtgaacaaattatttgatttctaaagcaccaagacagcctagttatagttacatgctattgctaacatcctcacacttgtggtatcagcttaacctttcttcttgacccaaattctctatcccacgtgggaattgtcagctattgccccttagtttacttttgctcgatgagtaaagtgacgaaagttttagcttaatccttcatttggggatacaaagtgggcatcaaatccttgagtgggcatcagtccaaagtgaaagtttgtcaggtagatccttcactctaagcatatatgccaaagcaaggcataaatcatataaaatgtacaccctgcttgtattgacatcatatataaaacccttacat

SEQ ID NO: 382076 - DNA, 1513 bp, Cannabis indica
cactaacgaccggagactcatagttggtcttcccaacaagacagactttaaagacaacttcttctaaacgacgggtttatctttgataaacaccactgccttccgagccatacgtaagtccacccctttttgtgaatttatccgcattaacttgtagtttatgaatgtcatttgctaaattctgatttatttgcagcggttcctcggagacccattccaacccaaaaaaaatcaagcgtcaccaaaccctactgagtctgccatatgggttgcgatctacagatttcttgctgaacgagaaaaacctaaagaatgtaggccttctttcctcagaagaatatacttgtgattacaaaatacctaagtattcttcgtggcaaaaggttcctgtcccaaagggagagggaaatgacgactgtgtggctcgcgcgcgttatctcgagagagttcctcctcgggtggacggaagaccccgaggtaatcaatgtgggtggtcgcccacaatgcttagggctgaacgtaataccttagtctcctttcgagatagtcggtataatttttttttggaactcccttctcgtagatcgcatctcccataggttcgatagttagtaccctagataccacgtccagattaattgtaatgagtcattctatggtattgccgagcagtacaagtttattgaataatataatccttcctcgccatcttacaaagaatgtggtaactctccttaacgggagttcttccaccttcctttttatctcactgtagcaatggtaactcttcttttttatggatatggatgtggacttggagaaccttttcaaaagtcctccccctgccgacaagatatccaagaagagaattatccaagctgatgatgcctcagacgccgccaaaggacccaaaaggaccaagaccaaggcaaacaagagaaaatcttcgcaccaacttatgattgaggatgatgagactcctgaggcggggaatgagctccctgctatggaaaacgaggccttagctgcagaaattgaagttcccactgcagggaatgttgaacagcaacccaccggtcagtacaccaggtaaaattctctggttcccgcccaaaaatagttcttctcgagccttcttgtcctataccccctgaagttggcactgaatgatcgcaacttggctcacaaatggtttgtaagctcaaaggcctcaaaatagtgttgaaggaaataaacaagcaaggaatcgatgaaatacgaatagttgatatgcaatctatgaatactttaattgattgtgaagacaagttaaagtaagatcctctcaatacgattttaatacagtaggaacttgaaggtacgagtaagtatgttgctatccataaatcgtgctactctttctagcaacaaaaagctaaaataagttggattaagggagggagatgatactcaactctatttcatgctagtattagagaaaaggaaataaaagtagaatatgttgggttttatg

SEQ ID NO: 382077 - DNA, 809 bp, Cannabis indica
cgattttgcaatctgcataacttagaagcctgaaaagaacacacatttggacttttatcttgtacaatcgctatggtgcatactgcataccctttacaatgcaggatgaaaactgtaaaacgcgagaaaaataagagcgttgctttgaagtactttacagtgtgcaacaccatgttatatgtttagtttaggaggttcaatattataggatttaattttacatttaatccacataaaatactgtggtttattgggaacaccaaaatgccttgtagcaattccttgaacaaaaataaaaaaaaaaacttgttccaaattttacatgtaaacttccgagccacgaatagagaaatattctttttcatccttttggtttttggtaaaggaacagtgtctaaggtggttattgttaaaggttcaaaaacttcactttcacaatttaagctaaatttcaaagaataaacaaggttttttctcccctaactatgatcatgatagagttctgttctctaatttttatttatttgtagcgaaaatttctaaaccaaataaattgttgcaactatcactttagttacattttgtacaattttaaaaaataattagcccatgtgatcatgaattaccaatataattacaatacaagaatttatttaacttaaaactagggaaaattcacatctatctatatatctttatatattaaaagtgtctatctaacggtatttcttggtttaacttaaaccagaatatacttaaaaataaaagaatattctgttaaatttaacgattaggtttgatctcccgtt

SEQ ID NO: 382078 - DNA, 1150 bp, Cannabis indica
aaaattctacttttaacactttcaattattctttttacaaatatatttaattttgttagcttttgagactacaaaacttcatttcgagttcaccataaagggtaaactaaagaagccaagatggctaagaaatagctccttctaaatttattcatcttagaccgagttattcacgtataaagtgcagtaagagtgctagaacgagtgtgtcattccacccactccttagcagcccttaaacaattcataatcacagtgcaattaagaaagaggtagttgatgtttttagattccaaaccacataataaacatgtcgattcatgcacaatattaaatttaatcaatctatcttgtgtttcagcctgaacaaccaaccaagaaatgacagcatgttttagactattaaatctatttcatacttcattgcttcatctaactctttcattttctggatgagtcaaacgatatccatcctaaatattgtaatgctctatcgaaagatgatgttgctccattaaatgctgaaatacatccttgacagcaactactttcctccagtaccaattgctctgcataggtgtagagtaggcccaccaatcttcatttcttatgtacacactattcattcagatatcttggaatttcgaatagttcaaaaataatatttgaggtatagattgtaggattcttggggagaaaattgtgagtagaattcgtttatggaactccaaaaatctctcttttgttggctctcattaatttagttctcatttccatacatacgtattggtcccaaataattattcttcccaagaaagttttacatctaaacaattcaatttacatgtcttacttgtggaaaggcataacaaattttacgggtcctgagaaggttagttggagcagagtttgtaccccaaagcattcaggtggtttgagaataagagatttcatgttatgaaacaatgcgacaatacactacaagaaatgtcacttttgccagcatatttttgtgctggaaaaagtaggtattgcgctggtaaaatagaatttacttgtgatgtgttggtaaaagaggttggcaaatcaatgttggtattagaacttttgtccagcataaaatgtaaaagacgctggcaaaaataacttt

SEQ ID NO: 382079 - DNA, 2946 bp, Cannabis indica
aaataatatttattttaattctagtgaaataagaggttaataagaattaatcgattattatttattggcaaaataaataatatatcttatttgtgataaaaatgagaaatcaattttagaccttaaaatatgtgtaatgattgtattgttaaatcatgagaattagcagataattaagaatttaattattattgtatgattatatgtcttttagtaaaaattatatatatttaatgatcttatatatttatttatttttgttacaatataataatatggaatactaaaaaaattatataacttaatttaattattatatatttttttaaaaaaaaaataatatgtacgtagttaatgtatttttataatttttattagttaatttattatatttagccattctttttctaaaaaaaaaaatggacatttattaatttagtttttaaatttaaggtcattttgcatctcagtccattctactaacggacgcctgacatggatgtatgttcgagggcaataatttagtacaagtcaaagaccgggggcacaacttagtatatggacaatcatcacgttaaacatatgttagtatatatttaatggaattagacataattctttaaattcaacaatctcaataatttagaaaaaatttgtaacggcataaaaaatttgaaagctacgattttgtacatgtcaaaactgagagaggggatcctaattaacctacttattatgtaaaaaaaaaacagacaatgaatgtgttctgtgttggatttcatatcaaggttgctcacaattattactattacttttctctacatgctctttatatatacaacaaagaactttttataattaatttacaattttacaaagaattacaagaagaaaatagttgattaaacgaggtattgaaaattaatattaaattctctcatcacaatcaagatccacaccgtccttgtataatgatctgcctaacaagtataagcaatcagtcatttcctttgcaatttaaagatacatatatttatatataagcaatcagtcacatccttgaaatgatcttcctaagcaaataaaatacaaacaagagtcttttcctttacaaataagggggtgatgaaaaaagattatatatctcaaagtgtttcatacatattatagactataaatatacaccatactatgtgcatgtttttgcataatatcatggggagcatgaatattgtagaaaagtcaaattattggttaaaaaaattgattgtagtgttagtggtatttgaggtttgcatgagcattaataataaggtgttattggttgatgcaactgttgtcattgataatgaacgagaagttaaagtgaaagtgatgaaccgtttgggatatggtgatagcatgattgttcattgccaatcaaactaccatgatctgccgagtgtggtgattgaagatggaagagaaatggagtggattatcactgggagcaacttgttgggtgtgcctttatttcattgtgaaatgcaaccaaaaacctcaactatttggtactcatttgatgcttatgatccacaaagagatggcggcaggtgtcgaaccgagtgtcgttggatgatacctaacaatggggctttgtatggctatgatcaacggttttccagatgggtttggtttccttactctctcaagtcctcctaataattttgtttccatttggggacatggctgcaaggatatatttgtcacctcattttagccaaataatttgttaagaaatttagaagtactactttggagtttgtttctctatttgtattaaacgaaaaataaatgcctccaaaataagtaagaaataagatgtacaatcctctaagtttcataaagttatggtaactcatggctaaataacaataatagcatttattttaatgatgagaatacatataatttatatatagaacgttctattatatttcttttacttcgtaaagaaattgttgagtgatggctagagatgaattactactcatcaattgtatgttgtcaagcttaggtacgaagatcaaggtatatcagaattgtgtgttgatattctatctaataagccaattaaatttaaaaaattactcatctaaatttagaaaactcaaagaaaattttaaatttttaggcttcatttgccttttctaatttaaaaatgtctcacttaattacacttcagaaatatgtcaacatatttctcattgtttaaaaaaaaaaaattaagggaataaatacataaggtaccactttttagtaaaaaaaaaaaaatacaatttttacgtttaaagaatcttttttgtatttttatggtttttcataaaaacaacatgaaaacaacaagaagattatataaaagtaacatcaaaataacatcaaaattacaacaaaaaataacatacaaataataaaaaatcaacaacaaattaacaagagtacaacataaaaagatcgtatttttttgtaaataaaatcaaaaaaatcgtaaaaatatttttaaatttcgtgaaaccatatatattttttgtaatttttttgttgttttttttttttgtatttaagaaataatcccaaaattaaatctctatgcttagtgcggtaacataattcaaaataattcaagcactatcacaaaatacgctaatcttcccactactacaaaaacggacatgatgctgccagcaaaagtgagagagacactaggttgagaccatcgaaaaccaagatccactatcatcgacaaaaacctacaaaaagttgttagaaaagagagacgaagagaacgactatgagagaaatcgtacatagggtcttgtcgttgctgggctaggctattgtcgaagtctgggccagtgtctttggggttggggctgggtgcagatgagtgagaaagagagagagaga

SEQ ID NO: 382080 - DNA, 2003 bp, Cannabis indica
ctaattccattagtgcatttcgacgaaaaaggacttgacatcgccgacattggtttatcttctcggtaattattcaattagttttgagttagaatttcatattaaattactttatataagtatatgcttcttaatatacataaattatagaatttctctaaattatatatgcagttttcttttataactaaacgtgttcatatataaattcaaaaattatacctttcaatcattacaaaagatatatagacttataataaattgggattaattgaaaaatattacatatatatagggacataaataataagtatggatataggaggcactaacaaagttttttttttaattaatttgagttgcaattacaattcttttttattagtaataaaattctgcgttaattaaacctatattaattattcataaaaatcacaatttattatgattgaattgcgtttttcgtaacaatttgtatttaaatatattatttttttaataataaataactttttgttgtgacgtttaaaagtaacacttagttacaaaaaatctatgttatgagtaaaaatttattacaaaaggatagcttttgtttcggtagtgacacaatctttttggtatactattttttacaaaaaataattatatgtcggcccttcttttttttttcttttacattttactcccgttaacctagaattcgatatgcatgcatgcgtacgtgtaggtggtcatactgttggaacagcacactgcagtctgttccaagatcgagtttacaacttcaatggcagtgggaagcctgacccaacaatgaactcgacattggtgaactctttgaaatcaaagtgtccttcaaaatcgagtttcaacaacatcgtcccgttggaccaaactaatgaagatagttccttggttgtagataaatcattctacaaccaattagtaatgaagagaggaattctcaagattgatcaagatttagccaatgatgaaaaaactaaagatgttgtgaaacaactagcctttgggaataatgacttatttgcccaaaaatttggacaagctatggtcaaattgggaagagttgaggtcatcactgataaatctaagggtgagattagaacatcatgcagagaattaaattaattataatattattagtgttaattcatatgttgggggaagattaatgttttaatcccttaattgttatttgttttatttattgatattattattgtttgctttatgtttcttttctctatttaatttgttggtagtaattaaattgtataacttgatattttgcaagttttatcaaagaatattcaataatatgaaatcattgttttatgtaagaattattattctttgactttttttttttaagagtgagacgtgaaagcagggccgtctcaaatattttagaggccctgttctaatattaaaaaataggccctaaacaaaaaaaaaaatataatttgtaaataatatttttaaatattattatattacaaaaatatattttacataattaaacacctaagagctcaaacaattttattaaaattgttattatttttaatacaacttcaaactaatatcaaatattatggataaaaaaaattaaaaagcattaaataagggaaaaaatcataaaaaaaatcttttttttttatttggcatgacacattgatggaatgttgggttaaaaaaaatctgaaaaattatattgggcctttttaaattttaggccctgtgcattagcactgtttgcacaggttaatggtcggccatgcgtgaaagttatagggtctgtttggcacagcttttaaaaaagttaaaagttactttttgaaaaagatttgataaaaaaatgtttggtaaacagtgtaaaatcagcttattgaagaatttatggagatactacagctaaaagctaaagctagtacaacctaacttttagaaaaaattattttgattaaaagactctataa

SEQ ID NO: 382081 - DNA, 3552 bp, Cannabis indica
catatcatcgaaaggtctaacatttatttctcccattataaaaattggtcttagtttttttttttttttttttcattttttcaataaatgctttgtggagttgcttagttttacatgtcatactatcctcttgacagttaactaagaaaggaatgtaaatttcttattctgttcttgtcggtgtaggtaattggatggacatcctggaagaagaggtggtttatcttaactcgtacttcgttggtctttttcagaagtgacccggtaaggagtgtttgatggtaaagattgaatgcatgaattttcatttgctgcatgtttttatttatagatttgaaagactattgcaattttgttaattcattgcaagtaaactaaggttgttgttaactgtagcaaggggttgttggtgttgagtacccttgaatgctgtccacattgacttgaaaatagggctttcttattttcgttacctttcggtaactatgaatagaagtccccactatttaccacaggaaataaacccaagaaagtagtgatttggttgcactgtgttttctgtatgtagctttcttgcaatgagtttgattaccctttttggtaggattagatgaatgcttggaagttacatataatttgatgaaaaagtaaatagagcgaatggatctggtttagtatgacagtgcttttgttcattgggtataagcagattgcagcatgtgtattacctattatgtttattctccccctcccacattttctccttttttgtctccctatttattccatcgttaatattctagatctttttttatttgtttatctgcatagcagagtgctgttcctcaaaagggaagtgaagtgaatttgacccttggtggtattgacctcaacaattcaggcaggttggcttgtaattttaaattgaaaatatttctcctcctacttccctttttactttttgtcccttttaaatttatggtgcaatttactaacatttctttgttaattcttcatttctctagtgttgttgttaaagcagacaaaaaactcttgactgtgctctttcctgatggtcgtgagggacgtgctttcacacttaaggtactcctctcctccatctataggtctccactatgttgctgatatgtcccttttaaggacattttcccccatgtttcttataaccattagtgttttagttaagttttattatttcttcaaagaaatggattagttttaactcttgtcctaatgtgaaaaacataaagctagtgttttcagcatgattctgctgctgattgcttgtttctcttggtgcttcaggctgaaactttagaggatctcaatgagtggaagacggcactggagagtgctttggctcaagccccagcttctgctgctcatgcaacggggcaaaatggtatcttcaggaacgatcagattgattcagttgatggttccttggaccagtgtatgctcttcttttgtaaaatgctctttatctaattataaaaaatgtttctcatttctcaactttgaaagtagctttggaaaagtcatttttagaacacacaaaaaataattaaagaaatgtttacaagcatcatggaatcaatttttattgtctcctccaaatcgtatttgttgttagtttgttgacacgcgacaccagctttaagtttctttgtaaaattaccttaatgagagttattgtagaagacatgtttggatagagatgacagctttgaaggactggtgttttcataatttaagtttaatagggcagctaattatttcttctgtagtttagaacatagaaaatgttgtctctgtatattgtggtctgtttgctctgttaagtgtgataaattaaagttttctctaggctcacatatctgtagttcacaaagatgcgtcatgggcaggagtactcagtgattgtattttatgacttcaataaataccttattttgctccaacatttacgtagatgttttattttgatcatatttacctttttcagcaactgatcgacaatcagtgaaatcttcagtcattgggaggccaattttgcttgctttagaagatgttgatggaacaccatcttttttggagaaagctcttcagtttatagaagagcatggtgggtttatctatctctctcctctcttttcatacttgtcaagtcaaaactttctaatgaatacttctgttatacaatgtataatgtttaacttctttttgttatattacagtcgggagtgttatatttaaggccttattatttatatgttttgatgcagataattaggttattaatttactttttacttttatgtatatactgaaaatttaatttaacattaccaggagttaaagtagaagggatcttacggcaagctgcagatgttgatgatgttgaacatcgagtacgggagtatgagcaaggtcagtttattactatatatttgcttatgttcattcactatgatttaaaatgaatccttcaaaatcaaatgtataaactgtagagtctatttttccaattcatgttttgagcccaatatcaatatgataatgccatgttagcatagatttttacatctttagtatttgtgatgggtccatgatgcatatgagatataattgagaattctgtcatgtgaatcaaggcatgaagaaacaggagttaattatattgtattttactgtttgctcctagaattttttacgttatgtgatctcattgttaactttgggcaagttactctctattgtaatatatgattattgtttcaaatgctttcttttaatttctcaatgcctaattttcctttctaccctacttaaagcattattttcctttggactttaggaaaaaatgagttttctccaatagaggatgcacacattgttgcagattgtattaaggtattcattttccttccaaataattttttattattttttgaaggttataaaatatactcattacatgttaattttgaatgtgctgatgatgatgtgttcagcatgtcctccgagagttgccgtcttctccagtcccagcatcttgctgcaatgctctccttctagcatgtcgtaagttttttttttatgaagcttcctctttttaaggatacttcattttcttttaaaaatggctcattatgttggtgtagccaaaaaattatatcataacatttctattacatgagaagagaacttgcttgaagaagtacgaaatgcgtataaattgttactctttcatcaacattatacctttctggtacaagttactttgagaatgtttccaatacttcttacatattgtaaaatatgatgattaaattatatattatatttcatagaatagtatatatttacatataaagctaggagactaaataggaaattactaagtacaaatagaaaactactaaatacaatttacccgaatttttacaactaatattctaaaactcaccctcaagctggagcatagatgttaatcatgcccaacttgttacaaagataatcaacctgcac

SEQ ID NO: 382082 - DNA, 1075 bp, Cannabis indica
caaggtgtgtgacttaaaaagtttttgttatttgtttgctgctaatctttgttatttcttggtaagttgactacataccagcagcaatgctttaagataattactattactttgcctatttaattctttgtttcttctaatcaaatattgtttagtaaagaacattattgcaataacttcacttatatcattaatcaattattgtttgtaaagaatgtacaagtagatttctaaagaaactgatgaaaatgaaagttctacttgtgaatatgggtgttgttgttctttacagagtctattaatctaaataattgtcctttcatctttttaataatagttaggtctgtgataattagtttataatattgtttattacttctatgatttagaaattgtacatattcttaccatttgaagtgtgttaataatcataagagattttgtttgttctaatctgtatggtccgagattttgttctcaaatctatttccagaattttttcatttttttcaatatatatttttttgtttcatgtgaatcaatcccatttgtaactgtatttgttcttacatatatattttagtactgtgtttaagttcgggatgttagagttaaaatgactcttccccaaatcagttagaagttggttagaattagtttgaaatagttgcttagctgttcttcaggtttgatcggctaagcttgttgatcttgattagtttctgtgtatataaacaactgtatctgattattcattgagcaatacaatttatgtttactctgaaccttaacatgggatgcttgtttatcttggtgtgttgatcaagtgtttggttacatttattagaaacttctctccatataaatgcttctaatttatggtgtctagtcaatttgaattgtaattttttttaacttctcatagtgaatgacaaataagttatctggaataatgttgtgttgttggtttcatgttgtagaaaatagtgattcgaattgtgtgtatatttcatagaatagtacatatttatatacaaagctaggagactaggaaataggaaactaccaacaaaat

SEQ ID NO: 382083 - DNA, 2119 bp, Cannabis indica
gcgctggcaaaaaagacttttcctagagcgtaaatgtgctggtaaaagttagattttagccactgcaaatgtacgctggtaaaactttgatctctttgccagcgcagtttgtgaaatgcgcaggtaaaagttacttttaccagcgcagtagcgaactgtgctggtaaaagtgacatttctcgtagtgtcatgtaagaatctccatctctatatcatctatttgattaattttcttagttcttatttaattttattgagtttttaaaattctcggtaaatatattagtgctttcattgagagctaagaataaatttgaagcagattatatctgtaacaatggtggctactagaaacgtcgtcacaaagcctactatccatgatcgggacgttgtaatggatgatgttgattcgcttcctgtggtgcacactcaactgggcaccgtaagggcaaggaaacgtcagaagttggaagtcgtctagccaaggaaacccagccttaggaaaaatatgtcgatgagagaacctattaatgaagatgataagggtgatcaagaaagaaatctgtaggatgaaggcgatggagaagaagatggcgaagatgatggtgaaattaaagatggatattataaaggtgtgaattactatgagcaagatctcgaagtgcatcagatatctcaagaacttgtgaaacccagcaaaaactgcgacgcaagagacattccgtcaaaatgcaagaaacattagcacggttacaggtcagattcgaggccaataaagaaaccactaaagaaaatgctcaagaagatcttatccttaaggaaaataattccaaaaaaaaaggcgaaccccgctaatgctggacctccctcgtgggtgaacctctaagaaaaactgctcccaccgttcctaggaatgacaagaacgcggccaactaacctctaataaaaaaaaagaaaaagaaagaatgccacctatgcctcaaggctaggacacctttctgatctacgaggcagagttgagcgaaacgataggcctggtgttcaggtaccaatgcctaccattcagggatggaaaaaccaccctgacaatttgtcaaccagagagatgggggatagagctaatttccccaaagatagcatgtccaccatgggcctctataacttcctaaatgcaaagcgagaaaaagctaagagagaaatgatgaggcctctcggaagtgacctctggaatgacattaatgataggatccatatgagtgagctcccagacagtgatactaaccttattgaccaagtttgtgtagaagcaaagtggagccatctcagacttgaaaaatgaagatctgaaaccgtgtgttaagaagatcatagaggctccgctacctgaaaacttcaaaataccacaaatggagatatacaaaggaaaaatagaccccatggcccattgtccaagtataaccggctaatgcaaatggctaaaactagtgatgatgccaagtgcctctatttctcattgataaccaagttcgctgaagattggtagagaagtttcccacccggatcagttcatggttggaaggatctacaatccacgttcataaagtaaatcatcactacaagagattatgatggggaggccggatccttgaccaatattaaacaataagaaagggagagccttaagaactttatccaaagaataatggaagcagcgaccaaaatgaaggtgaacaatgacttaaaactcgtggcccttcaatttgggttaactattggctcttctctctagagaaaaatgcaaagaaaagggctaaaactctaccatagttcatgtccaaggcccaaggaattattaacctagaagatgcttatgttcaaacttttggagttgctctggcattaactccacctgttaataacacgaattttactttacatttctcagctctgtctgtgctagctgccgaaagtgagtacataactcctgcagtctacagaccccaacgcctcagggtacgcacctacgtagactaattttttaaactatggagtggtacaaatgttaggctatgtttttagcctaagttttgggtcactttttagtgttgttttcgccctt

SEQ ID NO: 382084 - DNA, 759 bp, Cannabis indica
tggggtgtatttataagtttaaagggtgcaaatagaactcccccaaaaaattatgattaaacataaatcattattcttattttatcattaaaaagtttttagttaaaagtattagtcacaaaaattataatttattgttactaaatatgtttttagccataacttatgctgtgagtaaaactaatttagtaataacttgtatttaaatactattttttagtgatagtaatttttgttgtgattaaaagtgatatttaatcacaaaaattttatgttataatgaaaaaaattaattatcactaacagcagtacatattattggtagtaccttttacatatataataatagcaatagtgcctttaagaaaaaaaaaagcaatagagttgagtcttcaattttaaaaggcctaaatatttgttaattagaaatttgatttttcttaagaaattaaataaaaataataaatatatattatatatgtttaatatagtacaaatataatgattttaaaaaataaaaattgaaatttaataattaaattttgcattatataactatagctacaatgagatattatttttggtagtgtttataaatagtaacataaaattaaatttagaaaaacaaaataatgacacattataagtagaataaaaatttgaagttattttagttaataagtgtataaaattgggaaatttacatggtatactaacttttgtcatttttttacaaaaatactgctaggcggtagtttt

SEQ ID NO: 382085 - DNA, 2028 bp, Cannabis indica
tttttaaaaaaaaatattaatactcattaattttttgagagataacaaatgagataatattgtgtgtgtgcttccacaacatttcaattggataatgttgttttcaacttttaacaaagtctgtataaatttttaaaaataaatttttaatgttttttgtcgaaatcaataactaaagttaagtgccaaaaataataattattttttaataataataattaaatcgtaatatatatccgctacccattacaaaattatgttttttagttgcctctagtatattttctgatctaacaaatgattattataaattatataaatatatatttttgtccctaattatatttcattactttacagctagtgtgtatgattatagcaaaacatatgtacgtgcacagcaaagtttgtaaactttataaaagctcaattttactctgttatcacattatctttatctttgtaaaagctcgttaaaataaaataaaatgtaaatttttataaaagcaataagacaaaactttaagcaacttagttagagactttaattacactccaatttcctattccatgtatattagcggtaaaaactaaaagtcgacacctttaattatttaccccaccttcaagatttattatcatgattgggcgatcaaatccaacggttgtgatcgaacgtgataaacacgtgccatctccactctcattgaataagacaacaacttccatgaggaaagcaggtaccccatagcgtatcacatttatgatactcaatttttatatctctctatatatagtatacgcacttatattatatttattttatatatctatagatacattccattacacctaatttaatcaactcatttcatttcttacccacctctgtttcttctctctttcttcgttctctctctctacattctttcgttctagctagctagagagatagagagaaagagaggttaatatcgaatcatatggaaggtgtgtctgcgactatgtataaagggttaagaggttactggaagagaagaggctacaagaagctaaacgggtcggattctcggcggaggaagatccgggtgtcggagcttggttcgacccgaggaagaagaagacgggtatggcggatccggattggccggccgaagctggggtttctgaggagagtcccttcgcctaagaagttactggtttggctacgagacgcttacgtgaaaatgatgctgcgattcgctaatacgcaggtgtgtagtactggctacggtggtggcttgtttaacgaccggattggctcctttggaagggccccgcttaaggagtacgacaataagatgatcatcgagatctacaagtctctggtgctggcccaggcgcaggcccagggtcaactcgtgcaccgcgaaccacccaagctcagctccgagagcgttgcctcgcggtaaaattatcattttcattattattagtcggaacaaaagggaaaaagaaaaaaaagtaattcacgtttttaccccttcaaattatggggtcaaatggtcaattcctcttttattaagaaaaaaaattgaatttgtgatttccttaaaattgtaagaaatagtggattatcaaaagctgacaaagaattaatatagtaagtttttattctctctctttttttaaggtaacgtagtcaagtgctatatattttttttatttaaacttttatatattatatgagcataatttagatacctccaacacacgcgcactttttattgctactatcctcaagtagttttatatataaatatgatgatgaataatacggtgtgatatcattctttcataatagctacgaaattaaattaaaactcaaattagaatttattagaatttagaagtgtattttatatttagctaaagtttacctagctaaatatgtttcaaataaatctaaagtacagtattctaaaaagtcgtttctacatacctcctatatgctaaagtacactattttaatttctcaaaaaaaaaaaa

SEQ ID NO: 382086 - DNA, 646 bp, Cannabis indica
tgttataatggatacatacactattaaatatgtataatttaatgttatatatatatatataaggatttgtaatatatgatgtgtatctatgtatttggtactagactagtagttaagttatggtcattgttgattaataccccaatatgtgttaattggtagatttggcttttcctaaagtgaaagatcgcataacaaatgacaaaggtcggattaaaaaacactatacactaaaccttatcaatcggagtggtaattcattactgcttgctttttggatgactaccacaccaaagtttcaccaagctaaatactatagcctcctactcagcatctgccataattaaggataacatgttcaattagcatccgaaaaactagtagtttactacaaaaaaatttatttttaattacaacaaaatttgtaacaaaaaatgaaaaaattatgaataattattaatcaccattcttatattgtggctaaaaggttcgtgattataaaagatgtatgttgttactaacaaattatcactaaaaataacttaatttatgtaaacactcttttaaaacaactccaatgaacatggttgtgacatgctaaatgttggaatttattttaccaagatcttagatctactcacaagta

SEQ ID NO: 382087 - DNA, 1780 bp, Cannabis indica
gcgagccaggacagaagcaagaagagggtggcttccaagaacaacgcctgagactgcgtgaacttctttatggagtcaaactcgaagatggtctccggaaaggtcatggcgtagtagtcaactccatggtcggtagtgatggtggaagtagctgaaaagagttcacagcggttggccgtccggttcagtaggttccccaccgggcagctgcactggctaccattgaaaacgatgctgtttgatgggcaagacatcttatttcgccaagctttaaatttctgtaattggaaactccaccccttgctaacccttgaattgggtcatcaaagatatgtctttttcaaagaaataatctatctgggtctgctattcaggtcaaagggtcgtcaaatttgatatctgcaactctgatatcgtccaaatttcgaaaaaagaaactcttttcagctggtttttcggttgaaaatcttgacttgaaaataatatatccaaaaagatgacgtttgggatagaagagctctagtgacaagttggttctctatgttgaagaaaagggtgaaagacaagagaaaactttgagagcaagcaattaccaatggaaaccaagagaagaagatttggaatcagttgggttgaaggtctctttcttgagaaaatattttgggctttgaggagtaatagttactaaaacaaagttaccttgtaattgtatccttgtttttcggttcaacctcgttgctgtcgtgtttacaatgtttagtaagcaataaaactccaataaatcagtgtagaaagaaaaagaaagctgtatttgggagatgagattctgaatttctcttcttctttgattctctctttttttcttttcaatattacgagtttccagatatgcaccagcttgtttcggaatatgcctgatttgggtatcctatggtagtcaaaaagaaactaggatcatatgcctataaccaatcaaataatctcacatgtaatagaaaatttgtaaatttcatggggtacattattagtctttaatttatttattctttgaattaagacttttgtcccccaattttcacatatactaaattatacttcttaaacttttaaggcctttaaaaatctaattgaactattgaaattattagatttaagcacttttgtctaattttagtaagaaaagtctaatatagataaaagtacaggaggcatgatttgctacacgtcaaaatttgaggagcataattttgtagatatcaaagtttgagaagcaaaatttagtatatggacaatcacagaattactaaaattgaatgaaattaaatctcaatagttcaaggagaaatttaacggttaaaaaagttaaggaggtatgatttggtacatgacaaagttcatagggtaaaaatcataattagtctttttttatagatattttcatatttatttagttaagcattattttactcacagtacatccaatacacaataagtaataatttcatattttggatccaatccaatcaaaataattactaaaatctaatctaatattgttgactcagaatttggtcaactaacagcggagccttatttatgattaccaatcaccatgtgtaaataagaacaatagggtcagcttgttgggttttgtgccctaaataaaactcatttcaatataatcagatttactaattaataaagatcaaaatttcattttatgttgcatggttcacatgatttatttcatgattctaaattctattaggtccagaacata

SEQ ID NO: 382088 - DNA, 2089 bp, Cannabis indica
gtcaagtggttactcgcaccactatcggcataccacgagtcatcatttagcatctctggtgtggctattagagctgagaactgcttgtcttgactaccaccagtgttaggttgttgccccatatagctctcatcatatctgttataatagattgttgctgaatggccatatttcccacatacttggcaagtgggttttgagccatttcctcttccaccacagccgcggcctctatagcttcctcctcttgaatttcctccagtttgttgctgacctctgccattgctctggttggagttgtaccttctctgacctccattgttactggatccacttgagcctggtctttgagccatgtttgcagtagcattgttcacaagtttgctattgacagagataccattgagtctttccaatcgactgtcaaagctgaggagagagctttgcagttgctgccatgatggattgccctgtgactcgattaacaccacaatggacaggtattctgcatcaagaccagaaagtacattagatattaagtgtctctcaggatagggttcacctgctagtgccaatgaatctgcccacatccttttcatcttcaagtagtcacccttggattgagagcctttttgagtaatctgtatttttgttcttaagtcatccatgttagctcttgagtgtgctccatagagttcttcaagagcattccacaaaccaagggcagattgacaacccatgacctcagaagcaatggattctgtcttagacataaccaacccattaagagttggtcatgtacaagccatgtctcataatatggatttggatccataccagatcctagaactccttcgtctggtgtgcctgtgagaatgaactcggctggggctggtcgagaaccatttataaaaccttccaagcggtgtcctcttatgattgtgtttaccattgttttccacagtggaaaattgtttctgtcgagctttaaagagaagggctggctcaacgtgttgctgaagggtgttgcaaccggagctgggtttggtatagatgaggtttgaaccatgactgaggttggagtctgatcaccaacgttcgctgcacttgattgatcctggggaatcgacattgcgtaggcaagggcggctctgataccaagtcaattttaagataaatgcagaattaattgatcagctcaaatcgagactgattgtaaacttttcatttatagaaccagaggaatacagggaaaaaacaaagatacaatcccagcgttacacgtattacaaatcacctttaccacacaagaatattctcccaatcatgcctaacggtattgattgtatagctggttgttacctcgggaatacaatattccaataacttttcctgtcttctctctctttcggtggttcaccggagctatggcaaaaagagcgaaaatggctggaaaagggaaatcgaagggcaagaaagcaggtccctcatcctcggatagagtcatcaagactcgatctatggatgatgtattggggattcaagaaccggaagttgaggaacttgaagagtcaatggaacagtgccatcatccaatggaacagtatgtggaaagaattttctctccggatgagtcataggaactgattatcaggcagagtgagattcgccaagacttttctgattggcttacggttgcaaatcgagctacccaagatgtaaattctgggaagaggatttctcccccaattctcagatctaacattttcaggaacctggaatcttcttttgatcaattgaagaaggatccagggaaggaaggaacaaagaggaaggttaagatagagtttgctgatatcgaagacgaagttaatttatggcaaccatctgtggtgtgttatgttattggagctaaccctccaatcagcatactagaaggtttcgtgaggagaattcggaaagatgaggttgttaaggttggattgctagccaaaggtatcttcatcatccgatttcaaagtttagaataaagagacaaagtgatgcagcagggttatgtattttttgatcgtaagccaatggtgatgaa

SEQ ID NO: 382089 - DNA, 588 bp, Cannabis indica
aatgatttctctttaacggatttggggaccacgtacaacatcttttgacaccaatgcacatatatgccatttgttcatctgtattgcagactacagtagtgacttaattatgagctgcaccatttcatttcatttctttaaaccttactccaagtttgcttcctaggaaatgaaattgtgatgagtttgttaaacttttgattaagcaatctgctatttgattaaaggatggtatgtatctaattactagctgtttgttgagtactttgtccctgacaaaatgaatatcatgtttagtcctcgcatgaaaaatgggattggatgttagagcatttgcaccaagattatcacaacaagtaacaatagtttaaagaggaaaattaaattctttcaccagaaattcaatccaaaagatctcatgtactcagattctgtgcttgaccttgaaatacaacatgtttctttttagataaccatgagactaagtaaatgtttgacatcatgactaaaacctgttttttattttaaaatagaaattatttttaaaataatttggcttgtttgatcttgttttttgaaaacagtttt

SEQ ID NO: 382090 - DNA, 3084 bp, Cannabis indica
agcccacaaaacaacagccctaatacacaaaaaaggcccactgttgaggtgtgcgcctcaagtacacctcaatgacagctgatgaggcatagcctcgatacgttttttcaccaattcgcctcgagctcgaccgatttttaaaactaagatcacacagtatttaacagttgttttagccaagaacacattcaccttatgccacttcagactaggagttctttcagtatcttgattgtcatcatcaggatccttcaacaagcttagacactcctcttttcgatacatagcaataaaaggtatctgataacagcaaaacaatattgtaaatatatatcatttaaatatgggtatgtaaacattgattagagactaacatccaacttctgcacatgatgaaggtccaaaaatctgatgatgtcatccctgtttacagataaatcctggccatgagtctcaccaaacaaaggcatcacaccagatgtaagttgcttatgtatccaggtactctcagccataatactaatttcatccagaggaggagaaccagtgctttcctcagaaacctggagataaataaataaataagaaataaatgcgaggcaaattgctctcgttcaagaagctacactgcacaattacaggaacaaatcacatatttcaagacaaactcagaacctgcattctttctggaacatcaagctcccgaatctggtcgtccttctctgtcatatacttttcagatagaacaattggttcaaattcatcttcaagtctcctttccttccattcaccagaatccagtccctgttttctaagttgtaacaattcatcaacatcaccaaatatttcatgagcttcctgcaaagcagatgaggaaacacccgatgcctgccgagatttctttctcttcaacttcctctgtctgaacaagatgttaatgtattaaaaagaaagctttgttttacaaaacagcaggaagttcctagatggacaattaacacaaaacagagctgatgctgattgagaaatacctcataggaactccactttcatcaaattcttcatctacaatgaagtctgccatttcatcatcgtcaccaatttctccatcatcttcctcttccactggttcctcctcttcagcaatgtcctcaagcaaagcacctgtagcagttcattgttaaaatatatacacacactaattattctagaagaaaaaatcaaaatgtaccttcatcgtcgccaaataaactgcgcttaagcttctcctctgcagttcgtccaactttaccacttccatcaaattcctcctcatcagaaaaaccggaagactccgcagcattttgcctctgagcttttttaagccgtttaaactttttatcctgacaatattaaaaacaaggaccctaaagttaatcacaaaacagaaatgaattcgacttcaaactacacacgtagacaacaaaaaaaagattcgctcaaccttcctgcgaggtatgacattgttatactcaagaagctcataatcatcttcatcaagggtgtactcctctctataaaaattgcaagaagaaactgtcagcaaaaaccttatttaatatagctaaaacagagaccaagctgcataatagattcaccaataaaactttccaattgtagtgtctacagaagatgataagaaaataattctcaagcaatatataactgaagtagactaacatggaaacatcaattccattggtgctagtttaaaggagcacaaaaaaatcagattttatattttccctctttcataggaatttcaaatagcaactccaaattatctagacaaaaagacagcaacacaatgatcaaacactcactttttctttcttttcttctttttctgtctctcctcatcactatccaccctatcttcctcttcatctggttcttcttcatcaacatcatctactataaaaccatccttttcatattcatcttgtccttcttctgcaattaaataaataaataaataatcaatggcacggttaacaatatatcagacaaaaacaaatctctagagagtgcacgattacaagtgacagaacaaacagttaataatccaacaggcctgtccttcttgaagagcatttcaaaatgcatccacaaagattaagacatccaaacccttaaaaggcttaaagtataactaggaaaatgataacagaaaatttaagtatcagaaatcccaaaagttaagatggttctttcacttcagtcttcttcaaagataaaattgtcatctgactcatttctacaaccacccattctccataagctaatacttcggcataattatttttcaaagattgtgctttcgtcaaatttacggtgaagcaatctttgccgcatatgattttgcaagtttctcttaagctgtatggggatattattgggttataagaaatccttccaacaattgcacatttgttcaagacttcgtcgttaacgcagctacaatctctctttttccgccaaaaataaataaaaataatatcttctctttgaccccataagagcgaaccaatgaccaaaacctgatccttttttggtcaaaattaccactgcatgttctcatcataactgacccaatccaaccctacgcccacaaagttttcaatcttctatgaaaaatccaaagacaaaagcaaagctagaccaactaaacctaaccttccaatccaataaagcaagaaattaaagctcagaactctatacaaactatacaaactacatagagaaaaaaaaaacgagaggcgaaaaactagaagagcgtaccgtcatcctcatcctcttcatcgtcgtctcgatcatgacctccgtcgccatcaacaggctccctgtcttcctcgtcgagttcgacctcatctgcacaaattgaacatcaccagtatcaaataacgccataattccattagaaaagaagaaaatagggctagggcttgggccagagctatagcccaataattacatggaaatagacgcaaaaaaagtggtttcgatgagagagagagagagagagagagagagagagagtacgta

SEQ ID NO: 382091 - DNA, 2795 bp, Cannabis indica
aaaaaaaattaaattaaaaacactgtttaaaaaaaaaacatggcatatgtgattccaacccgaatattgattctaattctgaataaattgttaaaaaaaaagtaaccacattgttaaaaaaaaacaaacataactaaaatagaccttgtaacattgtcaaagcttcaactattaatcaaagttcaactgaccaaaccaaagttcaatcgaccaaatcaatcctcacatattaatactcatataaccaaatcaatcacttgatttagcttttctaagaactcttgtcacaaaggcctctcgaatttcgccatctatttacttgaaggttgccacatattctggcttctttaacatgtacgtcaacacatcaagttgatcatgaatcgaaagtcccattgatttcaacttcgtagccaattatgtcaattatgtaaaatacaacacgctgtaattatttgacattgtgtcgttattgggaaaatgacgtgctcctcaagattgaccatctaaccttaaacaatctgaaacaactctcaatgacatttcttgcagatgcttgtttcatgttaaagtactcctcgtgatttctaggcacatttctactccactcagataaatgatacgtaattaaaatttagtgatctaaataattaaaatttagtgatggttcaaagtataaaataaaaaatttcactaaaattacctttagggatctttaagtcattttgccttttaatggtatcacgaagtactctagttactgatgctgaacccttccaacctggtaaaacaaatataaacttcatatctcgagaacaaactcctaatacacttgttgcaatcttacattttctttcgggaactcatacctcaatgtaagtaccatctaatgcccttagacaattttcaaactatctccatcgactattaatgcaattggtaggcacaggatcttgaggaactaataagttttcttacaaccttaaaatctcatgaaaaactgaattgaagtgtctactaatggttcctcccgaccgcttaaatctagcgttcaatgtataattttttacatgatgggcaagtgtatgaacaaacatacacacgtgttcctcaattatgactgaaccatttcttatcacccttccatcagcacggagcaattcacacaatactctaaaagttctcatactcattcttagatcattcacacatgctatgtctctttcacctattaaactattcaaatattttaaccgagtctcatgtctagtaaaagtacaatcttgaagcatatgtctcctatgactgttgtgtaccattatgtacaacaataattgtaacactatatatgtgcccattatttgaaaataccatatgaaaatatcataattttcttttgttgcatatccatatctattaataaaattacatgtacataaaaaatgttatataataattataggcactaaatcaaaactatatgatgaactgtattgcataacaatcatatgaagtctaaacaaaacgctattgaaacatatactactactactataagcaaagtaataatagtaaaacaataaaattgttgaaataaactgacatgaaacaaccaaatttcagaaactcattaagtaaaaacaatttcaataatctccaaaagagtagaaaaatgaaaatcccaaattagttattatacctgaaataaaatcttggcttgagtagtgcaaccgcagtcttgacaaagcctgtgagtctaagctacttttagcgtgagagagagagctatggagattaggagtaccagtgagaaaataaaatcagatctaaataaaaaaagggcatggataaggaacgcaggcatgaaggtacgtacacatactagatgaagagagagatttgagagcacttgggccaatcggagaagatgactgaaactctggccaaatcggcgagagaagatgactgaaaatcagtgaaccaagtagctaaaggcaaatttgaagaaattagggagagagagtatcagctgatacaacacaccctccaaaataatacaatacatccttacacaaggcttttattcaatatataataatacatgagagattgtattaaaattaaggatgtattatttattacattacaaggtctcacccaaacattgtagtcctataatttaataaaattcggagtccttatgcaaggttccaaaagaatccttagagtaatttccaactattttgttgctccatatttgaattgtaatatgtgacagatttgaatgtccctaacttgtatatacagtggttgtattattgcattttctttttgaaaattgtatactaattataaataataagaactgaagaagtaaacaatcaaaagagaaagtgtaagaaagacaaacaatttttacgtggttagggcgttaactagccttagtccatgagtcgatgttattatgtaactttttagctagaaaagcctttggaaatacattgaacgtaagttatcaagttttcttgagcaagtattacctaggggtgttcataaaatagccgatccaatccaatccgcacgatccaatccaatccaatccgcaaagtgcggatatccgcacttgtgcggattggattggattggattggaaaattcaaaatccgcacttgtgcggatttgatgttgattgacatgtaaaagtaaccgatccaagccaatccacacatatttataacaaaattaaaaaattatatataaatagctttttaatataaaaaaatagtaatttaaaa

SEQ ID NO: 382092 - DNA, 611 bp, Cannabis indica
gatgtcactgatagaccaaggggattttgacagttattttttgattttggatccgtgtaggtatccaatcagggattatctcgataaagtatatgaattggttaggcacccaaataacagggaattctccccgaatgtcactaaagtaggtcatcttcttactatgttcttctcaggcttcaaggaacatgacaactttattgggtgagaagaaataactttgtttgcaaaaggggaaccttataattactcattctacggttgcattcacatgacatctctattgttttaattcatgttgtttaggttgctatttcttgtctatttgtctgatttgattattgtggtgttttgatttttccaaacacacttgaatccacgatgttgagtgatttaatgagcgccatcacaaaagtcaacactgcagtagatagcaaggggaagcaaaagaatctagagccaaaatggtcagccacgcagtggaccctctagctacccaattcaaaatcaaggaaatattgggttttgttcccaaaataaaattctatttcaatgtaattttctacattcatttatcaataaagaaataaatttaattcattacttgttta

SEQ ID NO: 382093 - DNA, 1062 bp, Cannabis indica
aacaaagcattcgaagggagtatgaattgtataatcaagatcaaatagattaacgattataatatcaaaccaaagccatttctttcttgtatttcatccttctaagttttcgaaagaaccaaacgtagcatagtgattacgctagcctaactataatgatccgtaaaaggcgtaaacaacaaaatgctaaacgaattaaacaatcatttttcttttcctcatgcttttccaagaaagaaacagagtactctaaaacgaaaacaaaccttgtccaccaagaaattagggaaaatttgctttgttgtgaggaaatgaccgcaagaaggacaatcgctcttatggcgtaggtgagttacgaggcacatataacaaaagctatggccacaagcggtgaggaatgcgtcttttatgatctgcatgcagatagggcagagtatgtccttgtccgcatcttccatgtccacatcctcctccatctcctccgccggacgcggaacatcggcggtggcatttcggtagagggttccggtaagggttcgcctttcacggtgggcactaaagcccccattgagctccttcccattctactctgtctctctaagattagagtttccttttctgtttctctgtttctctctctagacttggacaacgactaagagagagagaggtttttgtatgaaacagaagatattttgatctgtggaagaagaagaagaagaagaagaagggttagtagttttcagtagttaaatttgtatttcagtgaaaagaaaaagagagagaatcagaaaagaagagagtatagtattacttaatactatacattatacactgtgtccgtacatagcgacagaaaggtgagatatttttgtgagggagaaaacggcccacgttatgcggccaattttgattaatccatcaccaattaatcggcgtgtaccatttaataccctttctttgtaataattacttattggcttacactttatttctctctatcataatttcacccaactaaaaaaattagagaaatgctaaaggcactagtggtgcctaaca

SEQ ID NO: 382094 - DNA, 2720 bp, Cannabis indica
cgttttgtttttttttttttttgagtaggtttatatcgtttttaatcagtagataacatatacggaaaatataattacatttatatttttggtagtttcacaagtgacgaaaagatgttttgttaagacaccagaagaaccataattatgaataatacaagctaaaaagttattggaatctaaaggatgaaatgtacttattaattcgataagtacaaagccataatttaatgagtgagcttcctaaaaggatgggaactcgatctgcgaagcgcattttccattgggaaaaactgggcattcaatgaggttggaaccagaggtgtccacacacacgtaaatttggtaaagctggctgttccctgacgagtccacattgcattctatccacggagtgtagccaatcccattttgaatagcttctttgatattctctatgctgtaaacttgtccatttggttgtattcctatacatacatacaaatattcattttcatgattaatccaattctataataatttatgtatgaaattatattttatccaaaaacatactaaggccagtagttaatgtagaattcaagaatggatatattctcaatctatttttatggaaagacatctaattaattagtatttgaagaaataacatattgattctcaaattcaggagtaattcctcaccaccattattgactgtcttcaattttttttcaactatttatggttacaaatctcctaatcagtgtccgcaatccacatcttaagtatatgtatatataatgatgtttgacatcaaggaaaattagtaaaatatatatgtgtatatacctgcatctttaagcacttggagaagatttagtttccttttgaggttgagagtagtttggaaataagcatgttggtcaagcacagactctgagcaagtcccgtgtttttcccattcatgttcccaaaatttcagcccactcccacttgggcatgctagtgttggccagttcttttgtaaaccgctggacaagtctgatatctgcgccatatatttaaaaatcaatacaccaactccaaataacatttctattaatcattgttcgggattatttttaacatataatatttcaatgacaaacgttgtttatatttgtcgttttctggtcatatatacggcaaagtagaaatgtaaaaggacaaaaggcatgagaagtagtaagattcccaaaatccggaaacgtgtatgacactagaggcacatgcgcgcgtgatcatttgtccagtaatattatattattgtaatatattgatcgatagagtgcataataaatgggcatcttcatcgtgaaaccaaaatcaatattcagtctttactaaatagaaatataatacttacttgagattgatcgaagggattgttgggatcgcagtttgaagggtacgatccgtccttatagttaggccataaaccatgaatcccaaaatctgctacaggctttcctgtcgttggatagcagcagctttgtttcgagtcacagtacgaacctggccacttcattatttaaccccacaaaagaaagaaacaaaaacctttaatatcttatacgaatacatattatgattctgttggtaaaattaaaataaataaataaataaatcactcacttgttggacaaagtagaagaaatcgaaatcctcagaaacacaaagaagggagagatttgcaagtactaaaagaggaacccatgaaaaagagtacagcttcatactattttttttttttctctttctttcaatgtgtctatatgatatcaattatgaaatacaatgaattgatattggtatagttactaaacatagtgttatttataggacaaaataggaagtttgccggacagggcagcatgcaaaatgatatgagtatatgctctaaaatgtctcatttcattttttacgtgtgaaaaccgtcactatcatcattgccatatcggctcacttttttttatttattatgtccgttaatttagcttctttctttctttattaacttttttttttaaataaaaaaaaatctcaaagctacaaaattatccaataaaatatcctgttccttagtgttgaaacgacatttattttttttttttctattttgacataatttgaaaggatttcgaagagtcctaacaatacaataattagtttggagtttctgtaatggtaaccaataagttgttcaaaatatatatgtgtatagtaaccaatgagaatcctgaatgattgagaaagtcaaactagttatatgtatgaatatgacacatggcatgataacagaggacgatgtagctatcagctgttagacttgtttggctggtgagtttatgtgttacgaagccaattatttgtccatatagccctacataacataattgctttcatactgaaaatcatgaaacaagagtctgcgtacacaccttacacaaattgtgttggagcttgctatctagacaatgctttgttttgttttcgtctctttgaaagcgacattatttaagcgggctagatttaatattgtaaatggatcggatggggattggatccaactatgatccgatcttttcacctcgtcctgtcctactaaattagatacttggtacagttcagatccgatcaaatttatttgaatctgatctaatcatacccgacgtatcatctttttttttttaaaaaaa

SEQ ID NO: 382095 - DNA, 1949 bp, Cannabis indica
caatacagtacatggggcggacttggttaaagagacagcctattagttattatatggattatatctaataggagtgaaacattaaccaaactttctgaccaaaaatatatatattcaatttctttcaatatgggtactttagttttagtttcattattaattaaccatagttatcttaattagataaatatgagaaaaagtggcatgggtcgatgaagaaattaaccaaacgcatttggagaaaaacgaactatataagctatttatattcaacttggtgctcttaactacttttattatatcaaatcaatgtagtttatttagtttatattcattcttaattattaattgatattttaagtgtactcaattaagtgaaatttacacaatgcatttaaaattgggtttttttttttaaaatattttttacgtattttttttttactatgttttcactttattttttttttactttttatgttgttttcctttaacagcaacgttaaaataatattttttcgaaaacaacactacgtatcttataaaaaaaaattccataaaatatatatataaaaaaagcaaatctgtaagagtataaaaaatttgtcatttttatatatttatgaaataatccagttagtaaaagtgtagtaataaatttccttaaaattttgataacacaaatatttaagttcgggtcttataaatactaaatagccattgttgtaggtggtaattaagtaacataactaataagctattttcttcagggattattgggtcattaatactgatgttatgatgtcattaaatctcatgttgacgtttttttttaaaatataatttaattaataagttccttctttatatgcagttacctgtcatgatcattatatataattaggtacaggtgaagaatttctctttattggagtaaaagtaggacaccattaacaaaataaaagatactaataatatattataagagcaattgactctaaactaaactattcctatctttcattcatttcaattgtatctaagtaagcatcactcatcagcataattttcatataaattaaatacgatcaatttggatttttcgaattgtaagagcgcaatttgtatgcaaaaaagagtagttaattatgaaaccaacttcactactatacaatcaagtgggacatcttaatttatgaccattgaccactcaaaatacatccaaacctgaatcaagaaacaaataatgatatcccagatatgttgatggaaattggaaaatacttaacggaatcttgtgaatggatctgagcgcactcttatggtacaatagatgtgaatatatatgccactttaagataattaatctatctcgtatacatgtatgtgtgaaaattacctttggttttggtgaaaagaattaaggaatggatgtttgattcttcttgtctgtgcggttatgggacagcctggtgtgtgaatgtctacctatgatttggatatgagaaataaggggcactaaatgtcaagtactatagtaggtatgaaattgttattggtgtaatttaatatcaattctcatattttttttttaatttaataaataataacatgctacataagtatagtattgggtacttttttttgaaaaaaaagtattaagcaccctaatattaaagatattactgtgattatgagtagcctcctcagcttaattcatacaacatggcccaaccaatataagtgcttaaccacatcgtaaagaggtctcaatatccaaatttgtgcatccaagcatcatagccttattacttgtttgacatattctttaataaagtctttagtgatcgataccattatatcaataattatgttaaaattctttatcacttgtaaaatatgtaataatatgatttagggtgattctacaatgcaccccttaaacggga

SEQ ID NO: 382096 - DNA, 2269 bp, Cannabis indica
atatatatatctggcaactagtacacatattaagaaatatgaattttgaaaaatatatccagaagtatattttttctggtttaaatatgaaattttttgaaaaatgtgattagattggctacactatttgatatcattgttattttactttaaattactgaaactgtcattggtagacttgctttctaatattataaagtttcttatacaagaatctctagttattaatgctaactacaatttctttccaatagtcttcttcaacttgcgactaaagaaaattaaactagcccacaagacgagcacaaacactattaccttgtatccaatatcctcgccaatattttgtcctctttcagaagagattctctcagcaactaaaaaaaaggagagagagaaaagaaaaacctaagaacattgtacagctgaaaatgtaaaacagaagagggaaaaaagttaacactaattagaaagtataggtgataaagttaaaaaataaacctgacatggcagagatacgtcgaggttgtgtacaaactattttacaaacttcacccttgccccacacatagtccaaaagaaattggggaacctatacaataaaagaaaataaagatttcaaaaacttcaggtttctcttctaacaagcaacttcaggtttaaataagaacataaaggccaaagtgtttgacaagttttagcagcctagtttcatcttaacaatagcattattccacatttatatataaaaataataataaaatatatatattataatataaaaaaaaaaaggaaaccaaagaccagcttcactgagaaattactagacttacatgtacctatcctactcaagaataaaaaggaaaacacatctcaattattcaaaattcttatttacattattacatcaattttcatgaatactacaaggataatcaatggtttaattttaacaatctaattagataaatggcttttttcaataggctagaagcatgttaagaaaaatatgtacgagggaaaaaaatccaaagcagtatatcaaacctgcgtggtcttcccacaccctgtctcaccagatataagaactacctgcttgaagataacaaatgaaaaatcacatgtaatgtactataacgaaaatgcataaatgtaaatcacataatactgagttagggtaaatgagcataaaactcactacaagcatgtatgtatcctttattatgtatacaaagaaatatgtgttatattgtgcctaactaatattctactgcattataatgggggcaatgagtagatagttctgctgcattatttggaaagagaaaaaagagagtgcaaagtaaatactaaatattaaggacgcaagtatgacctggtgagattcaatcgttgatgtaattgcatctttaaaacaagtaattggaagtttggacctatctttagtaatctgcagggataaaaattacacaaaactttaataaactgatatgttagaatggtaacaaatgtagaaaatcttgtaagtaattaacacctgtgtcaaagctgcaacattctttactctagaagcaagtgattgcaccttctgtgcaatatccgccttgctcattgatggcctaagaaaaatatcagtcgtcttacgacgtgagttggcgacaacttttacaccagttcccccaatcatttttttctgctcttccccatcaccaggcggatgccgcataaatagatcatacaatgcttcttttgactcctcagaaaatttcacaacagtgagcttctcaatcttctcatcactcttcgtttcacgtttgtaaacagtaatgcggcgtgcggatccaagcctacccaagattcacacgagtttatagataagaagcatatagtaattgttttctttaaattcatacaaatacaaaacaacttgcttggtactacacttctaccaagcccaagtatattgaaaactcacccaccactcctggatgtcattcccatttttctgcatgtttcgtgcactagagctcgttcaaagtttgacaggctagcgtcaaatgtatatgctgcatataaagtgacagattaataaacaatcaaatgaacgctgttttatcggttcaataaaatcaaacagagggaataacaggaagtcagtccttcaccaatcctataaccaaaatcgaaattcgaattcaaatcaaaaccaaagaagaagaacccttacacaaataacaataataacattaacaacaataacatacatata

SEQ ID NO: 382097 - DNA, 1303 bp, Cannabis indica
taattataaaaatccaaaaaacaatacaaattaactacaaaaagagtgatcaccctctcgtaatagtaaaacacaaaagtgtcatagagcatataaaaggagagtcttctagtttctcatcatgtaccttactttgaaaaagcaatcctcaatcttataccacatgtactcattgaagaaccaaaagtaagcacgtctccagaaaccacaagccaacaaaggaccaatgacacctacaaacccaactccgaatcccacagctatgcccaatcgaaaccaatacttttcttcttcattatcctcttcagtagtatcacttgcatctttaggagtcttctcttcatcttctctacacttttttgagagtggaagtccacaaagatattggtttccaataaaggaagaattttccatactttgtagttgggtgcctgttggaatttcatctgaaaagttgttgtatgacaaattcaagtgattcaagaaagttaaacttgacaaacctggaggaataaccccagagagtcggttcatagagagatcaaaagattccaacaccgtcatatcttttatttgattcggaatgcttccttcaagagagtttctcgatagatttaaagatcgtaatgcatgaagacttgtaagttgttttgggaactgtccagataaatcattatctgaaaggtccaagcttgtcaccaatgtcaggatggtgttgtattgatcttcccttcctttaatcaacacatgtgcattctccatgaaagtaccagcactagaggaataaaagatagggcttgttgaattgggcttaataatcatgccttttgtaggaattttacttggtgaaattccaagtttaacctacaccactcaagaaatttgtcaaaaacgacagggacaaacttgtcccagaaaaattcaaattaaaaccccaatcaacgacaaagaaaacttggtcgtttctcctgcacgacaatggaacttgtcgttctcgcctacacgacagatcgtttgattcaaaacgatctgtcgttctccttagaataaaaccaagaggaatcagagctaaccctagctcatttcctctcttcgaaccttcgagagtctctgaactctctctctttctctctgccttctctctggttctcaaaccctagaaccagagatctccctcgatctattgatcgatctttcccagaaaatcaccccagaaacaacacacacacacatacacaaatattagccaaaacacaaaagtttagagtaagaaatcaaacaccagaaatatagaggttcgccc

SEQ ID NO: 382098 - DNA, 1183 bp, Cannabis indica
gaaagagaagattttatattgataaattaatattataatcaagaagggccggagacattttccaggttattaaacaacatgaattgtaatagatttctgtatatatcctcatgttaccaactatacaatacatcatagacatttgatttctctacgattaaacaatataaatatattatatatattcaaccacaaagtgatgtctttttttgttttttttgtttgttttttttattaaaaaaaggttaattaggaagaaattagctgaaataatgtgtatataactataattagattgtttaaaaaatatatataaagagatttttcttttatgagagtgtaaaggcacacgcatacatatcttaattatgggaaattatgacattcctactcttctaatgctattattcgcaacttcatcctatttggtgggcactagttgtacttctgtccaaggccaagctggtctaaccaggcttagctttcccaaaggctttcaattcggaacagcttcaagtgcttaccaggtatttaattatatatatatatatataattagtatatctaattacagatgaagtttttgttagcaaacacatttattattattctgattttgaagtatgaaggaggaacatatgggcatggtagaggattaagtatatgggacaccttcacacgaacacacccaggtgacgtctctctttctctttatctttctttaagtattttcttttttcatatagcaacggaactttgtaatcgattcattaatgatttgatgaactttatttcagaaaagattgcagatcacagcaatggagatattgctgaagatttttataatcgctttaaggtatatcaatatataaataattaggcaacttattataagacttcttgtaaaaaattataaacttctacgaaaaagaaaattaacattctacacaactttttaaaataaaaaaataactatatatatactctaaaataactaattacaaatatagtattctcttaggggtaaatattattttagaccatgtattttgtaaaagttatcaattgaactctatggtatgttaaatgactaaatagaccttatattttctaaaattgtataaataggactttgaactaattttttgtcaaaataaaacttaataataatctgatctagaga

SEQ ID NO: 382099 - DNA, 1240 bp, Cannabis indica
aatcaatatgtgctattagattggtgattgttttttgtgaatagataatacaagtgtttagatattcttgttttaaataatagctgataaaggtattatattaataattttatttgtttctttccaaattcataagatccaaacaaatgttaaatttgaaatgaaacataagaagtggttaaaacaataaacaaatcttttatttatgtaagtggcatgaactttttgattttaggtcaacatcttcagccatataagcttttagagacagataggctcaagttgctgaactgaaaagtaaaggagttttcaatttgaacaattatcttttgctattttatataattgaaataaatttataagcattgtttggttggtccacaggagttgttagcagagatgaatcacaaatttgggggaggaaagcgaccgacgggaactccttcgctggcaatgtcgtctgtggtcgttgttgtttctcttcttgctggggcctctgttgtccacaacatctacaagcctgatcttgtaagttgttcctctctaactaactcaaatttaattattgcatagaaactgtttgataaaaatgtcagagacatttttctcttcctaccattattacaactactccaagttatcaaattctggacattgggtccctttaattttcttaatgaaatcaaattatcaatgcacttctttagagttggcactgttctaagtttatttttcttcttctctttgcttgcagacacttcctcccgtggaagctataaccgaaacgaaacaaaatcaatccaatacaaaatgaaacctacacgtatgcatatcttccatcatttttacaaacttaaattgttgattcttaagattttgaccctcttgttgtatgacttgtgcattgatctgttttgcagtattttaatttgtgagtgtcagttcaacaataatttataaataaatattgattttgcctttttataaacaacacatctgttctaaacaatatttctaaagaattgctgcaattgtaatgagttacatttctcatattcaacaagtttgtagttagactggattgggaaatccaaggtggaaatgatcaccaatagtcggtttattaggttgaagaacgagagggtgggttggaggaagagatgctgagataaacagatgagtaagtagattgaatgatctagtagttgctaacaaaaaacagtaggagagtgggttcaaa

SEQ ID NO: 382100 - DNA, 4558 bp, Cannabis indica
ctctctctctctctctctccaatgagcattgggaatgccaaccacacatgttatatgttatctctctcttatacttcaccccatgcgtatgttagctatatacaaacatatactaattaacatacatgcttcatgtgtgcatgacacatatatacatacatgatgaatatacacatacatgtgaatgagctcacataaaactctaacaccaataataagaggcaagagaagagtagaggtctctctatgccttgactaatataactgaccctacttactaaaaaaaaaaaaaacaaaaacaaaaccctacaagaccaaatagatagatcaccccatattgtctctctctttctctttctctctctttcctttgcatatatatttgcacctttctttcacaactcataatcaaaggaaagaaatatagaaaagcagatccaaggtggttgttaagctgtcattccatcaatcaatcaatcaaagaaacacaagaccaatcatcaatcagtttttctttctttcttttattttatttttcttttataaaagaaaaaaggaaatcgaatccaaaaaaaatgtcatcttcttctgcttcaacaatattgccccagcaactggaccacctctcttcctcatccgagcagctctgttatgtccattgcaacatatgcgatacagtccttgcggtacatatatatatatatatatatttctagggtttgtaacctttgttataatgatcttattgtatatatgtctatatatatgtgtgtgtgtaggtgagtgttccttgcagcagtttgttcaagagtgtgacactaactgtgagatgtggacactgcaccaatctgcttccggtgaacatgtgtggtttgcttttgccttcgcctaatcagtttcatttgggccactctttcttcaaccctgcttctcaccataatctcctggtaattaaattaaattaatatataattacttctactaacttgatgattatgtgtatatatttatatatgtgggtctaattaattgatttgataattattttcaggaagagataccaaactcagccccaaactttctgatgaatcaatcaagcatggctgattttgcagtagtgccacctagaggagtcaataatactcgtcatcatgatcatcatcatcatcaccatcatgaaatttcaaggcctcctgttattaacagacgtatgtcacatgttaattaatttcctttgcatataaatatatatatacatactaattttcttctcttcatcatggactctttagagatcagaggttttcttttgactgatcatcattttcttacgaagaaaagcaaaaaaaaaaaaaagttctgttttaacccaacaccaaaccatcaagcaaaaaagtactattcttgtttcataaaacacatatttagccttattcaaaagttcttacacattattaataagttttaattacagagatatctcatcccttaaaaaaaaagacacacttccagtataggcttattctaattgcaccaacactacttaattacactatttagttatatgtatatgtgatcacaactatatatatatatacacttttgatcagcactgctgtacatctagctatacatgatatatctacaaagattaatcattattaagtgaaagcaaataatcataacataaatgtacatatggagataattttagcagtactagagcaagaatatagagataaaaaatttgtaaagagcttatagtaataatctttctatatattaatttagttataaattttgaagaatatatacattaatgttatatgcagccccagagaagagacagagagttccctcggcatacaatcgtttcatcaagtgagtagttttactcatacattaattttacatattattatcattaataatgttcaaaatgattaagtaattatgatagtttataatatatataatgtgattcgtggcagggatgagatcaaacgcatcaagtctgtgaatcctgatatttctcacagagaagccttcagtgcagctgctaagaatgtaatctatactacacaatattcaatattatagccctagccttgttccattcccaaacacacatacttttattactaatattattattattatacagtatttacaccctatagctatgtatacatataaatattccattttaaataaataattaatatgtgtagtttacataatttgtggggtgtatatatgtatgtacgttgtgtttgtgtataaacttgtattgttttgtctgtgtcagtgggctcactttccacacattcactttggtctcatgcctgatcagactgggaagaagacaaatgttcgccagcaggtttctatctactctctctctccctatgccctagctatgtatatatatatttatattcttaatttagtatattatatgtacattaatttttgttctcatcgtctccttgctctctttaaattttgtttaatcaattatgtatattaattataaaccccatgcatgcacatttttttttatttgctaattatgatttatatataaatgtataggaaggagaagacgttctgatgaaggatgggttttttgcatcagccaatcaagttggtgtttctccttactaataacataaacatcgatggatcgaccaatatatattaagcatataaatatatatatggagaggaagctagagatgaagattaagtacgaacgtttattgaaagacaacactatatttcatggtgaccctacgtagtaattagtagtactagaaggaaggctttttaatttaatgacgatactatgtctactaaaatatcatgtactttttcagttctcttttatatctctttctctaaaatgtttaagaccctttgtggttgaacactacttaattgtctaatcttatgctaattaaactatgacaaacgctcattatatatcttacattaatatatgctgatattaactatatagctctcttagctaggttcaactctttacatataaaataatgcatatgtactgtactgtccatgtgtgtgtataattaatgagagaaaaataattcatctattattagagaaccattaattatctaatatataattgttatattatagtttgcttaaataatataattaatgtttactaagtcatttcgatccttttttaaatgaaaaaagtgggactctactacgtacatacgtgcatgctataaatcggagtaataactagggaaatatgttattaatactgtttatactcttaattataacgaattttgtataagtagggatttcactaatgacaaatattatcaaacgataaattagttaattgtactagctagtgcaatatcgagcacttattataatagtgtagaaagaatacatactgacagtcagtctggttacatatatagtaaattaatgcatgtgtaatgatagagaatcatccattatgattgactcggattggaatctacctcttcttttttagtaaaaaaaattgagaaaggcaatcacacggagttaacaggtgtaaataatataaattaagatcaaagaacttagacctcgtggtcattacaaatcaagctacccagtacagaggacaaatctaccataccagtcacattaccgctaaaagtccatttcactacattataggcagtaaaattacataatttgaaaataaacgaaaaattacaactagtcaaaaagaatttgagagcatttacattaaaatacataattattaatactccaaatagaagaagttcccttcagagtaatgattattgtcttagagtcgctttctatgatcacaaaagaatgcttctcatgcatcgctgattccagggctaacagacaagccgcagcttctccaatgagagggtgagagaagttgagaatattgctagccacccacaaaattgactccttatgatccctcgccaaggccaccacacacattgagtcgctaccaaccttcacgttacaaatgatcttgacccaatcgttcaatgtgggagaccaagcaggaggcatgcaaatcactggtataggaaacaagcaatggctaagtaacatgtagaaatatagtcaatccatgtgcttaatgttacaaatataattaacattatgaatcttataattattgttctggattttccaaatcgtgtccattataattgatgtatacagaaaaacctttttgacaccttttttctttaggctccataagaatttgacccaattccacatttgggccctagactcaggcactggcatcacgccccaaggggatgaccttgagaggtgaaaagcaaagttacattaatagtggaagagatgttccatagtttcctcctcctccccacaaagggggcaaaacacatcctcaatctgcattcttctacctaaagctgacctaatcggtaaggcgtttgagaggatactattgggttttatgccctaaataaaactctttacaatctgattagttatc

SEQ ID NO: 382101 - DNA, 1720 bp, Cannabis indica
gacactgctattgttggttatcaatagccgaattgttctcatgacttcttagaatatatgatttgaatgaaataatacaacactctctttaaacaagaataatacaagcaaataactggaagaggaaaggaagaacactcaatgctatgccgaatttgactcaaatgtctataactgaatttggatacaagtaggccagaatactttgaatatgttttatatatgtagtgcattcaaaactagctgtaagaatgcacaataaagtcacttttaaaagttttttcattttttattatttccttatttttgatattttatcttcaacttgacaattaagttctacattttcaacatgtctattaagttctaaatgatatactgaacgagtttacacagggtcatcaataaacagtattggtatacctaaacattgagtatattttgtggcgtattcattagtttttttttttggagagaaaagaggctgttagactaaaagattcgaagagtaacaacaagcttcatcaccaatccaacaagtaccttcttcagtcccaagcgcattcttagccaggttatgggcaacagtgtttgctatccttcgaatgtggttgagatgaacatttgaaaagagtgatagaaatgacctcagctgggaaatgagatgatctccaactactgacttgatgttcgtggtgtttgccattgcatctactaaagatttgcaatccgtctcaatgaagtgaattgagaatgcttctttgtggaaccattagagggaaacgataagagattttgcttcttgaatgtgggcttcccccacttctgaaaaaggggtagcaatggctgcaattgtgacagccttgctatttggaagaattcccgtaaaacctgatttgttggaacgcctgtcaattgtagcatctgttgtgtgtttggcaagaccatgtggaggaggggtccaaatcttagaagggcctgattgatccttggccaatgagctattgatggagtcgtttagccttacttggcggtaattgtccataaaagaactagcctcctcaagaagattgtgatggcacaccatagaaccattatgagtgaacttattcctatcaggccaaataagccaacacatagaaacaaacaattccaattctggtttagttaaaatattagagagatgcattacaataaagtcaaaatattcgatatgtttagaaattttgagatgtgagtagaatatcgtacctttccaaagctggctaacactagtacaaaataataaggcatgaaaaatattttctagcccattgttgcatttggaacaaatcagggaatccattactttccttttatagatatttgaaaaagtagggagtgtacttttggtggccctataggcgaactgttttagtttggagggtaaggaaaaggaccataaagtggactgccaatccgagcgttggtgtaaagcccgcttagtaaatttggaaattagcagttaatcatgattatttatgaaaaattatttatagctatttaaataatttattatactgttatttatggaattcagaaatgcatggttatgttattcagtagtttttcatattttgcatttccggtgccctgtattttggaactcggcgtttggctcagtagaaatcacaacttagcatgttattagtttgggacggtttattagacattgggaatg

SEQ ID NO: 382102 - DNA, 5288 bp, Cannabis indica
gttacacacttttcttatttttatttttattattttttatttttttaccaatttatcttccttttcctcacgttaacatcgctacgagattctgctcttttttcttttttatttttcattgaagatattcttagtagaatttttatttattttatttttgtgatgatatatatgccttcttcctctttcagactaactgtaaagtcaagtatagtggacccattttattttatttttattcgaattcatcatactattaatttttttaaaaaaaaaaatgcaaaaatttgggtttctttttaagttgcaaaaaagtcccacggaattaattgtaaaaagtggtacgtactcttatcatgaaatactgataacacagtttccactgttggattcaaattaatatattaccttttaattttacttaaattttttttattttccttttggtcttttttttacttgtggtacttatttaaatctaaaaataacagccattatcatttaacaaattcatatatagtatagtatgagtggtcaagtttagcatcattacataacatatatgcccaaggcacattttctctcttaactttagacctatttgaccaaaccacacttctcctttgtcttgttttatttctttctttatttatttattttttttgtagaaaacttcccatttgtttttcttttctctctttctctcaaactattatatattattatatatatttttttacttgttaaaaatttctccaaattaattaaagtatatattcatatactactggccatttgaaaatatacatatattgtttatatgtatatattattttctccttgttttaagtttggtcttgtttttgaagaaaaggaaaaaaagtttgagtctctcttaagaattcttcgacaataattctcgaagcttgagtagtgccctagctaacaatactgtactcaagcaccatatctctaacatggtcgaccaccaccacccactaccacaaacttaattaattacactactttttgcaagtactaccatgacccctataaggatcacattttccattatatgttttgtacccataacaacaatcattctttttattgtcaattaattttaaggcattattattgcactagttgtgcctaataacttttagaggtaacgctctgtgatttattagtgatattcttttaatgttattatattaaattatatgagatctgatactttgctacaataacgatatagcaacaagaaagtattagaaactattgtggacattgtcccacatggaataaatggtaaagtattaagtcatatataagaacatgaactactctactcatcaccaattaattttaagatggaaccccataactatatttatgatcaccgtctatctttgaaaatgaacaatattggaaattgagcttcatggaccctctttctgagtaagagacttagctccatggatactttttcatataaaactcagattgcttcccaactctgccccaaataggacgcacgaggataataacgagctttgaacacatgactaactaaagaatcttgacaagaatgaagatgccaaccctattttccaagcagcacaacattaaaattatgaagcttctgaaatccatgtctcccatgaacctttgggacacacattcggtcccaactcatccagtgaatgccacttccgtctcttccaccaaaaagaacatattaatttctccatctcgccacacatcaatttatgccaaaaaaaaaaaaaacgctcatagcatagttgggaaaaaatgtcactaccgtcttcatcaaaaccactttactagctctagataaaaaattaccatctcacccttggatctgtttcctcatcttaaaaaaagcccaacacgactaacttgttgcggctcatagtgcttttgccattcctagatggagcacacatgtgccttcataatattcttgttaaaaaaacagaagacttcgctatttgtcttcagatacgaagctaattcaaaactacgaagcaacgccatcatcttattagccttatcctccaacacagataactatcgtcaacaaagaatatactctgagtaactttaaaatatatctttacaattttttttatagttaagctaataataataatataaatatttataccttatgcacgtattaatattgtgttcaagcattatataatgaaattaattatgagaaaaacatcatatttttaatttcaaccccaaagatcaatattcaaaagtactacaccttcctcctaacgtagtatcaatcaaacacactgatatttatatatatatagctaggtggctttatttattagaattatatattaattattagcttttaatttgtagcactttgaactttaacaaaacaacaacatcatcctagttttcattatatataattccattccattctttgtttttgttttatttttatatataaaaatattaaatattttaatttgtaaaaaggaaaaagtataatagactttttattttgttctatcttattatatccgtggcacaaatttgaaagcaaacctacggccatgaagagctttcaaagaggagaacgcacgtggatgcatgcaatatatatggaattgaatccaataatatataattaaatatatttttttatttataataagataaaataaatatatataagaagatgctatccaataaaagagaaaaagaataaagctgcctgttggatacatgccctattccccaatcaattttttagaaatattaaattattaaaaatatatatattctacgtactatatacaattaatatttttatatactattattagattctaaaattggaaagatcaaattttctatctttccataattggtaagttcctaacgaaagtaatatttcttattttaattattttctaaacatttatgtggtgtttgattgaaagaaataaaaacataaaaataataatgagaatgctaataggaatacgagtaataaaaatgaaatagaataaaatttaaaatgtataaaaaaattgataaattgataaaaaattgattaaattttttcaaattctttttattttaaattatattagaatgacattttaatacgttaaaatgcaaataaaacaaaaaaaaaaatgaaataaaaattatttcatttctattccattctattttattatctctaagttctaaccaaacgttagtatctttctctctttaacgctataataacaagattaataatttttattatcgtttcgtgtttataataataagattacaacaaaatacgattaaaataaatatgattttgacttgactaatttataggtcacaagatcacaaacataacataattaccaagaaaaacactaatttatttaaagaaaatatgaaactaaataattaactcatgttatcgacaacaccatatatatattcaactaaataatgtaatccaattaacaataatcattaaatattcttaaactaaatacttttttcacagtttagggtgtacatatcatttcatttagagttgcagtgaaaagtgttattgttaccacatgatgtcatatatatccatataggcatatatatataaaaaccattaataattagtttcaacaaattaataattttaagtaaaagaaaaggtggtagaacgtagctttccatttccaatacaaccacaagagatagaaaagaaaaagaaaagaaaagtattggagaaatttgtgatgaacaaaggtcgaactaagttaatggctagaaacgtatgaaaaataatgcaatgtatatgtatatatttatatgttgtgagctttgaatgttttcaggctaagattagatatttctcttcaaccaaacaaatttaaacgacacacatatcgagaatctatatatatatacatatagatatatactctttttaattcattcatctttctttttagctttgtagatatctttcatctcagccaccaacaaagactattgatcatatgggtatctattattaatttttgtatattttggtaactttatttttcttacatgatgatacatttagttatagggtctttctacaaatttttgtaaaattatatgtcgtaattagaattataaaaaagtattagtacttaaaaaaatacaagtaaatagaaaatagaaactttttaaaaatgtaaggtctgcacttaatagactaaaatataagagacttttccatttataattgactcttataaattagaatattttgaatatatttaaagagatcttttaactttagggactaattgtaatttaattatgtatagtaaaatataaaatttaaaatgatatattttaatttagtccatatagtatacaagaactgttagaaactagttgctgcagaaaataaaaggaacgaagttaccgaaatagaatctgggttgagtcgcggactaggtcgctctctttaagacgttcgcggcactacccagatttgtgcaaacagcccagtcgaattaaataaataataatttaagaaataaattttctccaaaaaataaggtgacaccacaccggctcggcacggtcggtcggcggcggcgcgcgtgtggtagtccggtgtgtgagtcctcacctatgcgcgcaaaactgggtaccccttggggctcaaacccatatctcaaacttgcactagttatacacttcaaatgaagtgtttctatcccatgtgggactcctactcacacacatcattttttaacatttcacaaagttccaacaagaactatataagtattaattttctcaccgaactatgacattaattgttgccgaaatttgttgatgtaatattataaatattcgctaaaaagtattattggtgcctagtactccttggtgtcatactgcttttggtgtaattaaatatcggattctatataacttaaaaaaaataacttttagagaatattactaagcaatcgtgagatatattgatgcctaataacaatactcaaattataatatgatgttggcccaattcaagagtcagaaaataataattcatgtaatatgtttaatcatgaattatgagaatatttatatgtattttaaaattaatatttatatgttttcatgtagcttaaagtgttgtccacaactttcacaattttcatacaacaaaaaatatcattattactatttttcagggccggccctgggcatag

SEQ ID NO: 382103 - DNA, 1732 bp, Cannabis indica
cgtttaaagtttcgtaactagtagtagtagttacttcttaaacgaaaggacgtactaaactactactttacttacttacttctctactagttgttagagacttgactcactaacaagtaaaactttttatagtgtattataagtcatgattggagtccatatgtgaaatgaagaattgaaattaagttaatctggaatttcaataattatatgtcaaatataatatttcactaggaattagtttcccatttcaattaaggcatttaaagttaattaaatcaaagttgtccaagttattgtgatattaatgaaaaaaatcttcaccaagaacttgaatgtttctctacaagaatattgttatcaaattttaggatgctccgttatatccctcgagacaaagtattaataccctaaaatgatgatttaagacaggaaaagcatgaatatcatatttaattgcatcatgaaagaacattagaacacataccaatgacaaaaccattgtactcgatgatcgagtcgtctggtcttgcgtttgatctattctcaaactccattgtgtaagacatgccagagcaaccaccctgcttaactccaattcttaagcacaaatcttcattgcgttcggatctcatcttattcaagtgcttcaatgcattgtctgaaagctgaatcgcgggtgcgatgccctcagctgttggagcaactgaaacattggtaaaggttggtagaaatgttaccaaagagatacaaatggtaaagagaaataaaagaaacattggctaaaataggtgaggcctaaagttttctttgaattaaaatttaaaacttttccattccttcttctatagtaacacaattaaatatgtatttgcccttttggacactaaattaaaaagttctggagacgaaaaaactctaggtaaattaaaaattgggttgaatccaaaacccaacaaaatgctactgagacatacataacaagttacaatagcatactatctctcacaaaacaacaattggggcaattctctcaacgaccaaaaggcaaaatccaatatcaacgccaactaaggacaaaaaaattaaatatgttaattcaatcctaattgaacactaatacaattccctaaaattcaatttcaatatttctatacctataaatcgtagcagttaagaaacaaatttcagttgcaaatttctagaaacaagcttcaaaatcttccaattcacattattccattagtttcacaatattagcccgtaaaaatattggaaaacaaaaaggaaagaaaaaaacctagaaatatgagaagaagtagtaccagaaggagaagaaactgatcgaattgaaaggcgtttactggagctgagtttcaaatctgagaagccaaaagagagtgagttccgaggaatagaagatgaagggagatttttggggaagaggagaaaagaagggcaccgcggagtaattgcagagaacgccattgcagaagcttcaaaattaattttctgtttttcgtattctctctcttcgttaaaaatgagttcaagaaagtactaaattaaattttatcgaaaagatctcagccgttgtaaaactcgtatttgtgaggattctggagaaagatcggacggacaaggttactttctgtaagttggagaactaaagattgttcttataattaatgtggttcataataaatacattctattattaaaaaaaaaaata

SEQ ID NO: 382104 - DNA, 6361 bp, Cannabis indica
tatcaacaaggtgcatcttgttttttcggagcccatcacgaaagaactccacagttaagcgagcttgacctgggagtaatttcaggatgggtgacctcctgggaagtttttcccaggaagcgtgcgagtgaggacaaagcacgctggaaacactcgtgttggtctgtagggtcagtcatcaatccaggaagcagccagagtgacgtactcgtgtataagagccattcattctgtgggtgtaaggacccaatggaggcttgaagcggggacgttacaagaatccaatggtgttttttagaaggctctactcaactcgaactcggccgtgttcgaggatgatctctctccattgggctcccaaggagaataaggctaagcaaaatgttgatcattatggctcgaaaacagctaacatgatcagattgatgacagaggaaaagttctgaaaaactaaggcatgattggcatgatttttttcatccttaggtcatttttccaattttcatttctttgtcatcttaagtacgttttttttttaagtagtttcaacttgctgtgagtttttcctctgtacaaaacaggtcatagtacaacacttgaggctagctcaaatggccataggagggtgcgtgtgttggaggtcctgagtttgagtcccaaattatgcattgtaatatataaacacttaattaataaataaataaaaaaaagaacagcacatagtacaaaaccatattactagatatataataatgtataatttttttgttggattgagcaaatttggtgaaaaaatctaagcactaggccaatgtaatttttaatatattgtatcatatttatatatagttatcaaacaatgtatatatagttgtagtaaatctcaattaatatacttatttcttagaattaatttattgtcactataaaaattagtgacaatattttagttataacataatatctttataattaaatgtgatttttagttgcaataaaaagtaatttgtaactaaaacatagtatttaaatataaattgtcactaatttagtttttgtcacagtaaaaatacatttagtcacaaaaatcacaatttgttgtgactaatattttttgtcacgaaccttttagtgataacatatgattaatgatttataattagtcacaatatttttacttttagttacaaattttattgtgaccgtaaaaaaaatttgtaatgtttagtttaccaataacaagtttataacattttcctaaaagaacaaatagtagaatctgatattttgttaagaaaagtcaatagggagagttggcctatgtataataaactttatataaatatttttaattttaccaaatcaaaatggagaagcaaagtagtttagaaaatggagaagcttttattaacaaaatcagagttgaaatatgtaccaaaatcatacatatttccatctgaaattagacctggaaatgccaaagttccactatgtgagtttattcctgtgattgatatgaaacaagaacaaactaaactcattcaacaaatcacaaatgcttgcaaagattatggaatcttccaggtttgatcttagaatcatcatcatgtgatattttgttcaagttaattatgttattatatcaatttgtgtgattatgttatacagttgattaatcatgggattgaagagaagttgttagaagatgtattgaatgtgactaaggagttttttgagcttccttatgaagaaaaatcaagcttattttctaatgatccaaacaagatttttaggctatacacaagcattgattatatgaatgagcaagtacattattggagaaatgctttgagacacccttgtcctgttgaacaacacatccaattttggcctaaaaaaccacataattacatgttagtgtgatattcctagtaataacaaaattttcatgtttcattttctgtttttgttttgaatattaccgatattaaatattctctcttaattttaaacacgtcactaaaataatgagtaatttaatcctcccaaattttaaccacagtcaagtcataccttattattaacaaaagttcagaagaattgatgtgatagtaataaaagtttgggggacaaaatatgataatagtcatacttgggcgataaaattgctaattaaatagaagtctaacaaattctaatagaaattccataaattactaacattcaaagttgagggagagtatttaacattgtgacaaatttcaaagggtaataaaagacattcattcttttgttttttgacatgaattttgcaatttcagagagttggttggaagttattctgctgaggttggaaagttgagtttgcgtattttggatatgattggtgaaggattaggactcgaactcgggtactttcgcgacaaaactgaactggccgcagctcagttgatgaacatgaatcattatccaccatgcccagatccaagtttaaccttgggattacctaaacatggtgatgcaaacatgataactttcattcttcaagaaatggatggtcttcaagtgtttagagatggccaatggtttgcagttaagcctctccctaatgcatttgttgtcaacattggctacattttagaggtcactccctttcttctctcttgctatgcatattctttccttgaaagtgcatggttaattaggtttatttgtgagtttttttacttatttagtatcctgtgttttaaagaaatacaatttcaataatttataatctctgcaataattttaagaattagtataatacagtatttttagctcaaatttgataaacaaattacatgtaaaaaatgacattccaatgataattttatattagttttaagttttaaaatacccaataatcattaattatcaagaataaagaacactatttttgtacctattttaactaattatttttatttaagatgagtctcacttataaaaaataacttgccaaaatattacacaaaataaggtgataacactactttttaacatagtaaaccatagtatcctctttgtaaattacaaccttacatggtttaatgatcattatgaagaataatactaagtactaaaattgtattgtgttactaaataatgtgtgtagattgtgagcaatgggaagctaaaatgtggtgaacacagagttgtgacaaaccaaaatgttggtcgaacaactgttggcagcttcatttatccttcttttgattgtagagttgagccagcaaaagtcctcatcaacaacaataatagtggaagtgaaccactctacagagacttcatcttcaaagattttctagcctcttttttaattgatactaataccaacaacaaatcaccacttgatcgctatatatataaacgagaataataatatgtgcatttaaaatatgtaccgaaaaattacaaaatatcactgtgatatgaagcttgatctattgttataaactcaaaaataatttttatatttattaatgtatttttagtttgaattgcttgaggttagctcaaataaccataggtgagtgtgtgtgtcttggaggtcctaagttcgaattccaagtaaaacatgttgtaatatataaacgtttaaatcaatttttagtttgtaatagttattagttactcaccctcttttagctgtgccacctcaaatattaacatatagggccggtcttgaattttaatgagcttaaagagaaaaaaaaaaatagccctttttttttaaaattaaatgagctttgatcacaggcctaactcttcttaacctaatcacattaaaaatcacacacacatctttctatcataattgatgaaaccaattcattcattcgagatagtattataattttgagctaataaaatatataattaactataagagctattaatgtttgtctttttgtaagttttatgtaaataaacatattttttaaacaaaatctatatgtcatatattgctgccgatcttgaaaactccatcccaaccaacccatactattactcacccaactttgtgttttgtttggtcacttgttgttgtttgctttgatatttaattctactattagtataatgtataattatgtgtattcacttgtataatttaatttaataattaatataaaaatatagtaacaattagtaaattgttttttttataaagtatggacctaactcctcttaacttaaaattcgtcttttcatgatatattaagcataattaacatcatgtgtcatacatcttttaaagtaattaagtatacgatagaataataattgagacagtactcttcaatttttacataatttataataatctcaatcacataattgaaagtgatataatttctatttaatgatataaatagttaatatttatatacatcattaagggtgtaaaagatgttacacaaatttaatctttgaaatttaaagtcactacaaaaaattttagtcacaacaaaatttataattaactaaaagtaaaaaaattataactaattataaatcatcgatcttatattgtgactaaaagatttatagttaaaaatattagaaacaaaaatcacaatttattgtgactaaatatgttcatagtcacaatacctattgtgtgtaaaactaaattagtaataacttgtatttaaatactatgttttaattacaaataatttttgttattactaaaatcacattaattataaatatattgtgactaaaaaaattgttgttaaaattaacttttctcgtaaaactaaatattttatagttatttatatatgtgagttagaaataagttaaaaagggtggtaagaagtttgcagatgaagttgtcttttataagaatatagtaatataataagtgaatagataagtatgaaaaactgagcttctgctacacaaactttattataatattatcttgattagattattattagatctaagctagatctaagaggtgttgagactttgttgatgaaattggagagaagcaaagaaatattcaatggagaaattgttatcaacaaaaacagacttaaattttgtaccagattcttacatattgccacctcattctagacctggtaaaaccaaacttagtactaattcatttcacaccattccaatcattgatttgaaacaacagcaacaacaactcattcaccacatcattcaagcttccaaagagtttggattctttcaggtttgaacattattcattattatgttttgttttgttattgattgtattataatttttgatgatgcatgatgaacaaaattcagttgattaatcatgggattgaagagaagttaatccaagatgtattggatgtgactaaggagttttttgagctaccaattgaggacaaacaagtgttgtactcagatgatccaacccaaatttgtagactttatacaagtattggttatggggatgaaattgttcattattggagagatgttttaagacaccttggtcatcctatacaaaacacatccaattttggcctcaaaaaccacctcaatatcggtatgtcattgtttctaagttttcttatcagtaatatgcacaactaatttatgagcacctgatattaggagcattgcaaacaaattagtaaagtatgcacaactaatttataagcagtcgatttaaagtttagcattaaactcaagatctgaactaggataatctctttatcttcgtttatttggtattgtttttttaagagaggtgagtggggagagtacgcggcggaggtgaggaagttgagtttgtatgttttggatttgatatgtaaagggttagggattgaagatggatgtatgggagatgaaagtgaagtgagcaaagttcatgtaatgtcagtgagtcattatccaccatgcccagatccaaccttgactttagggttacctaaacatgctgatgtaaacttaataactcttcttcttcaacaagtggatggtcttcaagtcatcaaagatggtcaatggttaccagttcatcctctacctaatgcaattgttgtcaacattggctacacattacaggtcaatattatttacatatatacatctctatataggagagtatatatcacttctatttttccaaaaaaatctgaataatttatggttcaaacaattttttacacacggaattagtaggatatatatgttcacattataattttttacttgcacccagggacgggacccaagtgtattagtttaggggctatagcccccactagcaaaaatattgtcttttaaaaaattaaatgtaattttttaaatt

SEQ ID NO: 382105 - DNA, 3956 bp, Cannabis indica
ggcttaagtttcatgatctcattattgtcagtaaagtagacaacatctcttatatattaagaacttttattttaaaaaggaaaaaattaaccaaattacaaatatgaatgtcttgggattcagtaaataaaccatgtaacaaagtacaattgaaaccaatcattataagatatggattagaaatatattactatatctgaacatgtttttgttaaattagactctctcttgttgtgttatgatatttgtatttctaattataagtggtccttgagagattagatttcattgaactttgatctaaattaagctgagatcgaccaaatcttacaaatagagaaatgtgtaagattgaaaactctaccagataggtcatgacatttcgttatccttggcggcttttgtgtgtatacgtaagaaatacacataatgatgatgaggatgaactctaaatattattattattattattgttattattattattattactatgtcaaaagtcacgggggtcaacaaagatcactggcgaagatgatcgagcactagtccaatcggacggctcaaatctctcgcccacattcaaagtagtagtagtagtagtagtagtaacagtctctttctcttgagtttcatgtagctttgaaagttttttgatgcaccaaaggtcttcagccaaagagaacttcctccagtgaggaatggccactctaacagggtctctctggctcacctcagccaccacagccccacatccaccgtcatccctagccatgttatacgcaaaggtgcatagagacctcatgagcctaaccccttgcttcccctccatgtgaagtccgtacatgaaatacacaccaaactgcctaaacacatctgggaaagaaggcagcctcaaccaaggcatccatgcatccaaaaccctactcccttcgcagcatgcgtatttcaaggtcgagacaccttttaattgtaacttaaacacttccttagtgttccaaacgcttagtaacccgaaacttgggggaaacaacgtcttcctcgggtcccatttggagagggaattcctcggtacggcaatgaaagttcccaagttgagcttgcttgtcaaaatggcgtctatgtctttggggaagaactcggaatttgcaaagatttggccgtacatagaggtggcgagcttcggttgaactcgaataatggcaatgtctgaaggtatgggcttggaatgagcatgaactggctgcaccaacatggttggggtacgaaacttggtgtagtcacatttttttgtgaatagattgatagaaggctcgttggtgcaatcggtggccatgtatgcgtactctgcacccttttctttgcaccactcttctagtcgttccaccaattttgtaccaataccaagtctcctgtgttattaccataaaaaagttattagagtgcatattaattagtatttggtatataaattacatgaacaagtagtacactattattagctagtacatatttactagtacatatttactagtagtggacctgtttaatttggtatagtagctagttgtttgcatggtgacaaaaataaagtgaaaaaatgaaaaatctagtggggtgagagtactttctaaagtgggtcttattgaaaaagttagaaggaacatttaggatatgtatgatatatgcatatttgaaagtgaagaagaacataagatgcaagtgatattgggggtcacatctgagagagactgttgtctaacaaaccaatgagaaaaacaaaacataaaggggacaaaaggaaggagaacaacaaaataataacaaaaagaataatcaatttattattattttattttttaaaaaaagcagtggtggatcacactgtgtgtgagatgtgcaatagtataaatatggtactctattttgtattttatttttcattaagtagagaaaaaagagaatggtgggaaattaatgagaagacgacattttatctaaattattataattgtaataataataataatagtaattaatgtttaattagtaaaaagcagtctctctatctcgtagtggatgcatgtgtttcattgagagagattgaagtcttaattatattattaggtatggtagcttcttttcatgatacgaggaacatttcctcttctctttttactagaatctaatcttctcctatgttagtgttgtggagtttgaacaataatgataataattaatggattatttgttggcatcgaaaactagaatatatatatatataaaagatatttgtagagataacaaggaatatattacatgctaattttaaacaaaaactctacaaagctagtaatttgtaagataaccacaatatagaaattactacatttgtaagacaaatcaggatagaagttactatttatacacactatttatctatccacacacacaataataataatgataataacagtagttgatcatgcttatctctccctaataatgattttgagggggcttgtttaagaaattacaaaagaaacagtagtagtacctgtgcgtgggagagactcttaagcccaaaatataagccaactttacataaagggaattccctgttgtggcgtttttgaccccttactactcccacaatctcattttcttctccgtactctgctacctgatcattatcatcatatcattattaattttgaacaataaatcatgaaaactaatctacgtacttaaatatatatatacacacacacgtaccagcatgatgtgagttgggaaatgacgaacacgacaaataggatcacccattagatcagtgacaagtgaaggcttaccacggcggccaccaccaccaccgagttcacaacggccctcaagctcctccaccgccaccttatctttctccgaatcatactctcttataactacaaccattactaattcctcacttactgaattcactaccattaattaacaacacttttctataacacttactattactattactataagcttccttgttattttgcaatgttttctctccaataaactccacaccctatatatatatatatataaatatatatatataagaagagagagatgatcataatctccataatctccatataattacatggcatatgtccctaccatatggttattacgtagtactgcgtatatagccgcaagatcttctctatatcctctttatttatttagtttatttttgacaagctatatatataaattatttaaatgttaattatatatataattaaagatatataggaaatagtatttaatttgttgggtgatgattgaccagatatattgtttcaattattgcttcagatggtagtacaagcctattcatatttatatatattttatatgtacgttaaaattaataataaaaaaagaactaaacgttaaatattaaaaggaaaaataaacaattaagctgaaaaaagtaagaaaaggtacatagtctttatcatgtgcagtgtccaacttgatatatgataactatatgatgttgatatttattatataattaataattaatttatatcattaatcataataatgcatgcttctctattattatttatctctatacatagactatatatgtagatcaacgatcgagatatagtcctcttgtaccttgttaatattatttaatgctattataaactaataataaccaactaattaattagtactacatacatgcatgcataattaacaagttaataaatttatgtataaatgtaatacatatatttaattatatatgtcatcattaataaaactccttaaaaaaataaagtttttttatttaaattattttttacacttcaaaaatatatattttttttttttgtatttttacgtaaaattactagatacactacaaatttttttaactt

SEQ ID NO: 382106 - DNA, 4927 bp, Cannabis indica
ttgacatttgacgtcaacctgaatgttgggtacatgtaaaaacgtccaatggatgtcctttaagatacctaagtgatagtttgacaccacttagtccatttatatgttccagcaaagctggtcaccgattctcaaagatgtttctattttcctaaaatgagaggctcgaaactcttcatttctgggtgtgctagaaatgagaaatgcaaagttgttaatttgaatcctttgacttcatagatgattataattgtgaaaaactagacggacggtcgaaacggttttagattctgataagaaaaccaagcgcactaggccatttgttaacctaggcgctgggccctttctcccaagcttatgggattttatttttgatacttctaaggcttctaaacttgaggacgaggtctcctaccccatttttgctcattctagattcaatggtcacacctgatttggcatttgagtaattgaaggaagcatcccaggttcattgtcaacctaggcgctaggcctttcttctagggactcaggattgtggtttactcccgaagtttacttgaatctgttattttagatgacgaaaaaaatgcctgaaacactttttgttgaactcaattggaaacagcccaagttgacaaaatgtcaacctaggcactgggcccagccccaagtgtcaacctgggtgcagggttactcttttcgccctttggaaattctgtgtggtgcccaaaaatagttgaatctcaatattttctgaagatatagaaggttctcgaaagaactcctaaaaaactccattttaaatgggtaggttgacaaaatgtccacttaggtgcagggccagccccaaatgtcaatctgggtgctggggccctttatttgtgctcaggaattgttgtttttcttctagaagggcgtattgctttgtttttgatgaagaccaatacgatgcaaaagttggatctctgattggacacttagaaggtgcctagattgacaaattgtcaacctagacagtagattgtttctatttgaacgcctcttcacttctgactagtacttacctccccttccttctgtgtagatgaatcttgacgacttttgggaaggtaataaccttattgacgacgaactactccatctactttttgaggaccagccaagggtctacgcagagtcttcatcttctactagagattcttcctctagttttgaagagtgggaagtatcaagtgatgaatcttagcctactacaccacccatccagaatcatttattaccgtgaaagatcgaaggtagtgtgcacgagagattcatctgggagtataacagaggttggaggcaatacctaccctctaattggacgtacattgttcaaacaagggttccaaatactttaccagaagtagacctggagccttcactatggcctagagcaatgtggaaatcaccgttactattacagatcacccttcttcaagccattcctttcgctcaagaaatgtggctcaaacaaaataaattgtctgaaagattgggcccagacgactcggagtttgttcgcttgatggctatgcgacatgaacagggtgaagtaagctccgagggagaagatgagatgctcgtaggggacctagaggtccaataagtcgaggctacgggtagatatgatagatacaccctcatgcctttcgaaggtgttggtgactattcgaaggacacacaaccaattgatgctcggggacgttctttagtcctgggcattcaatatattgatgaagagttcgatgaggctaaatcatctatgcaccaagaagcgattggcccaatgtgggtctcttttccatctgaactgacagtgagacgccttaagaatttggataaaaagggccttcttagagatgtgcaagtttttcttccctttgatggatagttggctaatgacccgggagagggtatgtgtgcgtggtctgactcgcatgatgaacatggcgccatcttgccacttcacccatactttgtgaagttggcagactactacaaaatttcatcaacgcctttcacaatgaagagaattaaatacttggccacaatgaattcttctccttaccatgagcgttcatgatacttttaatttttgcaactcaagtgttcatggctgatcgacaggaacaataagtgcatcaataaaattggtagatttctccatgactattacatagtcaccaagatggagagtaagttttcggcattccaacattccaaaacatacacttgacctgcatttacacttggcctaagagatagagcccaagccatcttaaagttgtccgtgtgtgactgacatattgttttgctgggaaccaaaactttcctcaaatacaggctctatccgaggctaggtagtctgtttcccaagaagccagcaaaatcagcacctgccaagatgtcttatcccaagaagaaaacgaaaaaagccaatagggagaagactctgtctagggaaaaacctatccatctcagggatctcaaggaagaaactgcttgtaggttcccacagagtgttgaaggaaagggaaaggcaattgttgaagaaattgaagatgaatcttttgatgatgacgccccttctattcttgtccaggagggtgcgcctctagaagattagggtagaatattaattaattgtgtgtatttttatagccttgaccaacattctaaccaattatttttcttctctttcttatccgtgcagagatgaccagtaaattaacttctttctacaagagaaagttgggcggtacaatgggcaaagagagcccaagtaaaatttcaaggagagagtccatggcttcttcccagatctcagttcccactttgatagatttgggaaatgttgtcatcgattatgggcgtgactcagctactaccaaatctttggcttaaaagagctcaaaaaatctgccccaaattcctgctacttctacccagaaacctaaggataaattagtgaccaaggtgcccgtaaagttgaaacatgtcaaagaggtgtgcaactgttaattggaaaggcaccgagcagaaactggggaggtgctgaggggatttgatattcttctgaccgacttcatgatgacaggtcttttcatagagtttacaaagctattattttttactcttcatatctttttgtttggacacttcatacttcattcttacactgttactaacttgagtttgcttcattttgctagctgaacctataggtcagctatgtttattctcaaaccaaggttctatccaaacagtctgttacaaaaaaaaaaggttgagcttgagaaggttcaggaggacctagttgcaaaagaagaggcttttaggcaagttaactaggattttcttgagcaaaagaacaaatttaaggaattaactcaactgattgctaacactccatctactgcagagctagaaaatgaccttgaggcaaccaacaaagaaaaaataccacctcttccaaagcttcaaccgcacaaaacagaataatcaccaacaaaagcttcaatcgttcaacccagcaagacaaccaaaaggaaacccaagcaggaggaatactaccattaatttcagcgaattcactagaaaagaagataggaatcgatcaaaccaaaggttgatttgtattgatgaaaaaaagagcacaaaaactagtttgaaattgaaattcaacactgaattttggttttatttgaacaaaaccaaaccccttaatacaaattttagattcatataatgtagatctctaacaaacagatatggagctccccatcaatccaactcaagtataatccaaataaaaaaaaatgcatcaataatagatctaatgtttatctagttgcattgatattgattttcagatttccaatagtgaacatattaatttataatcaagttaagaaaagaaaaatttgaatgcatctatagccacagagatagaagtatacttttggttttttaggttgcgttatggttgcattatcatttgataatggtgtttatcaaatttgtaggtattttatttgacaaagtaaagagaaatcacttcaaaaaaacttctacaacatggttagttatatgaattcattcaactagttgatatttagttacattttagttttattgtagttgcataacaattgagatacaaaaaaaaaatgtataataaatacaaggttcagaattagcaatacatgacttgaacataagaaagttaatagaagttttttttttctacttcatgtagattatattaatttttgttttttgaatttttatgaaaattggttggaatcatatataatagaagcattacaaatttattatagtttcaaacaagttgacttacaataataacactttcataatctcaggaaaaagacgaaattctattcctagtcttttgtaatggataatttgatgatcgaatgaatatgcaaattatgaagctactgggaaatacatctcaattgattgtaaatatgataaactgatacacaagctgaaagaagtcatggaatgcaaccaagaaaatattgacttgcaactgaaataccaagtgaaagaaggataccaaccgttaaggataaaggacgatcaaagcctatacttgtaacatacaactaaaactgaaggaacctgacttcacaacatatccataatgtgtgaatgtggtcagcaatacaataacaaccaacaatccataattcttggaaatgagtaactcattagttgcacaaacaaatgcaatagtaacaatggaagacaatgcaccaccaatagaagaatcaacaactcagcaacagacaatgcaaggcataatactcgaagatggtgaaataatgttcaacttcatggactatgcaaaact

SEQ ID NO: 382107 - DNA, 1515 bp, Cannabis indica
ttgttgcatctttctctattctggtatgggattaaacttttgtcataatttgacataaaaccgagcaatacttttcaaaatatccgctaattaggcattgtatatgaaagcttatgtgagattagatcaactcacattgattgagtaagcagtacccaatacaaaactgatgaagagggcccaaaataatggccatgacccgacgagccatccaacgccaaaactctgaaaaataatgtgataggtcagaacattataggcttcaaatacaaaatgacaaatttgcaatacttaacacaatacattttcgtgcaaaaagcttaatcccataccagaatagagaaagatgcaacaatcataacgccagtttgaattgaatattcccctgacgccaacggcagatatggcttgttaacctgtgatgaaatatgcaatagatatcgagttacacaattctcgatatatcccatattaccatgtaaaattgtagatagtctgcctctataaaaaaaataataaggcaaagaactaggcactgatgtagtgacctttatgatcaaatataagaataaaaaatttgtgttttcttcgttaaaacaaatttaaaaagaatgcaaaattaagaaaatatttaggataagacagtaaaagctaccttgtctatatcaatgtcatacagctgattcaaaccaacaatgtaaatgttcattaagagggcagctacgatagcctgaattgaaaagatcaaatgcataagaacaaaacttatgatgtgaattcaaaaaaagtagttcaaaatattttatgcttcacctccaacatcccaacaaaaaataatggagaaaagtcggaaagcttctcaattgcaagtaaggaaactgagacaatgctcaatgcctgcttcctgaaaagatacgatgagtctccaaaaatgatgggaaacaaagtccaaacaaattcgattaagctgggactgctcccattaaatttaaataagttaccgtgcctatgactgtatgtggccgagaaaacctatagaaagcatctaaggcatctttagcagagttcatatcattttttggctccgattcaagaggttgtccaccggcagccttaaccaggaatctttcatttggtctctggtaaaatacaaacgtttcactacctttcgcacaatgcttcaatgaactgggttggaacacagcagagcaaggtttttctctgactttccaaactctaagccttgaaacattgtatgccacgtatgaacctgtattctcaaacaaaaagaaagagaagaagaaaaatctcacttatagcatattgaaaattgttaattacttattcccataagcaaaactatattttttttcaaaaccaaagacaaaacatatatcaaaagcaaaacctttagtaaaaagttcatgttttttattctaaggataatagatgacctgacctgttcattcaaagaccaatgccctctaatcagagagagagaaagagagagcaaca

SEQ ID NO: 382108 - DNA, 4396 bp, Cannabis indica
catatgtttaatttggaaatggtgtagttttgtacttacttaacaagcttatcttgatttaggtatggaactaaatggcagtgtgctgatattgagatacaacgatatgtcattcgctctattttggcttttcttgattctatttctaaagattcttttcaccacccacttattaaggtatgacttagtactagaattgttgtattaactattaaggattaaagattgttctgaaacaatttctttcttttttttttttaggattctattggtgatgtggttgaagcattggtatggatacttgaatgtaaaaacatggctatattgagcatgacaacaaatgtgaccttgaaattggttagcattttaccttactcaattctacagtcttatgtgttagatcttgttagtcctttgtcatccttgttatcttaccatcaaacagacgttgctacgtcatgtgccaatgcgctaaatcatgttctctcgaatctgagtattaagaatgaaaaagcggtttgggatgttctcaagagaagagaaagtgtacaacatgtaatttgtaatattcgatctttctctagaggtacattgccttttgaaaagttccagcagatggctttgctgttaagtacaatactacagagatggcctccatctagatttcttgtatggagtgatgctaatctcatgagaaccttacttgacattcttgtaaagccagatttttgtgataaagtggaagttttgaagttactttcttccataggtatcgacatgttctttttctttttttcttaattatcaaagttgttgccaaaagaaatttatcaggtttgaatgaatggagttttatgttttctttcttatctttaccagctttatgtggtagtggggcattgaagcttctggaaaatggagaaaccctcttgaaaatgatggtgcaatgcatgaacatgtcacaaccccaatctgttcgtatggaagcattcaagcttgcccaatgcttagctgtaattacagtacattgctctcttcaaagtgattccagtacgatcaattcaaagttgtctcaatgtattaagtgaacttacaatgtttttgctcagataaatgaacagagatttttcaaaatgatgagcctgtgttgtgaacctattattcaagccatactttctgaaatgagcaagtggagcaagaaatcaggaaaggttgctgttgaacggatatctttggtacaagaggcatgtctcttggctctaataacacgttggggagggaagcatcatatctatttttgggaacatgggatcgacaaagtcctcattggtcttctcctagaaaattctcacaacaagctgcatcaaagttgtttgacaatggaagaggagatatctattgcacaggagggtcttagctcttcttataatcttgttttgaggaattatatatggaatattctaggatggcttgccatatactgtgaggaaggctttaatcccgagataaatggaaataatctttacattgatgtactcattacatgttcatggtattgtcttattcttaaattttgttggtattgctttctttttactgtcataattgcttatttatctttatattatggcagcttggcctttgtggatgcaattgagaaacgacacagattatgtcaaagtgttacagctgatatcttacgaagtgaatcagcaacgcaggctgttttgatgatgattaactctccctgcaaatatattgcaataaaggcaacattcagactatcagaaatactaaggccaaatggcaaagacattttgaaacatttgctatctaccctagagtatgtatcatccaggaacaatttcgatagactacagatcaccatttacttaatggctttggtatgttatattggtttgccagagtctcgacaatgggttcttgaattttcagggatgaatatactgctaggtttcacaaggtggtgcttaagcaaaagtattgatttagaaagggttaacttcggtccttatttgcataatgcatttcttgagaaggcttgttgctatgtttcttcagaagactggggaggcaaagaccatattatgctttatagtttgtgggggttagctgagttgataaagcattctggatatgcagtaaataaccaagaaatatcttgcggtagtatgaagtatagtgttactgaactgctaaacaatcttcacgaggtctttattgacacatatagttctggtgttcggtggtttgcttcttatgttcttagttcttttggattgtacggttttccaaataaattgggaaaaagaattggcaaagcacttggtgagaactatcatgcagatataaaactcgtgcttgcaagtggagaatgtttgagtgttcatggtgttattcttgctgtcagatgcccatctctattaccttttcaagagctccatcaaagagacaaaatagctaactcttcagtaccatgtcctttgggagatgatctcaagaaagaagtaagattatctgcgcacgttgatctccaagcattgttgaagttgttggactttgtatatttgggatatttagaaacagatgaagaactattgacgaagttgaaaagaatttctaaaggctgtaagctccagcatctgctacaaatgctttgtaggaaaattccaagatggggtacttcattcccggcttctaatctttctcttgctcttggctcacttggacatcatttttcgtatgtttctcctcaaggaatttgcacttgaattttcgttgtcttttcagcttcaacataaagatgttttataaacttacgaaactaatagtagtaatcatatattttctggtttaagggatatcatattggaagctaaatcaactgaagtgcaaagctggagttgtgatatttgccctgtttcggtgccacatatgcatgttcataaagttatattatcgacaagttgtgaatatctgcgtgctttgtttaactcaggaatgcaggagaggtaattgtatttaaagctgtacttgtaaaattaaaacttgctaacatcttctttttctctctgattatctcaacttgccattttaatctttacttatggttgcagccactcacaaactattaaggttccaattagctgggaagcactggttaaattagtagcctggttctacactgatgagattccaaatcctccatctggatgcatatgggagaacatgagtactaaagagaagctatatgagctagaaccatatgttgaactttgttggcttgccgagttttggtttttagagattgctcaggaagcctgttcaaacgtgattgtgtctcgtcttgattcatcgagagaactacctattaaaataatccaaaccgcagccagtttatcactgtggaagttggctgagctcgcagctacgtgtgtggctcctttctttcggcaactatatgattctggtgaacttgatgatcttgatgagttccttattgatatgatacgttctgcttctgttcaatattctcaagagggacatattaattaggtgatttgaattactgaaaaaggttggaacttgatgagtaactttgttcatttcatttagttgggaagttttgatggtttccttcccaaatgagaagcaagaagagagtatatagcaatagtttcaagagtaaaaactgtgaaattgtttgttatagatttgttgagtaaattatatactagtctaagtggtgtaaatgttactttatgaacatgcaaagaatgaaatacagagaaattaatattatttacttcctttacattcaaaaaaatatcatttacttgttcactgacaaacaatatatcatttactttacttagcactccaccccatcaaaccaaattagtggtaaatctctattttttttttttggaaaataaatgtaaattttttattaaatataactatataacgtaattttttttaatattgtaatttaaatttaaactcatatggcacatatctaaaaaagtatatattttctatcattgttttcattgtaaacaataaaatagataaaacattttttttaactattattgtgatgtccttacttaccaaaatatatatatatataaatatattatttttttttaaaaaaaatgtaatatttactaaaaaaaaaattatagttaaattaaaattataattaataaattttttgaatctatccctataattaataaagagaagaaaaaaattatcatttttatatttagaagggacaaaaattagggtttctcgttcctaaaatttataactattggaggttgtcttttttctggctaggcctgctaacctttcttgggcttaggtgcgg

SEQ ID NO: 382109 - DNA, 1078 bp, Cannabis indica
tggtctcgagcaaaatgaagattaattttgatgtgcttgcaccgtgcatgaaataaagattagcagcaagtgcagtggcactttgattgtcaacccaaagcattggagtgtgagagatagggacttgtaattcagacaataaagagataatccatcttatttctgaagccgtattagcaagtgccctaaattcactctcagtactatatcgagcaacaacttattacttctttgctggccaagatactaagttttgtcctaaaaacataaggtatcctcttgttgatcttctattatcgatgcagctggcccagtctgcatcactctatccctgaagacttaaatcagtagttggtttaagccataagtactctattaatgtgcctttgagatatctgagtaacctcttgcatgcttcccaatatttgacaattggagcacacagaaactaactgagcttgttagtgatgaaagcaacatcaggtcttgtgaggcttagatactgaagtacccctagtgtgctatcttcaaaaggatcaccatcaagtaagctcagtttagaaatagaacttgttgggtttgaacaactctttgcaccttccatatgcaatcttagaagtaagtcaattatgtacttgctttgactcaagtacatcccatttgcatctttgtatgtctccactcctaggaaataatgaactggtctcaaatcttgtaatataaactcattatgaaatcctgattgaccaaggatatatttggacttattattagaatatcatttacatacacaagtagatagatcaagttgtacctgctgtaatcatccaaaaagtgaacacgatacttgtagccttgttttgattgaacatgggaaggttcccataaatcagtgtgaataaggaccaaaggttgagtggcacatgtattggatgttggaaagggaagcgtgtgactctttccttgtcgacatgaagtacaaaattggaggtctttgttaggacttaattagtattatttttaagtagatttttaaagtttttttagtatgttttagttgtattttgtgcaattttac

SEQ ID NO: 382110 - DNA, 1052 bp, Cannabis indica
agattatcacactagactgttggtgaccgaggtaatgtaatgtgtaattctgaaaacaaagagcgtaaccaggatatttcagcaaccacacttgtcaagctccggtattcaacctctatacttgaacgagagatggtatgctgcttcttacattatcaggtgatgagattgggatcaagaaagattgcaaatccagaggttgatcgcctattatcaggatttgtgatccaatcagcatcacaaaagaattttagtccaagatcagagggtctttgtaagtgtaaacaaaactctaaagtgccactattgtatctcaaaatatgcttaacagcaagccagtcagcttgaagcgaattatgcataaattagaacactttgcttacatattagggaaattggtatatttctcattatccaataaaatgggaaaaagtggtatttatacaaagtggtaagaacctaaacaaagcccaaaataaaataaatccaatataagcctaatcctaatattacactaaataatttttttggcgtgagatactgtagaactcccacaatagatttgtagagatgcacatcctccacaggatcatagccaaaaactgagaggtgttgaccactagtcaaaggtgtagaattaggttttgctccctatatttttgctttgtaaagtaaatcctttgccatattagtttgagtgagaatcaagcctgttgaagtgtgttgaacttcaataccaaaaaagtaactaagatgaccaagatttttgagtgaaaactctttatgcagcttctgaataagagaagagatagcctgaggatcacttctagtgatgatgataatatcatccacatacatcagaataatgatggtcagggccggccctgggtctaggcggactaggcccgtgcctagggcccactccaacctagggcccaaaaccagccatataatgcctttaaaaaaaaaaggcccagcaacactttttcggcccagtccattctagcccaatacaccaccacccaccaaccaaccctccattcttcacgtgt

SEQ ID NO: 382111 - DNA, 2819 bp, Cannabis indica
atttttttttaaaaaaacaattgtctaacacaagtgaaaattttggtacaacctgataatagatggaaaaatgacattgttttcttcaatttcattccatttccttatgattagtgggtacattttgcagtctcaattacaaagaactaaaaaaaaaaacccgtcttttacagcatattccattttttttacaaatccaccatctaacataaatgcaaaataacccaattttctactctcaaagcatcatttcattataggagactacgagttattaaaaacaaaaatcatatgctacaaaaacgacataagcatagactatgcctcacataaaagaatattcatcaactatgactcacatcacagctatagaatgattttcaaattactagcatagactacagatatggctggtttgaaggcagtaatccaccgcctgcgtaatttggtggagcagcattatatgggcttggtaaaacatttccatcctggggataatagtataatctatgatcagtaggttgctgagcataagcagcctgactaggaacttggtaatcataggcgtgcaaatcagtacgaggatatcgttctggaattcctgcgtgcactgccctgttgctgtaatgaggaccctgtctaccagtagcaggagaaggacctggacgattatatcctcgaaatcttccaccggccttctgtttttttggctgttgccgtttaccatgctcactgcccctctttttcttatcagcttgggatctgtccagttggacaacccttttctgaagtggatcaagtgggtagtcagcttcaagtttatactcttggacacacctgattacagcctttagagcagcaagttcttgtgcatttacatcttcctgcttagagaatatttcatcagtattaaatcctacgaacaattttttttttcctgtcaaaccacactttgtacctgaccaccactggcattgcccgtgttttcacccttcccttgtgaatttctcctcaagtctttcaagtatgtcttgaggagaggcacaggaaggaagctttcagtaagttggaaggcatgaataaaacgtacggcatcaatctgtttcccactgttgaccaacaattcaataagacctgcacaagaaataagcttctgacattgtgattctaaaaaagagggttggaaatggtgcattttcacaaggataaaggactatccccaaatcagccagtaatctagcatcagtccttgcctctcaaaatttcaatatactaccagagcctaagccgaaacaatgcttcagcctccacatgctaatggtgtcagttaattaaaatagcaccaacctggcactttgtgtgttaacccaagagagcggcagagctcaggtgcttgcctgtgttgagcaactgcaagaacaagcttgcagagttcttcttcatcaaaatcagaagcaatcctaaaagtagcgaggagctgcaaaaacgcctctgcttccaatgatatcccattggcagcatcaatgctaccactagccaacttaggtttccactcatcagcaattgccttggcatgctgcttggtctcagggttcaaaaggtgatcagcacctgggtcagcccttgccaataaggcagccatggcttccagaaaaatacaacaagatttgcgcatgcccttaagggcagcaagactctcatcccccggtttgttagtttcatctggagggtaaaacccctccagtgaatccagcaccaaatgggctggctcatttgcagtttctagtgcaatagaaagttcttcacaaacaacatgaagtttattaagattctccatggtatatttcaatagcccttttgcatccatctgcttgcaaaattctacaagttttggatgtggcttaaaatctaaagctgcgtcttcagaattttcacccatattatgaggtaaatcatcaggacaagttgtgtcaccaagagagctacttaccttgctatttttgttatctccattgtcaactgactctgaaactgtatgttggtgatttaattgtgcttcagcaatgacagcaacagcagcatcttttagctcctgcactcgatccaacagatcttgctctttggcagtgacagctgcctctctatctacaatacttttatgggtttgagcttctttttctataaattccttctctttggattcaaattcttctagtttcattctcagcgttgtctcaagattgcgaaagtgctcctcaatttccatccactgaactctgttctcagaagcattcttgtgatcttccagctcatgcactgccttactaagctgttctatcagagagcaagaaccagcaacaacttgctctgtctcagccattgtaaacagcaaaaacaaactcgttgatagtcaataatgcacaacactatagggaagtatatatttcccacagtaaaaggcctggagttgaagatctacaagtgaaaatcctgcacagaccaaaacatgaacatatgaattaccaaaaatacattggaactgaacatgataatatttcatgttaagaatagaaacttgaaaaagaaacaagaaaacatgtttgagactttcaattagaaaatgagaatatttggtttgttcatttgaagacagcccgtagaaaatccactattctctaacgagcttgatattaaattcaaaccaggacagtgcctgcttatgaatgttgcttagtgaaagaaatgctgcaattagaattttaccggattaactacacagacaaattttctagcctcttttaacaataaagttacataac

SEQ ID NO: 382112 - DNA, 679 bp, Cannabis indica
ctaattgattttgggccaaatctaccaaaataaaagctgcaataatattgaatctttaagatacataaatgcgcttatgggatttctctttgcagaggttttattactatataaactatattcattttaaaaataaataaaaccaaaaacacagaaaatcacacatacatatgtatgtacaagaggtttccgctaagaggtcgagcttcagtatgtggcaaatgttcgacatatttgctcgacgaagctcttttattcttcccattgatggaatatgaatttgtacttggtgatcatattcttcttcgttgttttggctgaagtttctcaattcaatttgaattcgaatgtcccaaattaagattttgattaatttatttaggagtaaggattgctctaaggtaccaataaaataaagagacaaattttaccaatttctgaaaatggcagaacctcttgaattcgttgattactgattaggataaatctttacatcacactccatcaactcagtttttcgacggcattgtctcatgtagtgatcgattagggcaagaagaaggagatcaacattccctatttgaatttaaattcaaaaactgcctaatattgtaaatggtgaaacacgcaatatgcaaggaaacatgagaaaattaacttgtattgttttttttttttt

SEQ ID NO: 382113 - DNA, 2060 bp, Cannabis indica
ttttctttttccaaaatccatcatgtatgaaggagatcaccatggggaagctgaagtggaggaggaagacttggttgtggaggaagttgttgctccaagactgtattgaattcttctccttgggagatggatcgatactagaacaagttccagaattacaataatctccaaaagtatgagatgaaacgagagcttcagagtgttctaggtctgttctagaatatgctctttgttctcagagaaaggcctagccaatgcgctgaagggggctttggaatctggagttagggccatgtggagatgggagcgcatcttccaccaagatgctactttgtgaagttctgtgctgttgccgaagtggctcaattccaattcgttccacaagtatgtcatctacttgttggatggtttgttttgtgcaagctaaataaggtggtcgtccctactccagaggagattttgtatttctacaaaataaaagaccaaaatatgagaaaccacaaggagaaagtgggtttctacaggctgtagaagtaatccaaaagccttatttccctagttagttccgtgaagtacacttatgacatcatgggctattggttctacacctctggcttcccaataaaaatggtgctaactatcagtgtcgactttagtatcgcgagtaagtatattcatttactcaacttttcttttatttcttttcattttgggaacttatccaattctgtcctcgtattctttctagattccattcctcatcatctttaactctagaactagaggcgaggcaaagtttctaccaatctttaccagtaaaggagttacaagtgggggagctcgtgactaccaagactctcagagaggctgacctattgactccccatcagagtattgaatctttgacagtgaaagacccattcaaggatctccattatggggatccagccaaagttaaagaggctattgcagtagttaccgctgaagtaactttaaggatgtcaaggctgacctggcatggttggtagattggagccaaaagttcctaaaggttttgagcgaaggagaggaacttgaaatccaatttagagacattgtccggtacgaaggtactcttaaagcaattacattcaaacgttgtaagatgcccttccatctagttaatgctccattcttggcctacttaaatcatttcatccaaggcagatttgaccttgactttctgcgtatagatggtcataaatatccaatgattagatatatagatatcattaagatagactcctttcatgaaataatatatccaagattcttccactatggaagatttttagatagggaagacatcttctagttttctagagggaaccccccaatatgctagaataaacgggttggactgtatttttgtgtcatttcatctttcattgtttaatgcttctttgggattaacatttatatgctttattttgtagagagtccactcacattcgagatggatttggtagataaattcttgggcaccattgccaagaggtcagatgaaattagagagactgtcaggagtggtcgaggtaaaaggaaggttgtgcagccttttaatgttggagctggaagccgacacctccaaccaaaggccatgagggtattcctaaggctccaaccttataagctgctatttgtaaatgtgcaaaaagtcattcaatctaattacaaccaactgatccaatcctaaccgatccaatagaattggatatctaatcataattcgatcggatcggatataaatttggaaaatctaatcagatcggatcggttattggatgggacattcgatccaatggataactgaccaaaccaatccaattatcatccaatggtcctccaattatatttatatattttaaatacatttataatttatatattaatatattttattttaaatatatattaattaatttaatatacatttaatacatgagattaaagaaaaaaccttagatctaaaatattaattctcatcttcctaaatgctaataaaattatcaatgtgtatt

SEQ ID NO: 382114 - DNA, 1041 bp, Cannabis indica
tttttttcataataataataacatcaataataaatgtcttaatcttccatttttgtgggattaattttacatcataatattctactgctaacttaaacaatacatgttcttgttgttgttgttttagacttatctttttaggtatgaagaaattgatagtaggacacattttaagactaaatttatatatagcacaagtgaaatgatttgcatgttttaaggacataaagaatatattacacaaaagacccctccttatttggtgatataaattgggtcatatttgtttgtttttggtagtaatagttttttttttaagaaaaaaaaatgatatccaacccatatcttccttttgctttttggatacataataaggagttgtcaaaacgacataaatgaggtggtaaacgacaaaagagagggcagcacttttgagctgtccatgtccaacaaccaactctacaaaaggccccccaacaacattggtcacatttgggttggtcccatagccaaaaaggaattaggaaaacgacaaaatgtgtgtcaaagcaaagcttttattttattttggttttgttttgtattgtgttttttttcttttcctttttgtgtggtgaaatgtagagaatagataattgggaaagtcgtggcataacttatgaacacatatcacattatctctctttcttctctttctttttctctctctatatatatttatattatatgatgatgatgatgatgatgatgatgatggtgatgatgattccttgtcatgtgacaaaatacaagttgactatcaaaacacacaaaattatgttatgggctaggcctaagttgggttgggttgggttgggttggtttgggtccctttacttatttgccacacgtggttctttggtggctagaaaatgaccactttctccactaacctaaattctatatacattattattccttcttattatataaactattcactttcaatataaattaattcgttttcatgattatatatatttatatatatataagtttttt

SEQ ID NO: 382115 - DNA, 1422 bp, Cannabis indica
gtgtacctttggtcgggccctcataagctacatgtcccaccactcgcacgccccctcgctccttccctcgcacacacaccattataaaaagtgtacctgagtatacaaagtcaatttttacgggtaacggtgggacatgtcgcttgggaaagtaacaggaaacacgcttgcggggtgcgccagatgtcgctggctattagaaaacagacgtacctgcaaacatgtagaacaaatgataagcatgcaccacttgttttctattccccacaaacctcttgcatgcttgggtcttgatcctaagtacccctcgaagtgggggcgatggaggaatatggctgttcctcacacataggaggttcagcagccctagagcatggcggggtatcaagcgtgggaggaagggtgcccttaaggaaatccaaatgaacttgagattctataagagaaactttaagtcttgaaatgtatacactagggtcaacgaaaaggtcatgtctctctcctttcaaaactaagagattttttgcctgaatcctctcgatgcgctctcgacaggcaatgatgtgttcaaaatggttagccctcccagacattaatctagcatatctagagaacgggctatgtgaagatcttccaaattagtggacgagatgtcaatgattttggctgtaagggacattgctctaagtaactgacattggacgtgacccaagatgaaatggatcaaagaagacgtgctgccttgatagctccacctaagaggtaaaaccaaggtgttaagcttactaggatgcgcataccaaaaggaatgtaaacaatgaaacaagtaccacaagtttaacactcagattacgactactagaagcctaggctcatggaatgaaagtaacaaaattaaaaaaaaaacataaggggaggcgatgtacctctatgggcaaggagagcgagcggaggagagatgggtcgctgcaagataggaaagacgtctgaccactaaagacaaagcaagaacgatggagcctcaccctatagcaaaagcaaagaaaagtacccatgtaaaaataataaaagtaaagagtatgagaagaaacctggagaaggatcgaacttaaaagctcttagacaaaaagaaggaggattgccactatgccaaagagatggtgtgaagtgataactcaagtgtaacgtccctgcttcaagcctccattgagcccttacacccacagaatgaatggctcttatacacgagtacgacactctggctacttcctggattgatgactgaccctatagatcaacacgagtgtttccagcgtgctttgtcctcactcgcatgctccctgggaaaaattcccaggagatcacccatcctgaaattgctccaagccaagcacgcttaactgtggagttctttcgtgatgg

SEQ ID NO: 382116 - DNA, 1399 bp, Cannabis indica
ttgtaatgttgtttttagcattgccaaacaaagttactctatttaatgtttatgtatttttggcatagagttgttgttcggcatatgtttgttgaggatatgtatagttagagaaaagttgtcgactttatttgtttataagcttaatattgagttgttgtaattggttttgtaaattttaaaaaaataatacttattggtttaatttcatttcagaacaggagatgaaaagtattattgtacttcaacatggaggacaatgagatcagcatttttacaaattaaacaaagctatctatggcttaaaataggtcccctgagcatagttttacacccttatatctactctagtttagtgggggttcatcaattacacatttgatgcaagcctattttttaataagaaagatggtaagcttctccagttaattgtctatgtggatgatatcctgataacaggggaaagtcaagatcaaatttaaagtatcaacactgctcttcacaaatttttttctctaaagatgctttgctctattcactattttcttgggtttgaggttcttcgacattcaaatactatatacttgaatccaagcaagcacattcatgatttattggtcaggaaaaatatgcttgatgccaaacctcaaccagcaccaatgtgtgctaatgcaaagttatctctgtcttcatgaacccttcttgtagatccaaagtaatatcaaagtgtcattgttgcattttaatacttaatcatgataggacgtgacactgtatttgttgttattaaacagagccaatatcttcaagctccaacaattgatcactggggtacctgtaagagaatattaaggtactttgttgttaaccccaaaaatcggcatctttaatttttaagattattttcctaagggaagaaagatccacaaaactgtgccaagtcagaatacatacccgaggcttatttcttaaaaatggtactccaaatgtcatggtgcatccgcaccgtcatgagaattaccttggggagtttcacgaagatagtgcaggagtggtgagtggggggccatgggctcgcatgcgagccgtgtgtgtggggggacgggtgtgtgtgtgagggaagggggcgtgcgagtggggggctcgcgtgcgtggccatagtgtacttgagtatccaaagtcaactttgtttagtgtcaagtgattctcgattgcaggcgtgtggtccccagctacaggagggtgatcttgagctgtaggtttgtggtcctgagttgaaagtgtgtggtcttgagttgcagatgcgtggtccccagctgcagacacgtggttctgagctgcaggtgcatggtctccaattgcaggttcgggggtccccacctgcaagccttaggtgagt

SEQ ID NO: 382117 - DNA, 1275 bp, Cannabis indica
aggacgttggcttttgaactacctagcgtgggggatgatttatgagtactcttattgcataggcttgaaataacagcctcaactttcacaacatggtaagcaagcaaaatgttaacttctcaatcatgggatacctggattctgcacctagtaatctttttcttacgtaataaactgggtattgcactttttcttcctctcgcatgagtgcagaaccaatagcgtgatcagacattgccaaatacagatacaaatcctccccttccacaagctttgataaaattagagattggatcaattatccttcaacttctacaaagaagtctccactcctcgatccacacaaacttcttgttgcctagcaacacatttaaaaatggtagacacttatctgtggatttggaaatgaatcgactcaatgcagctatctatccggtaacactttgaacatccttatttttcttgggacaaggcatgtcagtaaaggctttgatattatctgggtctgcttcgatttcttgggagctaataatgtactctagaaacttctcgaaagagactctctgatggtacatttttttgggatttagcttcatctcatacttctttattaccagaaaggcttcctcaatatcttggccatgctcttcagaggtcttggatttcactagcatatcatctacgtacacctccatatttcaccctaattgatttttgaaaattcggttgaccatccattggtatgtagctcccgcattctttagtccaaacgacatcaccttatagtagtaaacacccttattggtttggaagctggtatgttcctcatctgtgatgtgaatcttgatttaattgtacccagaataggcatccgtgaaagtgagaaacttgtacccagacgtggcacgtattgtttgatctaactgcgaaagcggaaagcaatcttttgggcaggccttgttcaagtcagtaaagtctatacacatcttccacgagtgattaggtttcggaaccaatattagatgtgcaagccatactgagtataatgattctcattggaggtcaacttgtccacttccgtttttaccacctcagccctaaccagatctaaaggtctccttttttggcaaacaggggttgcatcttctcggatattcaacgcgtgaaaaattgtattacaattaaaccctttcatgtcagaatggctccaagctattgttggattatttattttaccaggatcttagatctactcacaagtatgttgtttaaaca

SEQ ID NO: 382118 - DNA, 1348 bp, Cannabis indica
cgaaaaacacaaacgtttataatttaaaattagtaaacgcattgatcacttaaaaatataagaataatttacattcatagttcataaaagtacatcaacacgtgttatgaaaaaataaacaagaccacatcaatacgaaaaagaagctctagggtttgaaagtattaacattacaatcttggtctaattcaaaagtacactacacacgagcataaggtttgagcaggcatgtaactatggacaattggacatgtcaggctcccattgtaggttcgattatttgattaggctaataagtttcagtaatttcaaaaaaaaaaaattatttatgatttgactttctgatacaatgttgattaatttttttttttgatgtttatgtagagtattagagtctctatatgagtgccacttttgccttttgcctttactgttaggggcatatttgttttcgatatttaggaaaattattaattaattttatgatgggtctaaagtgtagttatatttggccttctactagttttcaattttatcaggaataatttacgatgctgaaaatagagtttaaaatagtccattgcacgtgtagaaaaaaacaggcgcaagtgcaactgaattttttatttctttttaaaaccttggttccaacactgtaaaaattattcaaaaattagtgaaagcctgtcattactatagaaaaagttaaaagtataatttctccaaatgtcaaaattataatttttcctgtagtataggcaaaagtggtgcccttattatttaattttctataaatatattagaactttttaggtgggaaatcacttttacctctgttgtagggtcattttttgttttcggtacttgagaaaatttattacacaattattttttataatagtgtgtagattatagttttagcaggaatgtcactagtttttttaaaagttatgtataatttacattgtcaaaaacataatttaaaattgtagagaatggtgaatagaattgtatgttatatttcatagaataatatatattttacataaagttaggaggttaaatgagaaactactaaatacaaataagaaactactaaatacaatttaacctaatttgtataattaatatacaactaatattctaacactccccctcaagctggagcatagatattaattatgcttagcttgttacagagataatcaacccgcaccccattcaaagtctttgtaaaaatctcctaattgttcttaggttttcacatatcctgtgaagataaggtcttgttgaattttctcataaaccaaaatgacaatcaatttcaatgtggttagttcgctcgttg

SEQ ID NO: 382119 - DNA, 2232 bp, Cannabis indica
aaagaaaaaaaaaaaaccaaagagtaataatacatgtgcacctaaaatatgatttaagatcttcagttaaaaagtaatcacatttatttaaacttcaaccttacgttattttaataaaaaacagtatattttaatacatatattttacatatatactcaccgcatggtgaccttttttaaaaattaaaacattgatgcatggctactatactaataacattatatgatatgttgggttactttttatatatgcgcatgcagtgtttgtgaatggaaaattttgcaagaacccaaagctggcgaatgcagatgatttcttcttagcagggctgaacattcctgggaatactaacaatccagttgggtcaagtgtgaatgctgtggacgtgaccaaaattccaggactcaacactcttggaatatctttcgttcgtattgactacgcaccgtacggccaaaatgcacctcatactcatccacgtggcacagaaattcttactgtggttgagggaacactttatgtgggttttgttacgtccaaccaagatggaaacagacttattagtaaggttctaaacaagggagatgtgtttgttttcccaattggattgattcattttcaggccaatataggacacattccagctgtggcatttgctgcacttagtagccaaaacgctggaactattaccattgctaacgccgtgtttggatcaaccccacctattaatcctgatgttcttgcacaggccttcaaattggaaaagaatattgttgaatatcttcagaaacagttctgatcatcgatcatccatattactacaattaattaatgttttaaattaaatatatatattatcgtcacttcttagttttcaatgtgataaataaaaatggtcatcatcatatgtgcgtgtgtgatgatctcatcatatatttcaattacgtactctttaatttgtgttattatgggaataaagtatattctgtttgaaaagtttgcttaaatttatatttatgggtcattttggtacactcaaagaaatacaatgttacattgtattttataatattatattaaattatatatagtatatgattcattattcaatagttactttttattgtaacaattacattttttattcacctataataacaaattaaataggtataaatttgttttataaaattaaataaggggtttttttattcagttttaacaaaaaaaaatagcattacaaaaatacttataatgagctaaataaacaaatatataacccaaataaaataaaattacacaaataccacttacgcataccttcaacccaggaaccatgcttccttgtcaaccatcctgtaaccacgcagtaatccaagtaatcaaaacgaaaattcaacctaaaagtgaaccaccattaatttcggcgacttcacctgagaagaccatcaagatcaatccaaaaaggggttgttttgaactaataaaaaaatgtagaaaaactactacgaaaataaaatttagtcgaaaatctaatttaatttccataaaataatgtcttgacttcaattttcagatccatgaaatgcatatcccaaaaagttgaactggagctcccaaaaaatccaactcaagtataatccgtaaaaaaaattcagcaaatactatagtaaaatatttatcctggtgtattctcgttatttttcaaattaatggtaaatttcactactacaaacatggtttttcccgacggttttcaatagtcgtttaaagtattcccgttagtttctataactgtcacctataccaacgtcgcaaaatgagcaaaataggcgacgattaaaaaccatcgctaatgtggactcgacggttcaaaaccgtcgccaataacagggtataggggacggttttaaaccatgccctatactataggcgacggtttaaaccgtgccttgtattttccctattttttcctgcattagttttaaaattttacactactacaaacacaagtctttagcttcccttttttgaacccattttataaaaagggaagctaaagggtatgaaaatacccgctattgataatttacctttagaggcggcttttttataaaaaccgtaggtataaaactggagtataccatttagaggtggtgtggaatcaaacgacatagggtttgatagtttaaccctatgtcgtcggttgttatagaataaccgacgacata

SEQ ID NO: 382120 - DNA, 2027 bp, Cannabis indica
tagcttcagagctctaactgacacgatcattgcacttcaaggactgaagttagctgtgagactgtagcgttcagagctattatgtgaagctgaatccttctctgcaatgactgagttgtgctgggtgaaagtgattggactagccccagagctcctgaaagaaccataatcatcctcagcaatgactgaattcaacaattcatccccacatagatatgatctgacagagttccatcttctcttttccatcatattgtttctgattccctgttaggatcacacagattaactcaaaggaaattcatttaaaatgagatgtacaagtgcatattacgatttaagaaaacatttccattacaattactagtagagagaagaacatcatcctattgagattgagaaactcacagtggcatcatgagtcccagaagcccggttttttgtgaagacgttcctaaccagccccctagtgatacccatctattgttggcaagttttctcaaacagtttgtctacaaatactattactactattaaatgtctatctatggtgaaagaccatctggtttagtagttgagattccctaaattatttaatggcaaaaagttggaatactgaaatgacctcctcactcaactggaactaaacaacaaactaagctttgggtcctaatacaactttaatgagcaagagaagatcattaatatatttcaatgtgagaaaaagccacttataaactagtgttaaataacaagatttgcaaggctttagagctgtacatgcactttttgatcacataagtattagattagataggaaagatggggtttaagtgtcttttctctttctctttctctttggtgtagtacactttttgcacatggctatcagtgaattggcctcataaagtttgcttggtattggggtcatgtctattcctttctggttattgttgctagagtacttgcccttatgtaattctttctaatgggttagtttcttgagcatgacaaagaaagacacatgctaataaacctttaaaggtctgtttggataaccataacccagtgagtcagtgacaaaagtcatactcatactgcttaataaaagaaagttcttgaatttgtaccctacaatacaatgctcattaattaatcttttctcctttcccaaaagtgggttatgtttagatatttatttcattcaacaaactcacaaaagtgagttatgtttaattttcttattatgttttgttatatgaggtatacaatgtgggtgtgctataccaattacaaagtaccaagataatttcagaatgtactactaatttttacctcttgatgataatttgaaacacccatttgttatattagatccaaatttgagccactcgtttaagtaatgataaattgggacaaaaattgtttattgtattatagtttaataaaagggtagggtggcacgtgctatgaagtagaaatgaaagttataaagttttaaactgcatttggggataagaaggcttttagaaatgaaagaacaatgtaaatggactacatcatttttctaaaagtggtccttagctatcacaattttgattggctatcatgttcaagcacaaaaattaataattgaggagaaaaatttatgatgggttttgagaccaattatgaaactatctctgcttacaattatggaatcctctcatgcttatctgtctcttttctcctttgtagttagcaaaggaggcaatggagctttaaccgatcatagagtaacttattattttattattattattagagcaaggaacaataagtgcttcacgttgttgattaaacttctgggcaagccgccgaccaattgagcacactcaactcaaagatggctctactccactttctttaaacaaaagtaccaacgactatatttatatttacgtttatttatttatttttttcaaaaaggaatattattactgattttttttttctaagtgtaaagtccttttttggcaagttaggtg

SEQ ID NO: 382121 - DNA, 3147 bp, Cannabis indica
ttttataattaaattttttttaaaaaaaaaatttagttaaaaaaatgaataaatatctatatagagaatcctagaaaatttcaatacaaaaaaaaaacgcaaagatatcttcaaaataattgttatcaccgtagcttacttatactcactatcatatttaaaatttatgtaatcaccatatctcacttgtagtcattattaatattctttagagtagattagctaagtacataaaataaatcaaataataaaataaatcaaacaatgattgataaatattcacttttatacataaataaattattctattataaattaattaagtgaataattagttatcatatatgcagttatatagtttatttatttttaatttttaattaaagatctctaattaaataaagtaaaataaaagaaattaactaattaacgatctctaattaaataaattagaatagaaaaatagaaaaaatataaataaaaattaaggagaagatttaaaaaagaataaaaaaattagaaaaagaaaagaaaacattgaggagagaatatataaaaagaatttgaaacaattttacactactatgtcactcctttatacaataactttataccgactcctccaatcgtatgtaaacaatgtattattttatttatctaggaatattttattttccatgcttagacaaaaaaataaatacctaaactaaagtttgtcatcttgtaccttccttctccgccttatatttttctttcaaagcatcctaaatcttcttcgctgatttggtattggtgtagagatcatatagcctatcgaacaaggccttgagaatatgacctctacataagaaattgttctcttctctcttccttatgttctccacaatctcagagtgcctttctcagttggagcgggcaagggctctaaagtagactcaagaatattgacaatcttaagtgtggtcaagagaaaccttaccttgtcttaccacctagtaaagttggattcatcaaatgtatccaactttactaggtcttgattcattatcttgatggtctcaccttcaattgaagctaggtacaaagaataagtttttgattgttagaaaaatgtgctccaatagaaatataaaccaacataattactacttaagacaaaatataatgaccaaaataaggaattaaattatggtataattcttgacaaaatatacacataaaatatagaatatggagataaaaagaggaagtaaaactcaaacttttttaaaaaataatacttagtagtgtatatatatatatatatatatatagatatgagaataatctgaataccacaaatgccaagtgactagtagggaaatcattaaacttgaacagggttttttactttgtccaaaagcttatttctcctaccacaagcacttagggaagaaaaaagatggaaataactttctaaatttatcaagtctatataatttctagcaagatgctccctttgatagtaaatcactatctttacaaaataaatcttttaagtccctatatagtgtttgagaaccaagattaaatctctgtaatggaggcgaaaaatgttaaaattaagtcttgaaacatcctattaaagaggtaaatggtttacaatgtttatacaaaaataggctccatgcgacgtatcgcctggtaccaagcaacatgtcgcttggagcaaaatatttgatcttgcataaaaacgtcgaaaaacctcaaatccctctcatttaagtttcaaaagacatgtcaccccataccaagtgagatgtcacatgtagtgtttttttagtaaaaatcttaaataagttttgtaactcctctccaagccaaatctctcccaaacattccaatacatatttgaatgaaataaatgagttacaaatcagtttctaacaactagaaacttatctcattgattttataatctccacgtgcagttacactcttaattatatattaccaaacattatttatgttaaaatttatttcaaatttgtaacttctcttatgttataaaaatgtacgttttttttttcttttcgacagaacaaaaatgtgtgtttaattatagtatatctcatttaatataacctatatataatatgtaacatgtcacacattatatctcatataatataattttatatcaatatgtaacatgtcacattttattttaattagtctatattatattatatgttaaacaaataatataacaatcaagtcaatacaaaataattcgaacttacagattgctgaatttaggtgtttcttttacaagtttcaatattatctttattgtaactataaaaaatcaggaaaataactaaaataactaatcaagaatcaagttgttgtatcagttagttaaagtgtctagttttacaatatctgttgtaactttcagttgtaaggtctctcaccattatcacacatataaatttcaaggtctattctcagctgaatcacttgagcatttcattttcacttcactttcctttcttcttgctctctctgttttctgctcaagtactctgttcttcaatgtttttatagtcttctaatatatattatcattaattattgtttactgtttcttatggtaaaatataattgtttttttgtatatatacaattaaatcttgtgctaaatattaaatttatccattattttatactaaattcagtccaatatttaaatcatggatggtaacatatctcatttgaccttgtattttaaaaagtttcaatagtattaaccatatctgtatacatattatatagtcattatcataataaagaataatatagtcgcatccaacccagccacataattttcaaacaccttacgttaaaaataaataaggaacctgatcatttttttttttttttttttttttttttttttttttagtgacaaagtgattagaatcactcatgaatttacgacgcccatgtccacgtccgccaccgacgctggagcctcctcgaaccaagatagctcatcgtctaaccgtagagcatgctttgccaagccatgggtcgctaaatctcagagcgagccacatgggacaaaactgttctcggaaatttagacaataaagctataacatc

SEQ ID NO: 382122 - DNA, 4839 bp, Cannabis indica
  modified_base (82)..(82): a, c, t, g, unknown or other
tccaagtttttgacagttatttgtcatcatgaggctctatctttgtattttgagcgaggtacgataaagatgaactactaanagtcatttgtgtaaacaagcatatttatcctgtctttcacatgaaatgaactccgtagatgaatatgtcttgtcataatctgaaatatcactactgctaattaattatacacaattaattgagtgtcaataagttctaaagaagaatcgacaatgatatcaattgataattatatactaaagttctacacaaatcaagaggctcctttcaggaatatcaatggactcacttttagcaattaatgaaacaccaataacatcaggagtttgttccttttgcttctcatcacactgttgtataccatttcctgatgaagcttccaaactaatctaaaatacacaaattagaatcaattttaataacaaatgctaaccatcgcccaaatttctgccaaaaagtatactaaattcaaaacaaacaaaacaagaaagaaactgatgtaattctatatgcaggaaaattacccaaaagcatgaggcagagaatttaccattaatactttgaaaaaaaaaaaatcagattgataaaatttaagctcggagaggaagtaaacttcatactattacatctcttaattagtaaataatggaattgaagggttatcagataaggaaatttaatgcatggtgtacacttgatgataaaagttgccatgaatacccaaaacataaaaagaacaaaagggggacaaatttctttaatatcccaggatgtattaactagtaaatatcaccatttttagagacttagagacaaaagcaacactaatgaacattttcatttagaaaatgctgtcgtgaaaatcaatatgattcttcaatgtgtttagctgtaaactaaaacaatgaccacaggttcagataatgtataaaaaaattattaaactatgtgcatttaaatgaataaattacctcaagtgctggttttgtcattcgcaacagtttcctgcaaaataatgcgggaaaaaaaatatttttaaatacgaaatgtaaatattattgacgaaaaaggaaaatctaactacagaaaaacccattgcagtagagcatctcaaccccttaataattcaagaaataaacaaaccttcacaattgagagtacccacaaaggcacccaaaacataaattgtcctaaacagagcacatatctccttcaaaatttggaaattcttttatttctttccaaagcacacatacaactcatttccataaataacaacaatagcattaataattataatttcttttcattcccccactaaaagactaaataggagaataaggtttttttttatgtacaaataaactataatttccttctcctactaaaacttaaataacaacaatagcattaataattataatttcttttcattcccccactaaaagaataaataggaaaataaggcttttttatgtacaaataaactataatttccttctccaactaaaacttataaattataacaaaatagggagcaatcctggtaggaaagcatttgtttctcaaatatttgctaagacaatcacatacttggccataagagtaatgacacaataaacaaatagcaccttgaaagcagcatcctttgcctctctttcaacacaatgtggtctaaacaatcatcatcaatgagatcggagatctcacttttcacctgaacaggaggtaaatcagcaacagaggagtttcgtaaacaacctcccattgagtgcaacatgttgtcagaatttcccatgtgtgctgctactgcaggaacatctgaaagtgctgaaattgccggatagcaactgacattggcagcaagcttccctacttcagcaacatcaccattagatactgtacattttatttgctccagactatcattgaaacaatctccagagattcctgcatctaaaatacaatttccattttctgaacaaggatcaagtacagatttttccacaactctatggcttgatactttacaatgaacttgctcacactctttattttgtttttttgcaaaaactgcaagtactatttgtctgggagaccaagcagatgtaggaagaacatcctacaaaaaattacaaattccactaataagaaagcaaaaacaacaattacaactaattccatacatttgaaacctgtaatagtgattatattgctttcttgcttaaatatttttattttcccactacaaaaacaagcgctaatagccaattagtgatttcataattctttgctttgttgtcgcaataacctttacacttataactaagcatatatgtcttcagcaccactcaacaaatcaattttgatgataataacagatatttagtacataacatttcagcagagagcataattgacagacaaaatatgataggataaaaacatgagacctcacttttcaccttaattgttgggacatcagcagaagaagagttttgtatacaacctcccattgagtgcaacaagttgcaagaacttcccgagtgtgctactgcaggaacttctgaaagagttgaaattgccggaaaactgctaatatgggattcaacctttacttgaggaacatcaccattagaaactgtacattttatttgctctgaattctcaatcaaacaatctcgggaagttccaacttcttgaatagaattttcaatttctaaagtaggaacaagtacagaattttccacaactctattgcatgatactttacaatgaacttgctcacaatctttaacagcatgattttgatgttgagcaaaatattcatgcactacttgtttgggaggcaatgcagatgtaggaagaacgtcctacaaaaagtataaattccattaacaaagaaggcagagacagcaagaaacaactattacaaaatcttttttgtagtgattttttataatgctttcctgcataaatattagatttcctcaatttaggaacaagcattaatggccaattagtgattccataattttttactttgtagttaaaaaaaacgtttacatgtatataactacagaaatatatgcagagccacacagaaaattaatcttgaggcaaattgcaaaattattagtacataaaatttcagtagagcacagccaatggacaaaagcataaatagttttcttcctaatcattaatatttcatgaaaatgtgaaacataaattttattacttacaaaaaattattttcttccgaaattcaaaaggaatttaatttctctttcaaaatgtttaaaacaatgcttcctagcaataaaaccaaaaaatttatcaaacaggtgtactaacataactttcatcaactttcattaaaaattaaatataagaattataagaaaaatacatatatgtatactatttagagaggtcatgaagaagtctactacacaggaaaagtttttactgccaagaagcttaacagaccagtaattccccaacgaaactatcacaaagatttcaaatcaaagtatgtgacacatacaaaaatctgacaccattaatcagttcttacacaaattgggtttttctggtttggttccagtacaaggttcagtttattcttttaaattatttgtaatccaacttctgcaaatcaaataaagaaaatggagcatttactctttctagcagataatcacattttggttgaaacatgatcaattgcctgagaagaccttgagacagactaaatcttcaaaacagaactgcagaatttttttatataacaaattttaagaggatcacaagactagaagagagagacagagactattagtagtaaagaaacatcacagtagacaaaaagcacagaagacaattatataagtaattaaaaaaactcaattgcttaaaaatttgaaaacactaagcctagaccctttaattatccacccacaaaaccacccaaaacatgatatttttacccccaaattggatcaatatgaaatttctctacctcgtcaaaaaaattatctacacctatctagcaataatgttgaacaaaacactaaaatttgcccaaatctcactttatttattttacgtagcacttttacattacaccatctctatatttttctttatttacttaaatattatatttttaatacaatcccttttatgtatttataaaatgagctaaagtcaccaaagtgggctaaaaatatattaaaaaaagatgtttaccacccttctctctccttagaggtatgtggtgatggcatgagctaaaatagctcaaaggtaaaaataatatacatatcccatttagctactctcataaatgcttttttttttatcacttttagctataatttgagcaagatagctattttacattcactgatgaaagtgatatcattcaagatttagcttttgctttttccttttcttttttttttaatgaagatccaagatttagcattagtactctaaaaattgaccgagaaaattcaatgaagaaataactgatcagaagccacaattttttcttgaataaaatgtaatgacttagtgaacgcataactaaagtctccttccattagaattgatctttgaaagaagaagttatcgagtacacctatcataattttggttggacgagagattttccaattaaaagaatattatgaaaagtagataaatgaatataacaaacaaaaataaaaggctctgatcccatttttcaagactatttatgtcaggttctgcgatttaaattgcacaaaaaagaattcagatatcacttt

SEQ ID NO: 382123 - DNA, 1021 bp, Cannabis indica
gtactaattaaaatatttgttgtactatttatgttttaaagtattttcattgcactaatatacaatgaggcaattgtttaatttacaataaaccaataaattatcacacctatacaagttaaaaatagagaccattttaacgaaacataaaattttggtaagcatacatttacatttttgtatctctccatgcattttaaatatgctaagcttttagtaatttcataaaaggttaaacaaacaactaaatctaaaaacactcactaagatctaatagaataaatgaaatgaggagtgaagtgaaggagtaataaatgagtgattagagaatagaaaaagacgaaacccaagaaagaacaataaatgcagagagagagaaactgatggaaaagcaaatcgatgagaagacaaatatgaacggcaaaaaaaacaaaaggaaggacaagatcaaaacgacaccattaaggcgagaagttttttaattgagagtacatttttgtggcaaaactattttgtttggcttaattagagaaaaaatttaggtaaatacatttttaaatgttagttttatgtgaaatgttcaaatggtcaaatcaattacatgagtaaatacatgaactttaccaaattagtctttctttcactacgaaaagaaaaaggaaaaaaaagactacaagaaatagacatgaatacatctgattggaggtgtggaaaacatatatgaaaagaagagaatctacgacaaaaatgagtaaactggtcctacatattacttcactgaaatcatcattatatagtgaattacgaaaaggtcttattatttagtggtgcacaacattatatgtataatcacgataccatccaatatattaatataaaaattattagtattggacaacttaatgtctcccaatacgacataaggatatattagcacaattcaacttatccaatatatttcaatttaataaatcacataataaatatatatatatatatatatatttttttttctattttt

SEQ ID NO: 382124 - DNA, 1859 bp, Cannabis indica
gtcctgctcaaagcaatcaagcttccactggcaacaatggtgtcggaggtcaaactgctggtgtgcaaagtcaggttactcagtcacagactccaaacgtgctcatacctcaggtagggagtaccttaactcaaccttttgctttaaagcttgatcgaaacaattattcctggaaaactatggtttctgccatagttcgtggccatcgtttagatggatatctcactggtgtaagaagcaaaccagatgagtttttaccaactgaaacagatgcaggtgctgttagtcccactgtgaatccagcttttgaagcatggatagttcatgatcagttattgcttggatggctctatggatcgatgaccgaagggattgcaacagaggtcatgggatgcgattcctctgctgctttatggactgctctcgagaacttgtttggatctcattctaaggctaaaatggatgagtatcgtaccaagatccaaacagttcgaaaggggagtatgactatggtggactacctcaaacaaaaacgccaatgggcagatgtgttagccttggccggagatccttatccagaaaaattactggtttcaaatgctctttctggtttggatattgagtacttacctattgttttgatgacagaagctagaccttcaacatcttggcaggagctgcaggacattttgttgagtttcgatagcaaggtcgagcgactaagtgctatctcagggacaaacaaaaaccctgttggaactccaacaccatctccctcagccaatctcgccacaactcgaccctctggttttcaaggtggaagaggctcgaaccacactcctactggacctaataatcgtggcaactacagaggtggtggacaaggaggcaccagaggcagaggtcgtggtggtagaagtgcaggaaattcaaaaccgacatgtcaagtttgtggccgttacggtcactctgctgcctattgctataataggtatgatgagacattcatgggctctccaccacaaggcactggacctcagaactcaaacaaaaatactcaaggtgctgctgcctttgttgctactccggagatggtgaatgatgcagcatggtatgccgatagtggagcaacaaatcacattacatctgatgctggaaaaatgatgcagaagtctgaatatcatggtaaggaaagtcttactgttggaaatggaaataaaattcctatctgtcatgttggaacaagtactctatactctgataacagtaatttacttctaaatgatgttattcatgctccaaaaataaccaaagatttgatcagtatatccaaactgacccgagacaataatgtctctgttgaattttttccttcttattgtgttgtgaaggacgtgataaccaggagggctcttcttcaagggagacttaaagaaggtttataccagctggagtgtcaacaccatcaccaaaatttcccacagttacaacaacaacatccatcatctgtcaaagcttttctgttttctggtttagtgtcaaaatcaaaggagagacagcctgttgctgatcctcccccgtcctcaattaaagataagtggcataggagacttggtcacccgtctagtagagtcttacaaaatgtgttgagtcatattgatgtaaagacttctatgaatgagaaagaatccttttgtgaagcttgtcagtttggaaaatcacatgcattaccttattccttgagtaacagtagagcacaacacccacttgatctcatccacacagatgtgtggggacccgcacctgtgatgtctaacacaaattttcaattctacattcattttgtggatgactatagc

SEQ ID NO: 382125 - DNA, 3677 bp, Cannabis indica
ggaaacatagaattcacaaataaacagctaattttatactacatagtttaacagaatgaatgaagagatgaaacatcttatatttctaaagacacctacacatgagataaagactttcccttgtgatataagaaaatataaaataattgcagaagaaacttcaagaaaatgaagttataactctacctaaacaaaacatccatcagctcctcctttgaaagggcactcaaatctttcttaacctcttcataatctgtacccgtgttctctgccccttttgttttaaactggactttttggtggtttttcctttaactgatatctcctgtacaaattgaatatgtggaatacaacaatctataatgtcaatctttaatcatatcacaagaaaagaaaatcagaaaaataatggcctgctgacatcaatatagtattgtgctattccatactcacctctaaagttaattctctatcactgtcatcttcacttgaatcttcaacgccaaagtctgccatagacatagattttgcattttctttctgcagccttatcacctctgcctcctcctcagcaggggactcatcatcacttgatcgtatctaaaaaaaaaaatgaaagaataataacatttaaaaggcattgccatatcactagggaataaaattatgtgtaagaatgtaattatgcattttacataataataacccaagcaacaaagaaaattatacacagaacactcctgacaaaatcataagagtgactgctggaataaaaatcctcacctcaaaatcaacgttatcagcatcataatatatgtcctttcttcccccccacactgccttttgttcatcatcttcatcctcatcatcaccatgcatatcatcctcaacaccaccaaacttttctcgcaagtacttttgctgcttagccactacaggtaatagaaataatagtaacctatgagtactgtgattgcagaaaatggtgaccccctttcaactagtaataatcaataaatgcagtacataaatattctaaattagaaaatatgtgcactgtctacattaaataatgaaatgttctagattattgaaaatattgccaatcatgcctatcaagaaactttacaccatttcccattatctcatttttctagacttttaaacacaaacagtcctatataatttattcaatattcagcctatgtatgatttgagagaaagcaactggaggttaaaaaaaaagcatattctcactttttgcagcaaaaccagtatccttgatgtcgtcttcatcttcatcttcatcactttcatccttgtctacatcaccatcctgtcccacaatgtcaattacatttaaggcataatcatcttaagatattcaggaagaatagataccagcttaaaaacgaggaatatagagacataaattaaattcattataaatcccatatataaaaatatgagccatagaaataagaggtattattaacctcaaaatcaaagacaggtagttcctcatcatcatctgaatcttccatatctttgttcacatccaacgaaaccaaatccctctgcttgtgaacttcaaacacaaaatataaaaacacaatcactttctccacttaaaccaaaaacaaatagaagaagaaagaagaatgaacatacaggcatcaatttcgtcatccatgtcttcattaacgattttgtctttgttatggactttcttttttgggaatctatcccctttcacctgactctttcctctctttcccattattcctcaataaagaaagcttgagtaagaattatacttcctttatcttcggtacttgtctggaattgtccaaccaacagcaatttagtttttgggcaccattcacaaattacttatgaataaattaagaaatcatattaaatatatttttgtaagagaaaaaactaaatatttatctattcattacagtccataatgacatgtaagatcataattcagtcccaaaatcaaatatataaaatccatacactgttgtcaataaacaataaactaaacgtggtgcagtttcttccttgttaagatcatacatgttcttaataaggtcttttatggtacttgagttacccaaaacagtacatgaacaaatcacattttgcaagtgatatataaacacccacacaagtcattaaacattcaaacaaatacaacaaagaatcattttttttcttcttacaatctttaataagttataagtatattaagttagcatcatcaataggtataagaatcagtattcggtattcagtgctatgaatacaaactattcattccatagaatcaccatatcccttctgcgagccaagttataagaataagtatggcataaaaaataaactcatttaggctgagaaatacctacgacaagctactcaaaatacggcggagcctgtggacagtaatggcggaagatggcgtcgttgtggtggtcgtccgtttgggtcaccggtggtcggtggctaagagcgaagacggcgggttcgctagagagaacggtggtggcggcttcaagtgatgaatgaaaggaaggagtgtgtgaactaatattagagagtgatattgttaggttgggttgggcccataaaatacaataggcccaaagaaagaagtggttatttcacgtggaaattgcatgctatacttttttttgtgttaacccatttcatttttatctttttttttctatatatttaatttataccatcttttatttgttatatcctgattatacttatgtaataaaaaaaaccttcctcacctccctgagcagttggcttatgtgagggtataatcggtaatagacttaaaaaagatacatttcaattgaacttaaaataaaactatttttagttaactgatgaaaaaaaagatatatttcaacttaacccttattttaaaaatacacaaaaacaataaaaaaattataaaaatactgcccataaaatttaattattgttaatttgttgtttattttttattattatttgtatgttatttcttattgttattttaatattgtttggatgttatatttctattagttttatatatttatcgtgttatttttatagaatactgtaaaagtgtaaaaaaatatcttccaacgttaaaatgtaaaaatatttacaaaaaaaaagtaatttatgtaattatcccataggggatattaataaataatatgtagttgatgccatttcgaacatgtattttgcacacgttagtgattggaccatttattttgttaagtaataaaatgaaccatgtactttcaaaaatgatacaaataggtaggggtgtacaaaaattttcgtaaaccgctgaacccgaataacccgcccaaaccaaaccgacaaaatcgataaaaaatacaaaccgacataactcgacaaaattctaaaccacccaatcagttaattgggtgggttgaaaattgacccaaaccgtccaacccaattttactttttttttttattttatatatattatataatatataactaaaaaaaaagtcccaaaattctaaaattctttctcagctttctcacatatattgtgaatttatgtggttaatttttattttagttgaaactaaaaaaaaaaaaaccctcttaattcggtt

SEQ ID NO: 382126 - DNA, 1468 bp, Cannabis indica
ttagaatagacgccaagcgaaacatgagaagtcaggataactcggttagatctagtggcggtgagggagtccagtttcccctgaatatgcgtggccgaggtagaggcccaagaggtagggcacgcggttggggagatgtcaacccgccgcaggctgcccaagttgagaaaacaggtttgcaacaatgcaagccagaatcaatgaacaagacaaagaaatcagatgcctgaggcagaattaatttaagtataatggctaatcataaaattaatttagctttgacaaaaagaaatatttcatttaaattaaagttttgaatttataataggttttaaacatgttaataaattaattattaagaatttggctttggtatttaaacttttgttgttggttattagggcatataacgtcggttattagtatataaccgatgccatagtgtatatatggcatcagttatttcataataaccgatgccattgggtacactttagtgttggttatgtttgaccttataacttcacctagatcagcgtcggtagcaaattttgccaaaatcaacgctgaaaggccttaaaaactacctctaaagtccagatttgtagtagtgttcagacgagatagagatagagaaagagagaagggtcattgttgtcgccgtcaagggtgagagagtgagtcgtcgagggaaagagagaatgagccatcgagggagagagagaaaatgaagccttcatcgtcatcgtcatcttgttgtaaaattgcaacatcaacgttgatcttgaatcaactaccgacgggcttagaccataactcagccccatcacctctaatacgaggtcctataagaaatcaacaaagtaacatcgtgagctttcttccaatggaaaagacaaacacacgataaaacaacaacatcacaaacaatacaagacttttaattctaaactaggtcatttctagccgacccaatttcccagtacaaacttaacaccaactcctccctatccccacacaacttaaccataaaattcgttagccaatgttcaaaaacatgcacatccaaactatcaaaagagaaactaccatactctcaacattgttttgcaaaagagaatgatacaaggtaatgagtcaccattttcactaaaagcctcacacatcagacaattcttttccacatttacatgcttagaatgaagatgaatacgagtaagaaggcatctcgagacaactctctataaaatattttttatttttggagagatcttagccaaccataacatttctaataacttatatcgaccccagcattccaactaccatttagctcttgaagctttcgatatgcacttttaacagaataaataatatttctctccaaagtccaaaaccaataatcatcatccccaaaataaaatgaaaaaaaaaaaagaatttctaaaactttcccaacatcttccaa

SEQ ID NO: 382127 - DNA, 1825 bp, Cannabis indica
gggacctctcttgtctccatggtgggaaacatttgtgactaccaattcaatcaccaacacacatatatacatatattcatatatatatatataataatctctactatttaatatatatagccattcatattattcatttcattccccatcatataatatatcatgccaaattataattggtttttcttgcttaaaacggcataacaaaaaattcaaagaagaaaaagaatgagaagaatttgatataatattgtactattatttaattattaacacaccttctttagaaagttctagctagataataataaataaactttcctttgtgaacacgtttatataatatgaaattgtagaactatatttttgggtttgaggatgattcattgatgtgagtgattttcgccaagttaattaaaatgatcattaattccatatataattaagtagattaatctttagtaattgtgatattcaacatagtgaaaagtggacatatcataattaatgatcataccaacttataaacttttgaataactaaagcaactttggaccaatattaaataaccactactcacaatattttttactccactatatataattattcaactatatacatatatatagttattaattataaattcttagatcacaagatcatatattgcatatataatacattatatattttgtcttagatccaacaccaccacaaattggtctccatcttgagattcgttaatgattaagtgttgtaactttttctaatttattcaccaaaatataaagtgatggtgatgattcatgacttgatctagcatactttctcaagcttgatatatatatacatatatatatatatacatatgaaacatatataaataaattttatcattgattagtaaaaagttcattcgtgtattgtttatatatttgtacatataaatgaaatttaggaaaaacaatagttaataatgaatttaaaattggctataattaagatatgtggtacttttatctaggacttatatgattcttaatattactgatcataatatatatggttttattacttatatatatatgaatatgatcatatatattgtgtaatataaacaagtattaatttttccttattaatttccctctattctttttcaaaaggaaaagaaaaataaagtaaatatttccaaacaaaacctttgttggttttgctgtaaacctttatatcaatactgtgtttttgttgacatatatttatatttagaacatgggcaaagggattttgtctccaaaaaagcataaagatagaattgacgcttaccacttcaatatgaagaaaagagaaaggaaaacttggaattaattcatcaaccaacaaaatatttataaatttacaaattaaaagtatatataattattgcccttcatgtagtgatttatttcaagtgtcatattgttagaatacactatgtactagcctaaactttgagttcatttaaacaccttgattaattagttacaattagtaattgtctttcttgctattcagctctaacaaaattacttagtagcttcttataatctttagctaatgttctttttataaataaaggtctcaactcagttcaagagtttgagcacatttcattcacttcatctttttttattttatttcaccattctcatttttctttgtgctaattagttgcaagccaaaacttgaattaactagggctcagagaacaactactgctcatatttctctttatcgcgaaattgcaatatcatcatcgtcgtcctcagcagcagatgcctgg

SEQ ID NO: 382128 - DNA, 2876 bp, Cannabis indica
taataataataataataataataatgtagaaaaattaaaaagaaaaagtatattgtaagtaagaaaaagagagtaaaaagaataaagagagtttagaaagagtgatttttgatgaaaaagactgattataatatgtatgatcatcattattatgatcagactgtaaaaaagaactgagcttgaaatttggattggagccatacaaggcttgaactccttcaacatcatcaatcttcaaatcaatcttcttaatccgaggactcaagctcggatacataacagcctctttaaccttcgaatgtcccaaacccaacaagtgcccaatctcatgagtcgccaccgattccaaatcaatcgccgattttgacttttccttattaaagtcaacgctccatgactccgccgcatcaaggtggaacctcccgttttccggcgaaaaagcgtgtgctaaaacccctaaaaccccatcaaaaggctctccatccccgtgatctcctctgtaaaaccctatcttaatatctgctgaattgtactcctcgatttcggtgaagttcaccgggatcaccgccgaccaccggctgaaagctcgccggaacaccgtacggatttcgtctccggtgaggtatttcagcgtggcgtcgggggagaagccgtaggagagcgtcagcggcggtgttcgttcccacctcggcttgccgtagaagtaagcgtagtgacgtgtcttgtgtacggcggcggagacggcggtggcggtggaatcggcgacgccgcatctcggggaaatgatggtttcgatggtttcggagtcgagattaccagttaccggtaaacccaggtttctctggtaaaggattatggcggattgtagttgggaatcgaaggtgtcgtcgttacggtggccagcgccggcgccggtagtagcggttaggtaaccgaaacggtggaagtaatttttgaggtgggagatgccgctgacgtggcttcccttttcagcgtcgaggaaccttgagaaatcgtgccacgtggcgctgttgtgtatatcggcggttattacggttacttgatcgggtataattctggcgggagaagaattagttatgaggaaagagaagatgaataataatatgtttaacagtttattataataactgaaaaacggaatcatttttttttttttggattttagagttggcagttgcaaaatattgttggaatatatataaatatatatagtagtacgaaagagggagctaagggaacatatcaaacattcaattcaaactatatgtatgtatatatgagactatacatataattaatattatttattattattataattgaattgaaaataagaaggaagaaataagagtagtactataatggggagattattgatattatgaggaaagcaatgaagatattctggttctggcgtggttacctttcatttggggattctgtgacttaattatttggtcacctaagctaagctaataataatcatgtaataatattgtattaatgtttggtttatttggtgggcaaaccacttacttaacataaattaatatattatatatatgcaaatatatatggtttgtgttgtgtttcttctacttctatctaattatgaacaagaaatatatatatatgtgtgtgtggtgtgtttcatatttgttgaccaaaaccaaagtttaattagtttttccacttaattgtgattagtaatacatatattaattaattctttgcaagtgtttaaaaatctccctatatacactccatttttctctttattaattggtttctttcttttaaatttagaatgtgtaaaaatgttatgtagaatgaaactattaaattaattttcatttcaacatcatcattattcatcatatagatataatatatatgtgtagctatagcgacctttaaggtccaattcatgtgtaatttcgctttagaatgacctcatgatcaacttaacattaattcatacatatatgagataataattatatatataacctcctccatacattttcattatatatagttccttgttaggcaaaaagacaggaatgaaagaatatgtgtgatcgttttgaatggggcagtttgaattttttgtgtgctaaaaaaataattagatgatgagaattatatattaattaattgtagggtttgggatattttagttgactgacaaattgacccgcttgtctttttgatttgctccaaactaataaataaataataaaagtcaagtaagttgtacttgtgctaacttctaaccaaataattaatatatatataatatatatatatatatactaagatcctaagtaatttcatttcgttaattgaacaattactgcttctccaattaatattaagttatttgacctaagagaaaaatgaagttgaacatcttcaccaatatttgaagcaaactcctacttaataagctaataatgtttacatgtagttttttttttataggtatgtttacatatacttagtactcatgtgttttcggaacgtggaattcgaaatttgtttaatttaattattgtatgcttaaatgaaagtccaatcaagatacataataaaccttatttattagtgaagtcaaaccatctagataataaatagatgattcgtctaggcaaataaatattcaactaagcagatttttgaatagcatcaagcaacgctttcaaaatagtaattaatgagcctctaaatattaagcatagtgtctcactcaattagaactttatttctaagatcttgttcgagaatttgatatatattctgaaattaagtaggacacattttgataactatcaacatgacgtgacattcacgtc

SEQ ID NO: 382129 - DNA, 693 bp, Cannabis indica
agagagagagagagagagagaaagagagagaatgagatttgaaactgggttttaggatattaaatatccccaagtatagccgacagttttgcactgtcgctattagtatagccctcaattttaaaccatcgataattaagtaaaaacacacatttttcattactaattaagtaactattgtaaactgaaaggtaatgcataataacttttttaagctgatgacaatactcaattatagttgtcgtttttcaacaaatggacaaatttcaatagagtcgatcttaaataaataattttctgactgacgagaatttcttatatttgtactcgtgattattccacctttgggagcttataaactaaatgttgatgtgtcagtggatgtttcttctaatactataggtattgaggcgatacttcaagaaacttctaggaatgtgcttgggtgtttatgcaaatccttacttggtatgggttttataacattttattgtctagctcttttgtcttgattaacttttggtaacttatttattatgatgatgaggtatggatgtcttttttgttgggttttttgccctaaataacacccatttcaaaataattagatttactaattaataaagatcagaaattgtattttatgttgcatggttcacatgatttatttcatgattatgtttaatgtataaa

SEQ ID NO: 382130 - DNA, 3300 bp, Cannabis indica
aataaaatgaaaattacaacaagagaaagtactaataatccaagaacaaatgttggaagatatcattcacatcttcaatttccaagaacaacaaggtcacaaatcaacaacactaattccagataatcgattcaatatattgtaaaaaacttatgaaggatgacagctaaagttgaggccagtgattaacttagctagtctctatccctatcaaatacaatgttacaatttctcgaaaaagaaggtttgaattcactataatagctcaatgtcacgaaaactaatggaactgtcgaaacaatatctgccgccaatcatccaaaatttgactaaaacaaataagcagaaaaactcacaaagatggtgcaatgcgtctgaaaacagcttggaaagtctgccccccatttctagcaaccttctgtccttcctcggtggctgaactcaagagttttatgaccgggtcaactttaagctcttcgtttgtgagagcttcaaacaaagggtgattctctaagcaagccttcatccagtctccgagttcttccacatctgtgatagtgtatatgatcccgccaacttgtagaacataagcatactcgtctagcaagtgtggactgatcaccctacggcgatgattcttctctttgaagtgaggatcaggaaatagaaaaaacatctttgaaagctgccctttctcaaagtaatttggaatgtatttcatggaatttgtccgaaccactgatacattttggtattgacctggatttgtaccccttagagctaatatcctttctttgacatactctgtcaccttatctcttagctccattccaatcatcaatgtctcagggaaaagagttgaaaggctgattagaaggcctccaaaaccgcaaccaatatctgcaaactggattttcttagacccttcactccgttctgatgaaggaaataattggggatagtgagtggaataatcaacattagccggggagataggaatgggaaagtgagaatcactcagagggttgctgtgggctctagctcggtaaaatcgctttcggggcaagccggttgacttgctaagagttgggtttgtttcattgtccaacataatttgttacttttcacaactgtagagttaaaacaatttagaattgtcagttcatcttactcttaccaaaaacttcatgtgaaaaggatatatagatatgtaattgaaagaaaaagaagtataagaattgtaaacaactgcttcaaatttcaatgtcataatgaaaagtgaaaacccagcaatttttgtatgcctatcaaaatcaaatactaaacctccctacatttttttttcaagtccatagaaaaacaactgaatttaagaaagactaaaaaaaatggcaaatcaacacataactcatctatctgagaagtctttcaagtgggcaatgttgaattcatcatatgagtaaataaatatatgactttgcctcttctaagaggaattactacaagcagttggagagcaaaggcaaagctatgaactttgaagtgcccaaacagtaatttgtctatattgtttcaatatacacgaaaagaactgtgaatttataactatttgggaacaaatagatgatcatattcttctatatactatggagaaatcgattctacaaaaaaatttgccttaaatttctttacaaggatttcattgtgagttctaaatctgtaaaatgtgcaataaaaacagatatggaaatggaagatgatgatgagtaacctgagatagagaaggaacggtggtgaagtgcgttggccggaggatccaattggggagcggcggcggcggagatagaagaagtaaatatgagaatctatcactcccatatgaaatagggctctaatttgattatttatttatttatgaatatttagattttttttttccaaaacttttaccaactcttgattgaatttgaaaattctactcaactattaagattattgaatttaaaattttttgttctattttaccaaaaaaaaatctaacgtgcatgaaataaaagtccaagagcacgatttagtacatgttaaagtttaatggatacgattcgataaaaattaaagttcaggggcacgatttagtacataacaattatctcgttagtataattgaacgaaatttgacagaaatctttaaatttaacaatcttaatagtactggaaaaaatttaaaatataattgagtatatctcaaaattcaataagtaaatattctaattaatttttattagtgtctccttaaagtaaggtgaatattctataccaatttaataatatacatcatttttctgtttttcaatatttctggccaatctttcatttttgttgtaccgttttcacttcaagtactctgatggaatctatctaaatgaaaacacatcaaaacaagtgtaaactcacataaaataaacttaaacaaactaaatttttcatccaaagtgagtcaaaaactattatcatttactcaaaacaaaaaatggagcaattgatactaggggtttatatttttgagggctactaaaaatctaaaaataaataaataaaattcgtttatgaaaatgtcaaatgttttgtagtttgtacaagtgagttcaaatttcccatttttgttacttatttcgtaaataatatttataaagtacaaacctatatttactatatttgagtacctattaaacattcggcctattagctcagctggttagagcgtcgtgctaataacgcgaaggtttttttttttttttgttccatgtattgtgttcgcaacataatagctactacatagtagccttatggtttggagctaatatatttatatataaggaggtaacatggataatttagatgatataagttcagtgttctctttgtttgattttaaatcctgtatttatttatataaaatatattagtcttaacctgactattgtatatctgaaatgaacaaagaatatataaataaaagtttttttggatggacaaaagtggaagttgaatcaagtagaattttatttggttttttttgtttattaaatcatataatatttaaaatcatatgaactattttaatgaggagtaatctagtcatactagaaatttaagtctattaaattcaaagtgatggtaccaaatgtgtaggaattataaataaagggtaccaaatgatcattattagaaaaacataaggtactaagtttatatttaaaaaaaatacagggtaccaaatagttaattacggcttaacaa

SEQ ID NO: 382131 - DNA, 2581 bp, Cannabis indica
agaaagtgtatcagcgactatatatagctatagctcgtagactcaaagtttgaattctcttaataaaattatcagatatatagaagttaaaaatgataatgaattaaattatcatgtattaatatttccaattttataggctatctatatctttcggtgatatatattataaatctaagaagtcatgtttttaaggtctcgcgtaataagatatataacataagcgtaaataataatttatgatctgtatattatatctaaatatttaattacaatatactatatacacatatatatcaaatcaacgtatatatatcatcaaacatctatatataattaataattattgatttgttcaaccaaatgtatataatgcaagagtacgtatacgtagtgtatactatatattctttaattaattataaattgaagatgcatgatcaaataatatgaggccgtggtagggagagggggaccacattattatacatatacagatcgaatggatcgattcatctcccggcagatccaagacacagctgcttccctccttaaattaaaaatatttatgggtatcttgctcaatatgttcacttggtgagagacattatgttttggcttttaattattattaacacatctttattattaagtcacctccatccatccatctcttatatattgttttgttcgtaacacatgcattgatgagaccggtccagtactcgatcatccacacttgataattacgtacccaccaaataattcatataattattattattgaaatatatatatatgatgatatgcattcatgaatcccctacttaattattaattttattacttgatgtgtgtatatatgttatcgttattttaaataattaatattattatattaacttggtgcacatgtgatgaacgtactgattggcgggtccgtagtgatgagctatatatgataataattcaaattaataataataaaataaatgaaactaataattaatcaccacacctagattatcttttgtatagcatatgcctatttaaaggcatctagttcccgttgagagaaaattcattcttatatttacacattattattattcacttaatttcttgagctcttttttgcaattattctaattaatttcagaaaataattagtacattattttcaatggcttcttcatcatccgtaatcagctgtgagaattgggcttacatcaacggcaatgatgaatttgaattaggacttgattttcatcaagtcgctgaaatcaacggtacacatgcatttcttatgtcactaatggaagagctacaagataatgtggaagagggcgatgaggaaagattaaatagtgtgattcaatctctagaagctgagatcaataataattcaagcacaagtagtacagatcatcatcatcgtcatgctgatcaagattcatgtatggatcagtcctcctccgatcatgatcaatcttgcagcctagagctgtcattggacggtcaagatttcacggtttcatttgatgatcttgatatgatcaacgaatgggatcttgacatggaggaagttattccatgctcctcatcatctagcggtcaggatcaaattattaataatggttattattacgctgctaataataattataataataatggaacttattatcaatatgataatcaagttgccctaaatgaagaggttggagacaactctttatgcctaaattatcaaacaatgtatgatatgattcagtgatgtatgacatgaggacggcactatattaatcgatgataattccaaaatcatgtacatatacaattagtattgattattatatacaatttgattcctttaattaaattaaaggttatttaatttttcttcatcataattttttatatccaacttacataattagatcgatatgtacgtcatgtttgagtttagttttaatttttaaaaatgattaaagatatagtaatagtagaggttggatcattaagcatcaatacgatacatattaaaagaatagctttaaacaattaattagacagagtggaatatataaccaacgtaattattatatattattcataattaatattactatttaggccgtatatggttcttactttgtattatgtatgtccagtcacataatcaaatcgcaatttttagagtaaaattctaattatatatatttcccctccaaaacttatcaaaaaatattaccccctccaaaaacaaaaaattctttaaaattaattagttgcagattagtgacaatgtcccaattgtaaagagttaattatttggcacatcaagctgctaaacactgattaattataaatttattattatattatttattaaattaaaatttatgagattgaatataaaaatatacatttattatatcaccacttaagaaattataaaaatataatgaaataagggtaattacataagacacaattttttagtaaaaaaaaattatatttttacgtttaattttttttttttatttttacggttgtttatagaaacaacacgaaaaca

SEQ ID NO: 382132 - DNA, 3402 bp, Cannabis indica
tgtaatttgagttggacaaagcttgaaaaagttagctatgtccctaaaatatgggtgtagaggaagcactgtaccctgctccgcatggggatgaggccacactatccagttcgactgtggatggtgagctaggtggtctcaagtaggcctaatgcaccagacctgccaacaagtccattatcaatgatgttgtcaagcttggcactcaatagcgtagaaggagaagatacccacctatctccttcccccatttgaagaatccagggctcagcagtctcctccttaatatggtcaaccccaacctctgaaggttgacctctactttttataagatctccatcctttcaggagactagaggatttccctggaccatgccacacaccttagggtgtttcctagcagccctaggctcaacctgatttacatctagctcctccccttggctggccataggctcctctgcctgaccagcctcaggctactctgcctcctcaacctgacaaattctcactcttttcatgagctcggcaacatgggggtcggttagaggtgccttgcgataagtctactttttcagtgccagctttgaatactgctcagagtactgggcaacagtaacaacagtcgttgttgcaggaatatctctaagtgtaggagatgcctacccaacaggcgaggtatcaagaaaaccctggcagacaatgtaagtccacaatttaggcaagagctatctcaacccttgattcagttcccaaatgaatctcctgtagatctcaccccctattctctcaaaatagtggtgatgttgaactttgagttctagaaagtcattgctcgctttaaagtcactcaaacagctgcctgacaagctctcataagaagaaccagctgagcgatagtcttcatacaaaatgacggagcaagtccttgttgatctggttgtcacctccccaataattatgcaggttcatctgtgtagaaaaacaaagggaggtgaacaactcaagattacaaataaagacaaggatgaaaacatgggctaacagaccgatacctgtgggtactagccgaccagcccatgaggtctcagaccacatactggccagctcatagttttcccaccatggactgaccaacttcaagaaattcccccatgaacggactagcttcatggtcagcttgccatgaatcgaacagggtgaaattccgccctaaaagaatcagccaggattccttgaaaggaaccaagcaccgaccaagattctttgaaagggagcaagaactagctagggtcccaaatagacccaagtactggccagatccctaatcgaataaaaaaaatgtattttccaaagatttgaactatgttcttcgaaccccaaagattaagatatcaaaataaagctcaagattcagtcttttttatcaaggagttacccattatacatcctaaagatatctagtagattataatgcgtaaaaactatcctaaagcatgggattcaagaagttcataaaatcttgaaactcaataatgacagaagtttaaagaacgagaaagagagaaaaaggttcgaacttacccactgggaagacacaatgaggatcgagctagtccacgcaccaagtgtggatgtcagaaactcaaaaatctgcgaagaactcaagctcacaagaatttggctctaaggagtctttgagagaagttttgaagttcaaaagtgaaaagtgaataatgaagagaagaatgaggctattatagtttttggaaaattttccccaaaaaaaaacttaattgggagttaatgccacagaaataagcatgcatgggaaagagaaggccaagagttgcaatgtgggaaaatgtatagctgtcacacgacttcccacattgatcagcgtaaaaattaataactatcatgaagtcacgtaagtcgaagagtctaatatttggttgtgcatacctgcacggcaaaggaagttgcaatacaagatagaccaaaagtcccgttcggatagggacttgggggaaaatgttatcccaaattttatccacctgatgtggcttctccacgtggcaaaaagaaaaaagtatgtagaagacagctcaacactaacctgcaaggattaattcttttagacttagaaactatatgttgcacgacatatataggccaacaagagatcatgtacctgccaagaaggtcctggccggttaggagtgctagcttccatacattggccagccttcagcaaggctggctggccaaaggtgcaagaacacactagcacttatgtttttctccaaagccctccaactcccccttaacaggcctacaactccggatcagttcaaactgcccacgaagataggactctccatcgacaaataataaatgtagtttttaggagatattctctctgtaattcaaatgtatgttgtaacctctttattttccagggacctctctatgtgcagctttgtaagccctaatactatataaatggcagtagtcatacgtgaaaggggatcacctcttgaccacgaccacctcttcttcacacctgctcataagctctaagtcctctcttttttcactcttctcacctacaaacttcattgtaatactaaagagagcctagccaagtgcttggtattatctcaatagtaaatacaattaaaaagggagtaggtcatttcttaattaaaagtggtcaaacttctataaaatttgtgtgtctctttacatttattgtctttccacacgtggcaactataagctacgatcctagttagactccgagtcggttgcctaaattcacagtcaacagttagtatagatttaagagaggaagaaaatttgaggtaattattttcatcaagaacataagaaagctcataaaagaagtcaaatttatttgaagttagttttctacacgttggagagggtgtatgtgtgagaggggttgaagaggagcagtgagtgagcttgatgatttgttgatattagtcataatgtaaaatagggactcgttgatgagtttatatttatcttataaatacgatcaatttatgtattaatattcttaaattgattctttaaattattgattagtgtaattttaatttgttaggctattttaaagactattcatgcatttagagtcttttggagggattttagcatattttggtagaaaatagtggaagccggcgagctcgatttacaaggcaaaacttaattggaaatttggacaaccttaaaggggaaactggacttggagctcaacatgaaagtttagatctcggtcttagctttccataacatcttgaatcgtctaattttaagtaatatcgagaaagttatggccaaaatactatcagtcatcgcagtaggaaa

SEQ ID NO: 382133 - DNA, 4913 bp, Cannabis indica
ataagagaattactttaaatactactttttttttttttcaaatttacgatttgggttactccgttagtttttcattatgtgagttgctatgtaaattttgattgcgattcatgttgttttgtttgttgctatgcaagtttctatgtggatttcaataaaaatgcaaaaaatgacaaaaaaaagaaaaaaaaaaaaaattagttttaaaagtgtaaaaaaaaatcccttatattaaggtacatagtgcatttcgatataaagtcttacacattttgattttgatttaaaagataagatgagaaaccactaactaattataaagtaacaccttagtatgatattaaccattttaaagtgctaattagcaatactctaatatttaagagttaacgaactgttagcacaatattcccgattatagtttaaattttatatattaattattatagggtgagaatttgcatggaatgtaaactattattcaaaattttgcagttgtgtatgtcactttcatcttcgacaaatattcacttactgaaactaaaaccttaccaataagccccttatgtaattttgtagacttgatcgctcactcaaattaagttatttcttttatcacgtaccaaaaacagataaaaacttataaatttacatccctatacaagaatcaacttatattcttagtaattgtatattttttagatttgattgaagtaattagttatcaccgcatcattgaatatttattttttcttcttcaaatttggctatatatatatttttttttagtgaaaatacttgttattataaattaacaaagagttcatctacaataacagagtaaataggctgaggaatatcctcaaaccaataacatgtctcatccacccctaacgcaaactttgccaaaccatgtgccgccttattggcagtatgtttgacatgcgatacagttacattagggaaaaaggacaaaagacaagagatgtctacaagtaaatcattaaaagatgactttgaattgaatggagcttgtaaagccgaagcaaccattaaggcatcagtttcaatttgggacaatgtcaactgttgttgaaaggcccaatttaagctatggaaaatagccaatgcttccatttcatgggatttgaaattgcccactagttgcttggagagggcagctatcactttgccacaagaatcccgaaggatagcccctacaccaataacattccttgagccatcaacagcagcgtcgacattcaatttgaaagcaccagcaagaggaggcttccacgggggagcaacaggtgcacgagtatgaggcagtggctggtttagtggctgctagtgtggagtttctggtgcagcagcagagtggtatttatgttgggcagatttgaagtttttcaagtaagctatggcataggccgctgtgtcctttgctgcttttgcttgttttccatgaaccacccgattccgttcagtccatattgccgaaagagtgcacatgatctgttccatttcggccttagaatgaattgtagaaagatggaataaatagtcacctttatgcaatgaagaggatagacgctaatcaaaggtcattttagagtgcctccaaactgcacgggcatatttgcaactgaagagtgcatgtccaaccgattcccacacttgtttacaaacagagcaagttgcatctgttataattttccttttaactaaagctgtagaaataggaagtgcatcatgtattgctttccaagcaaaaatttttactttaggaggtagttgcatggacctgaaaaagtccaccaagatgaagcattttttgaggtcgaactttgatccatttcttcaagggctgctgcgaagtgatagccagagctggctgtgtagttccctgagtggtgatggtgccaaattaatgtatccttgcttgagaagaaacttagagggatagtcaaaattctttccacatccaaaggagtaaaatactgttgtaaatcagggacattccattgcctctcatctgtaataaagttagcaacaacaccattagatgtccggagtagtggagaggaaaaaaagaattatgtcccgatatccatggatcaaaaccacattttattgttctgccatcgccaattttccagtgaaggccctttaaaagaagctctctaccccaatgtattccttgccatgtgtatgatggtgaatgacccaaggttgcatcaagaaaaccattgtgaggaaaatatctacttttaagtaccttaccaagtagagagtcgagtagctcaaggattctccaagcttgtttggccaaaaaagcttgattaaaatggacaaaagaccgaaaacccatgccaccatccaatttggacttacaaagaaagttccaagagcgccaatatatttttgatccattttcattcgaaccccaccaaaaattggccatcatggactcaatctgattgcaaaaatagaccggaagacggaaacaactcatggcatatgtagggattgattggactacagctttgagaaggatctcccgacctccagctgaaatttttttctcattccaagtattcattagtctccaaatcttctatttgatattgctgaataattcttttttattccttccagagtatgagggcagaccaaggtacttttcatgacattcacaaataggcatggagagttgtcgatgaaaaaacacctgagcagctaaagttgtgttgggagagaaggacatcacagatttgtccaaatttaaagattgaccaaaggctttatggtagatatccagaactcttttaatggcaagacaagaactttcatcagcttggcaaaacaataggatatcatcagcaaaaaacaaatgagagattggcagagcacttcgagtaacttgaagcctttcaaatggcctgagtgtgttcatgttgaagcaatcttgagaggccttcagagcaaataaaaaataaatatggagataatggacaaccttgttggagcccccgagtaggggttagagcccctgtaaacttctccatttatgagaaaagagaaattatagttgtaaggcagcccataattaaagctatccatcttttagcaaaacccattttcctcatgacttcctcaataaatctccattccaccctatcaaacgctttactcatatcaagtttgaaagtagcaataccattccgaccactcgttttatgtttaatggcatgtaccaattcaaaatccacaagtatattgtcagtgataaggcgattaggcaagaaagcactttgtgcttcagaaataaccaaaggaaggactggtttgaaccgtgagacaagcaccttagtgacaagcttggagataacgttgcatagactaattggcctgtaatccttcatgcgttgaggcttcttgatcttaggaatcagagttatgattgttctattgaaagctgtggagtcggccccctcattaagaacacttaagacagcttttgtgacgagatcaccaataatatcccaatctttttgatagaacatggcacacatatcatcaattccaggacttttgtccggtcccatagcttggagagcagcataaacttcctcacttgtgaaaggtttcactaaggattcattaagatcagcaccaaccatggtggggatgcacgcaagagttgaggcaagagcttcactttcaatgttggaagctgaaaaaatttcagcaaaatattcatgcacaacagcagcaatatcaggtggcgaatgcactttctgacccagagcattgtagagaaacttaattttattgttggacttcctagaggacgctttggcatggaaaaatttcgtattgcgatcaccggaagcaagacaattgactctagatcgttgttgccagtacacttcttcctgctccaaaagatcctctaaaattgcttcagcattttgtaaatcgtctagctgtttgctggaacgaattgtagcattgttcagatcagccacttgagattacaaatttttgatgtttttcttcattttcccgtacttgttaatatgccaagtttgcagattttaagcacacaaatcaaggttgtgaaccacagaagcaatcagattagtaggaagagagtttaaccaactcttggagatgatatcgctgctctcaggatcagcaagccatagcttctcaaaccggaatctgcttttacttttaacaggatgatcagcacttgtgaaagaggaaaaagatgtaataattgcacagtggtccgagtggtaaaaatctagatgttcgaccgttggcatgtgaaaatgagactcccaatgattattgatgaagcaccagtccaaccactctttaattgtatccaaggccgtgcggttcttaatccaagtaaaatgatcaccaatatagggaacctcatgcaaagaacatttgtctaaaatggctctgaaggcttccatttgagattctcgtctaagaccaccacccaacttgtcattgttagacaaaatttcattgaagtctccaatagcaagccaaggttgaagtggagcaacatcaccaaatcttttaagaagtgtccaagcggcagaacgattggtagtgtccggggccccgtaaaaaccagtgaaatggaaacttggactgcccttgaacatcatatagcaatcgaaaaaagtagtaccaaaatttagcaagttaacatcaacatcatcagtccacaagagcatgagaccaccactaagacccacccgaggagattttatgccattaggataatgcagagattgacggagacgcgtgattgggttgataccgagtttcgtttccataaaaaacaaaacatggggagattgttgttgaacaagcaatcgtagatg

SEQ ID NO: 382134 - DNA, 2472 bp, Cannabis indica
atacaattcgagttttttttcttttatttagcataagcaaaatgcattttatcaaataattatgttatgtgatagtggaccaataataaaattgaattcaaattctatgaaacaagtttagttagtcttaatgatgaggatttaatgatgcatttatttttaacatgagttcaaatcttccattcactcactcttaagcccacaagtgtatatatttatatatacaatttgtactcttttcatttttttttttaaagattttggtaagtagtatattaaagcctaaaatattttgataattggataaatattatatttaatatgattttatatataaaaaaaaagaaaagattttggtgaacacatggtgccacttagccaagtcgagaacagcagaatcaatcactatgaattttaaaaagttaaaataattacaactaaaatcaaaaataagaaaaaaaaaaaaaaagttaaaaagtagcaaaaaaccgccaatttagtagaattgtttgtcttccatagtaaatatttgtgtagtattagaaattataaatagaattagtaggtgtttatcttgctaaactaattttttctcttcagaatttggtggctagaattactagagttaatcatataagtcgtagaacttaatttttactcaggcttaatgagaaatttcattcattcaaaaaagaattttaccccaaaaataaacccgtctctactaaaatcgtaccaaacataattttagttttacatttttattctcaagaactcgactttttgtaacaaataccccattaaataagcattaattaacatgttatgctatattatgtggggaaaattatactcgtgataggaacatttgtagcatgtaaatgtaatgaactttttttcaaaataaaaataaaaaaagttttattttttttaagttagtgctaattgtaataatccaccaaacgaacgttgacttggttaattatcatttgaattaaacggtcgataaatccagctgtcaacaatgggcctccacaacctctcaattggattttgattggactccaagacaaacacttctttttaaaacttgtcagcccaatccggcccattatcatccccaccgttagattacataatcaagtccaaatgggcccacacagactcccaaaccaaacaattctcagccgtcggattaaaaatgaatcaattggagaccgctcgaaatacaatgcaattggagagacagaagttggaccattcaaagtttcatcctctgagaaaaaaggctgaccccacttcccttagtgggcccccatcaaaaacccacccaaaagaaaaattcttcttcttcttcttcctctttctttcttctattctatttctaccccttttacaatgggcccccaccaaaggccagcatgccaaaaatattgggtcccacaaagctgaatgtgtgtgcttgtttggccaacatgaaaattttttggccaaaaatctttgatatgaccccacagtaccaagaattgtgcaaacaaaaaaaaatatttatgtcattaacaaaaatactcaaaagataaacggttggtaaccaaatcagaaagaaagaagggcaaaaatgaaaaaagaaaaagctgaaatttgaattgtgtaaacttagtcaggcatgtctttctttctttaccttacaatatctgcttttttttttttttttttttgtacatggaaattgagcaatagtatgataacctttgtaattatttagtcccccatatttttaaaaaattaacactgcaccaactaaaagagaaaaataaaaagtgagactatatttctcatatcccaagaaaaaccacttttcttatctttctctactcttgccgttgactgccctagctactcactcatatcatatattctttctttctttcaaaattactattattattattaattatattgttatgaaacacacttcttcaaatgtgtaagaaaacatctaatatcggatatcacaaatatgctaaatggagtatcacttttagtatattttttttttagcttcaatgaaagaaaaaacaagaatattattttgtatagcaatataatgtctcttaacaaaaaatatgtgaatattattttaaattttatgttttgtaaaaattattgatttgatatttattttattaattgataaatcaaaccatgtacaaaatcaatacatgatctcatttttctttgaccaaactgaactagtgtttatgaccaaaataattatactttttatatttggtcgtattaaaaattagtttcaagttatttttttatataaaattaagttacatttcaaaaatgattgagtgtgatttttcatttaacaaaataaaaattctaataaattaattttataaaatacaaaatttaaaataatatttactaaaaaataataataaaaaaatagaaaaaaatatt

SEQ ID NO: 382135 - DNA, 4134 bp, Cannabis indica
aagattgtgaggtaggttctgaagaagaagctttgaataagcttatgatgattttcataggtttttcttttacatcagaaggcatatcattcagttccggatatctgtctttatttatcaagaccggtgttctacatatacatggccagtactttattgaatgagatttatccatgtgtaggagaaggaactatgatatattatttaaatttgctaagaatattttgtcaactgcaagatattctttatctcgcatgattgtatatttggtctaactgattgattatatattgtatgtttctacttgttttacccaaagaaaacccacttcaagaaaatcagaggttgtgcttcaactctatttggtggaagggatatttaaattatttaacaagagttacttacaataatagatacagaacagcatgtatgaagaatatgaatgaattaaattaaccacaataacattgttcatgcaagcaaattgatttttacagctagtgatgaaacaggaagcaacttacaaattgattgcatcaaagaatcgatagcacatgcacaacttaaatcttttagtatacaactataaacctctctggtgttctcctttgcaactgcaatgataaatctcgtgctctttattctttgcaacagttattttcagtttctgctgctctataccattcgtgtggaaaacaagagaaatctcgagtatagactgattgctggaaaagtaaacactaaaacttggtttcccccttgaaccgtttgtttaaattcaaaatatcctccaatgagggaagaggccgaggtacaggcacatccattgacctgttcaatcttttcaattgttcactgaattttttcaatggcccaatgggagttcgagtaccactctgtacttctgtttcaatttcaacaggctctttacactgtatttcattcacatcttttgaaggattaatcaccaatggctcttccctagtcacttcatataaggattctttacactgtatttcattcacatattcgggtggattaatcaccaatgactcttccttagtcacttcatttaaggattcttgaggaaatttatcatctgtttgagaatgttcatctttctttgtagatttcttctgttgtaatagaggagattcctggagaccaagtctagctctaccaaataaagtgacaggtggtcttttggctggagaaggcaatttaaaattttctttctgagaagtggaaatctttaccagttgcagttgagagtcatcagaactttgagtgatgtcttcaagtgccgccagtgagcaagccgaagttttagccaatacatcttcaactgaagaggcttcaacattaatgtccagaagcttccaaagaggttcctttagagataatcgagtagtaaaacaatatttcttaaagtaatccagctctgtagccatgcaacttggggttgttgaaataacccatttaggagcaagaagttgaagagcccattccaattcttgtctggaagaatgcattgaatagcagacatgccaaacaccaaattggtctcttactgcttcattcattctatattttcttcgcttttcatccaatgaagctgaaccatcatcctcacacgcataccactgagaagaagggcgtattatgaggggttccggcattaagttagcttgagcctccataagctttgcttttgctctttcagaaagtttaggaaatccatcaaatagatggaaacgagtagatggatcttgggagatgatttcaggagctgtaagtgagaaagaatgaaaacactcaggattagctgctttgtcaacatatatcttggatccaaatgtcctcgacacagcagatagtatttcttcctgtcctagaagatcacaagttagataaactattgtagcatcaggatgcttccatatgcaactgacaacctgcgacagcatcaacaatttactggttatttagggctttaaggcttaaaacgacttagtttatccttccaaacaagagacatacaatgattcattccagagatgacgatgctgagtacataaactaaaatagccccactgttgagaaaggttgaaaaaggaaaaaggtgcactagattaattatatttaaaaatagatctaaaggaagataaaatataattcttcaatgacagtcaaacatagtaatttaattacagatcaacaccatacataagatactcaaattacgtgccaaaaacaattggaatgcaagcctcacgatcaacaaaatttatatacagagtagaaagaggacctcaaggaaataaacactaataaaagggctagtaattttatgtggtagaactgcatcgtatgatcttcacattcttaaataaaatgaaaaacgttgataaatcaccagacccttacttaagcttccataaaaattgagataaacctaaaagtcagtatttttcaggtaagcatcagcaataatgaaactaatcctagacaaactaatacaaagctttaagtatgtcaacaaggttaagatcaatatgatcaaaacaaaatctccctacaaaaacaatcgttacttaaagcaaacatagttcaaaaaagtagcattatgtagaactagaaattaaaaaaaaaaaaagacagtcttctgaaaatatgagatggttttgcatatttttatacaaagcaccattgatcctcccattaaacctatcaataataaataaaatgaaaggtacaaacctaaggagtgtatacaaattcagatataaagaatacctgttgggtagctaaatgcttgctgggcattggtcgaaggaacctcccaaaagtgcagtctaaaaaaacaaaatcaagttgacaagaaggttttcttcctctctttcccagatacttctctggtaaattctgtaaacactcaggtgtaagcctgcaatcacctgtgtgcagtatgttgccaaattttccctcaaacaagaacatcacagctcctgaaattcaaaaacatataattccagacaagggaataactgtcaattaagccaccccaaaccattagaactcaactgaagccgaaattgaaatcataaatatttacgttaaaaaagttggaagtatattaacaaatatgttcagaatcaaagtttcatggtttccaacaaagaacgaaacaccactaaaaaagaacaacggaatttatggtttgaatacaaaatccattgcttccatgaaattggtataagcaaatataataaaataaaacaacaggaaagaaacctatcaaaaacttgttgtgacaagtgaatgaaataaataccagggcaatgattggcgtcaaaagccgtaaccgtgaatgaatcatgagaatcatcgacgatgatcgactgccccacctcgatttccacgaacatggaatgatgaagctgcaaaaagcagagaagaaattgaaattaaaagacgaaaagagagggagagtaaattaggaatgggaagaaggagaaaaccttgggaaatagttgaaggaggagggctttagtgagagaggtagagtaaattgggaaggagaagtgagcggtgattccagtggagtggtctttatgggcatgtgtcaagaaatggtatctcttcctcttcgaacattcagtccatgtatccactgagaatggaagccctttaggcatttctattggcatccttccttgctcttcctcttcctcttcactcagtttctctctctctttatgcatagggaaatttgaatatacatttttacttccaaataaaacttccaggggaagaatcaggagggaaaagaaaaacttcccctgcgatgcgatctattattattattattatttaatttaggaatgttcgtgttggttagtgtgggttataattttttttcaaaccaaactaatatgcggtttttgtaatttctcaaaccgccactacataacgaagattttaaaactacaaaaatcacattgcgaaaaatacaatgcagcttgagccattttaagtattattatcaaatattataatgaaaattcaaaaatcaatttaataaaattttaacaatacaataaagaatgtattattaaagtcttaacatcataa

SEQ ID NO: 382136 - DNA, 693 bp, Cannabis indica
gattttaaccatcatatcagcaggctttgatgctgcaagaggtgatcctcgtaggtgctgtgatgtaaggattcttcttgttagctcactacttagcagctttgttatttcctatggataaccattattgccagtgtaactggttgtttgcattcttatgataaactatactagtaattaattgaccaactatatcaagctaaggttgcctgtcatcgattctccattgcttactttgtttttttgtttttttttttttacaaaaaattatgtgaaaaaggaatttgatggactagaattttgtgccttgttttcttgtgttggaatctgtctcagatacttgtcggtattttacagatttcttatcttatgctctttctattagagtgtgtaattataataaattttcttcttgtaggtcactccttctggctatgcaaagatgacacagatgttgaatgacctttctggtggaaagttactcgttattcttgagggcgggtttgtgactgaccttttgataattggttactgttcagtttctaccttgagctaactttggataatgaatctgcttacagctataatcttcgttcaatatcatcttctgcgacttcagtgattaaggtccttaaatcttttaatttctgaaatgccttacatatgccataatttgggtaacatttatctggt

SEQ ID NO: 382137 - DNA, 2680 bp, Cannabis indica
aacgacaacatccaaaatgtactgcaaacagatagaaatgtaatctcatttacggcaaccaccaccattattatagcacaggccttagaagaaaggcaaggcttttattattagatataataagaagaaaaagtcacaacaacaccatattatacaacacaaataccaaactggaacaaaacacataggatggggtaggataggataaaatacaataatacaatattaatacagcgatcaaatcaggtgacataaatgatttattttgggtccatagaaggacttatgtggcaaaggagccttctaagcatgaaccgaaaggtccttatatactctacaaacaaagccacatatcattaatcgctgcagtggaagagccccttcacttttttaccatttcagctttttgtttgggaagtactgcaagaaaaataataaaaggtgtgaataatatgattaattgcctaatataattctttaagatataattgactggtgatagggctaattaccttttcgatgagggagagataatatggtttgaccttttccacatcaatcagctcagtagccttgctgtagagctcatatttgctgtaaagaaaaagttgtatagatagaattagtattataagtataatcatatataatatacacatatatatatataagaagtatttattaattacttgaagatttggagccactttagattttcatggtcctcctcattcataaggtgcctgtatgctccaccggtgtgtaatgctgcagttatcaaatatccatcatcaatcaaaatgattttaaattattaaatttatatacaaaaaattataatttttataaaagtactatatatacttacgatagaaggagtggtttctaataatgaaaagagcagctggaggtagagtggttttgttctctctcgccacctgaaatatcaattaaattattatgtcattctaaactttagcttctctgtttttaccatataaacatatataaaatatgtgtgattgattaatttgtaattaggtgcatgtgtttgaagaatatgtaccaaatacatgtagtcatcatgtccccatgacatcaatacattgtccagtccacaattctctgagtagactccatacttggtgttataagcagggttgtggtagtctgggttttccttgaaatactgaaaataatcaaaaagatgattcattattattattattagactattaactatgttaatttgatcaactaaatttgagtcacaacaaatgatgattaaactaagtaccttgtggtgaagaatagactcatcaaaagcacatccaactgggtatgtgtcccctgtaatgtgaatcaattatgagtataatgagtacaaattaagtttgacttaataaaaaagttgtcacatgcaatattttacttacctacaacagcccaataaggaagccctccaaactgtggaagaagaagcacctttccaagatctatacaacattagaacaagaaatcaaatatattagctaacttaattaagtttgagtagtaatgatgttatatatagtactatagatataccatggataaggccagtcaaatgaagccaatcctcatcgggatagtcctttctaatggattcagcagtttggagcaagtgttccatttgaggcaaatccgagtcaaggtcactctcatccacaacatcattaagaagctcacaacattcccatatgctcatctccatcttgtccattttgatgtactcttccctcatcttctttacctgaattaattaatttacacacgtactatttgtaagaacatttatttaccccttcatctgatatatcttaattataagcacttcttttttagtaacacttttattaaattttatatgcttaagtgtattgaggaaaatcttaattaacatttgagttgggttgtagtgactagttgtagttgtacttacaaaatcataagtctggttcttgtgattgattttgtagaagttctcaacacgcgcatgcttttctccttcagcattgtagtccctatttatgtcattttacaatataattattagaatattaacaagtagttatggtctttgacattccaacttttaaatgtttgttttctgtttttaaaatcaggtaattgttctctacaaagaatagataaaagaattcgcatcattttctcacaataatatttagatatttattaatttacaaaaaaaaagaaagaaaagaaaaaaaaaaaactgaaggtttttaattaattattttcctggttttcccaaataatttttcttctttcctaacctctggaataagttacaaatttacaatatgtaagttttagtaacttatcaaaaaaaaaatgtaagttttagtaaccgtatttaaaagaacatttgtaaatagttaaaactgacaaaaataatattaattgtcgggagctcacacttaagaacatttaccattttttcctaaattaaaagggaaatttacatggtatactaacttttgtcatttttttataaaaatactgccagacggtaatttttacttttttactgtgttttttataagtttcatactgcagtatacggtgttaagttttcactggtgttctactagtgttttactagtgttctactgttgtt

SEQ ID NO: 382138 - DNA, 1368 bp, Cannabis indica
tttccttaatttttttcttttaggatgtattacagatttacaaatttaccgtatataattttttttttttgaaatggaatttaccctatatttccaataaaataggacaaatttttattttagtttaaaatgtaaatagttttaagtaggaatagtttatatgtaaatgagataaggtatcattataaatgaaaaatctttaaatgcctacctaaaccaaacccataaatcaaaaaatgagagttgtatgaatatgaaagagagagagagagaggagtttcagttaagagtgtacttcttcttcatcttcttataattttcctaagagagaggaatctcgactgaaaaccacggcgacactccccatttggagggaggaaatcctcttccctggcctaaaatcgttcaaggtgagtctaaatccacccaactagctcatcaatattcgtcttcagaagagacggtttttcttgagtcttgtttctcaccgctgttaacgacgacgaatgatcatctcttagtcaggaactctaatggggatagcaacattacagtgaagtcaaagaagaaggctaggaataaggttccaaacagcgtcgttgatgcctcccctgtcatgaccgatggtccttggcctaccttacccaagccttcgcatacatcgaagtcatcaactgatccagaaaactcacattctgagcctgtcactggtggatcgatctccaattctcaagttttgctttcctgtttttttttttttttggaagaattttcgataaacaatgactttaatttagaaagggaaaatttgtgctttttgattcgaagaacgatttagatttagaaatagaaatctgattagttattatgcatgttcctcttatgtatttgatgataggtaccgactaaatacagtctcaaacttcattcagaagacaggatagccccaatccaaatatgggtcaaacaccgtttcggcaaagatctgctaaatgcggcggtgctggcgggggcagcggcggtggcgcttggggtggccctacaaatagccactattcgtatcatcatcctccgccgccgcaacaaccacggttgtactcattctactcgggatcagttttctcctcttagggtataatgcctgactagtccgtaagagagcctttcttcaacaacagacctacaggagggtttgtttctcaatcagaactttggtaggagaggaaattttggttccaaccactatgatggttcgttccagaatcaccatggcggcaggcatgattagggtcgtggaaatttcacaaattcaaggaatccacacatgcagcagaagccacagagagcacattgttgggttttgtgccc

SEQ ID NO: 382139 - DNA, 3384 bp, Cannabis indica
tttttttatgagaaaaaaatagtttaacaactcattttttttttcaattggagcctcaaatatatactaatatgtttcttgatagaatactttttacaaattaaattattttataatatattttattatccaactaattaaaatctaaaactaaaaacaattccataaatacaaaatggaacatcatcttcaattcttcattaatattacagtaggatactctttctttttctttctttaaaaatagctagtatgcaactttatattatatctcctcaaattgattatttaaaatataacctcaaacgtaaactatcttaattcttatcctattacaatccaatatatattatatatcaataaaacaagagagtatactaccagtccatttcatacaaaactatttacgaaatagatagtgtaccatatttcaaagttggtcacaaattctaaaacttacatatgatgatatgagtagtagttggctgttaagaagggttattaccatgagattgactctcagtctgtcatgcactaatttttgaagtccttgacttcatacttttcttcgatatgtattttgatccttgttgttcttgattgatacatgaggaattagatgcaatcttctggctttttacataaacactacccaaactatcatttcttatgcgataacaatcttcataattaacatcatcaagatttggtattatgttgctatgctctattattgatcctttctctttcaaaatattgtcaacttctctagaagctaaatcaagatgactttcaactacttttctacttttctcagaccccaaactctttgatatgacatttaaagctttatgcacaagatttcttgacaatatactcaatttcccttggttgttgctagaagtatgatcctcataatcaaccacttgcaatgcttgattatctccttcctttgcagattttgtccacctcttcattacatattgagatggtatttggaagatattttttgcatttagtacttttattgaatgactgcataaaattccaattgattcaaattttccacagctacatgtgacataggaacttaagcaatcaaatgtgacaatatcttctttcttgtggccttcttctgtcaatctgaaggtggaaatatttgcagaattcgtaacttcttctattgccaatgacaagctatcaagcaattcctcttgaaatttttcaaacattgtgcaagtgtacaactcctctgcatgcttctccatccctttccttgatctagaattgacaatttcatggcaccgtagatcttcgtgcaattcttttaaacgccttcgttttgaatctttgacatattgcataacaaaatcaggcagtgtaacaaccttgctcaatgaattcaagaaaaagaaatccatgttggtaacattactatcgaacatcagttcaatcccagctgaaaatgtctttttacagaacaagtgagaccatcttttccacaatttgtttaagctagtaagccatggattttcgcaaagattgtattgttccaacaaggagttccaatgcatctcgaattctatatttgttgtacaatcaaaaatgcatttgttaaaaaggacctcaaaaccaggttgttcaaagtatgtcgggagatgctttctagcatttattttgatagaattcacacttaaacgatgttctgattttggaaataccatgtcgattgcagtagacattgcttcacactcttccatactataaaatgttcttggctgatacatatccattgacaacttgaaactctccaacaaccaaacaaatgagtccaaagtctcttcaagcaaaattgcacaaccaaatatgacacattgttgatgatgattaagtccccaaaaaagagcataaaccatattgtcaattctacatgttgtgtccaaaacaataacatctccaaaataattgtagtccattcttgacctgcaatccctccaaaagaaattcgttgaacgattttgattgtcaacttggattgcgtagaaaaatgatggatctttaacttgtaagtatgaaaacaagttcattaacttttgaacatcattagaggttctatcaagtgtgtaattgaaagaatcgtatggagattgtcgtttgagatactggacagttccattttctttccccaaataaccataattatcattaatagtagttttcacactcgaaggtggaacctcaatggcatgactttgccttggcttttcaagttcatgattgtgctcaagaacaacatttgagattacccattttccatcttcgaccgtcagctgaatacatgcttcacaacctgttcttgtttcttttctttcatacttagttgttttatcaaaagatatctttcttgacttgaaaccttctcttgagcacaagaaatttctttttctaattgctcgatttgtgagtctgaccacctttccttttctcacagaaaaaccaatctcttcagcatacttcttgtagaagttgtaagcctcttcctcataaaagaattccattcctatttctgggagctttatcttttcattttcaggtaagtcagactgtatttcatcttcactataattctcacttgatgagatctcgtgcctatcgttttctgatgccaatgattgaatcaatgaagggtttctgtttgaattatcccattcctagtttgcaagacaaagcattaaagtgaaacaaaaattgtagaaatgacaatttcttttaaaaaattaactaactaaatattcattcataaagtaactaagcaaattttttattggtaggagaatttatgtttttcaacatctgaagaattaaaacttttattaactttttgttataattttatataatataatacattatagtcataagggtaaatagtgatataagtacttaaagttttaaatttgtaagtggcataaatccaatatttatttttagcggcataagtacctaatacttgtaaaactgtaatttttctctaatttcatcagtacagactctgttattttcttaaacagaccacatataatatctaaattttagatcattagatctagacagaaacatgtagtatcagctacttctaaatgttcttttaataaattacaaaacggagtctgtactgataaaattagaggaaagttacagttttacaaatattaggtacttatgccgctaaaaataaacattgggtttataccatttataaattaaaattttgggtacttatactcctatttaccctaattataatagacatctcaccctttttaaaaaaaattctaaatattttatgataccaaaaacaaaatttaaaataatcaaatgcac

SEQ ID NO: 382140 - DNA, 1050 bp, Cannabis indica
attgctttggttatttcttcagtaatttgtatgaaaatgaagaagaaaaaaacaacccatttggatttaaaacaaagaaaacaacaaataaacctaagcaagttgagaaccagaactcaaaacgaacacaccatgaaaataaaaacacaaactttaacgccaaatacctgaagattcatcctccattgaagaaaactgagaaatgggttcttcttccttaagaaaaacatgacgagaaatgtaataaggagaggactctggtcttcttgcatcaacaacaatgagtgagaacaaaatggtaatgattagtacccacatgggtattaagagagaaaatagattcattagttactttttcttctactataataatatatatagtgagaagagacagaaagattatatctttagattattaatggatgaatgagaagttgtgctgttgtgtaaaatttgaatctctccctctctctggtttttccttttttttttgttgggagggagagagaagtgagaagaagacaaaagagaggaggaggaaaaccaagaaagcacttttattttaattgtagggtgatctgtatccatccaaatgggacatgaaatcatgtggtagttatcaaaaggtaaaaaaacttcactcaatcacactcactcttctggatacacacaataaatttgacattctccctattttgtttaatttaaatattcatttctacaaacatttttactaccactttcattttttttttgaaatcccatctacttcgagatgacatagaatccacatttattcattaattgtcttatacaaaataagtaatacaaggatagcctaaccatcaaaccttgctaactatagttaataaaacataatcaaaattgaaacagttataattgacgatagtactttactggtgcttattaattaattatttttattattattattttaatgagcaatttgcggcaaaaccccttatgttttaatttttatacacttaacccccttatctttttttttggtggcaaaacccccttatgttt

SEQ ID NO: 382141 - DNA, 4797 bp, Cannabis indica
gtaagaggtcatgggctagtcgtgacctgtgttgccctgaccaagttcttgactcccacagttggaggtgatgtggcaacttttacttctaagattattgatcaaaattccaacaacatttgtgagctgacggttgagaagtgggcaattgtcgacagtactgatcctgtcatgttggctcacgcaacaaagcgacaggctgccaaggtaagtgttgaatttttatcttttctatcatttttttctcatatcgtagagagaacctcccaagaattcaatgccatggctgtaaaactgaaccaagttcaggccaagaatagagcttcaacttttgagatagaggaaatcaaaatccatgctaaatcctagatagcaaacatcaagaggcaagctaagaactacagggagacttcctttaatgatgctcacaaaaagtacgaggctaagttcaatgagctcgtggggcctattgaaagatcccaccaagagatagtccataaactgaaaaccaaagtgaagtctctctttgaatcatcctaaaagttcaaaaataaaaatgacattcttcaggcttagtggtggccagggacatggaggtcaaggacaaacagattgagatcaacagtctaaaaatttcgacttgtagaggtggaggctaagctcaaagtagcggaggatgagtcagagaagcaaagaggaaaagtgggttgactagagatgaccctgttgcatgagaggacaatatgaaaggctcatgctaatgctaagaaggtcttgagaaaggtttggaagctgaaggaccaaagcttttgtggctactggagcctttgttaggtgagctgcttcgtaccgtcgacaggtgtgggattccatgcaagctatgagcaaagttgtcaaggctacgaaagcttatcttttctagagcatggatttagctttcatagctactctccatccattgtggaagaaagatccttctgtgctgaagcagctgggatcaaacgaggaagagtacttggctaaagtacatgctttagagagtgacacttatttcctgcctgcttcttttagatctggcaatgaggctgaaaaggctggttttgctaaagtcgtagaagtttcttctgagataggggctcaacctaagcaagatcaactcaaatgtcagacccaggaccaaactcaacaatgatgcaacaaccctttttctctcttttccttctttttgttttgggggcctttggatcccttttggtatttatagagatagttaaaaatgtcttaaccacgaggttgtttgcaataactcaacaaatcttcttttgctcttttatgcatgttgttttatcctctgatctgcttgtcttgtagccatttaataggttgtttaggatgctttaagcttctggttccaacaacagaagcttcacaccttaacttttcttaggactagttctaagtcactttttgctctctgagagtgttaagaagcaagtttgtgttaccgatgttcgtaagttttataggacttaaggccctttcatggcgtattaactttagctagctaatttttatgtagcgtgaaaggaacttgtaactacttctgcgccactattgttgcggaatttagtttatgcctttttggtacataaattaatcgtttcaacgaaatattaaatttacgcgtgattacaaagtggctttctgtcagaaggctgggcttttgggtctagacataactttttttttttcatactaaacataatattgattttcatacgcaaaaaggcttgctaattaaactagtaagaaaaaaggctaaaaaatgcatcgaaattcaagcaatattttcattcccatgttcttaattaacaaagcaaaatattgcgtagtgaatttacctttctcaaaatgtggtgagaaaatagctgaaaatgttaaaaattttaggcaaagttttctactccaaattttaaggcataaaggtataagcgattgccttaattatggtaaggggacaaattactcttagtttcccgaggttttaatttcaagcatttctcctactcccatatttaattgtaattcatttaacaaaatttaaatagaaaaaatttacataaaatattaaaaggggctctttaaaatttttaagggtacatagctgtatatcctacccccaagtgagctgagaattcgaatgtctccaaattaccggtcacttgtttgcaatgcaacttgaaaccgaaaataaaaggagtatttttgaataattattctgatttcatttcattatgcccgaaggcatacatttaagaagaaaaattaaaaaaaaacaacaattgaacataagcaggtgtttggatctggatactcctaatttattgatagtatcggcgcatgtgatttacattccaagctcatggaatttctggtccatctagtcttttcagttgataagttccattacccacttagtgttggatttcatagggtcctcccagttttgtcctgagatctccactccctgttcctgagaagttgggaatactcttcttaagatgagatctctaacctggaatgtctggctcttaactttggaattgaggtgcctggcgatcttgccttggtacattttaaattagacttacaactattcccagagctctttgattaaatctagagattcttgaagcaaagtgtggttgcgggttgggtcataagtttcttgtatgtgtgaagggatggtgtctcaactaagatgactacctcatattcataagtcattgagtacggagtatgccccgttgaagttctttctggtgttcgatacacccaaaggaccctagggagctcttccagccaatgggctttacaagcttgaagtttttttctccaacatggtctttaaaatcatgtttatggcttccacttgtccatttgcttgtggtctagccacaactgagaagcttttcataatttcgtgctagatacagaagtctgtgaaatgcacactgttaaaccgcttactattatttgatacaatgttatgttggaagtccaaaatggcacactatatttttgatgacaaaatccaaatccttcttggaggttaccatgttcatcggtttggcttctacccacttggcgaagtagtctaaaaaagttatagtgtatttaactcctccttttccaattgcgagggatcccaacaaaaggccacgacctgctcatcaaagtgatctcgattggcggtgcatgtcaaacctttgcataacatttacattgttcacattttcagacgtattcaatgcaatctgtctttatcagtggtcaaaagtacccttgaccaagaatcttttttaaaaggcttaatccaaaagtattgcctctgcagaatcgtcagtgaacttcatggataatggcactaattttggttctagctatgcacctcagatatggtactgacaaccccctgcggtaaagctttctgtccaagatgacatatatgggagcctggtactggatcttccttgtagtggctctatcagtcagaagctctctagaagttaggaactggaatatcatacctatccaagagtttgagtgatcaattatggctttttccgcaagtgttttaatacttagagtttgtagatggttgataggtaccactccgtattgcataatttttggatctgttgctaacttcgccagcatttggtcccttggaacttggaaaatgttgtagcttttgaaactttgcagcagttctcttgatcatgtcgggcagccattatctcactcttagcttagtatcctccgaatatttggtttaccactaattgagagtcattgtacactttaatactctaggcccctacttctttagacaagtgtaggccagccaacatagcttcatgttttgcttcattgttggatgaggtaaagtgaatctctcttgtgaagtaagctatttatgaaacagtttctttattgatgatatcatctcagatgctccctgttccagtagcttggtaccaacactggatttagtggcagtcatagcaaactccaacctatttttctctagttctaacgcttctgtgataatataaggtccctccctctctcatagggagtgtttagtgttattttcatggtccatagcttcagaagactcataggacacatcttcactattgctcccttgttcttaatcaatttcggaaacaaagggagatcttcatcactgcccccctctcttgagtcatcttgggaagagggggggattcttcatcactgctttcttgcttgatatcttcttgagaaatagtaggagactcgtcattactatctccctgctcgagttcatcttggatctaaagagaattctatttcaatggagatattaagtattgaatcttcttcaccttcctatattaagtattaatattttctaaatatctaattgcttggttatgacatgtcttccagttgtgacctttttggccatatttgttgcgcctattctgttttttgtttcccatgcacctagagatcaccgtttacttagtatttcagtttcatttaagtgttttcttagttacattctattaattacatccgcttgtgtattagttcatcatatttacaatcaattgagatgaattaccgtctagtttcataatttggttaattgattccttcatcaaattgtctgttgcaaaatatgaggaatgaaattgcgtctttttcctaagagtataaaagtttaagtttgtaagtcaactttat

SEQ ID NO: 382142 - DNA, 1000 bp, Cannabis indica
aaaaaaaaaaaagtcatataataagtatgacaactacaaattgcagttaacctaattaactaaggaatgttgtcatatgtttagttaagtagttgactaattcttcagtagtactatctcattcattgttacttgctaactaaatgagagttggattacttgctaatttactattacataatcaaaagtataataaaataaatattcgaggagaaagcaacttcccaactatactttctctaatttattaattaatatattcaagaatatatatatgaatttaatataaaaatatatcaacaacagtaagccaaaagcatacgaaacccgcttgtcaactaccataaatttgtctagtttagtattacgattaattagctatatatataatatatacaaagtaaaaaaaaaaattccattaatttacagacaaaaaacacaatgccttgttgggggagctaattaagcatttaattagtttgattatattcaaactttattaattaatgtacagtctattgcttatttgtttttttttcctattaaatataaggaaattgatgaaatcaataacgtacgtggtatttaggtataataattaaataacaaacaccaacagaccagcttttatatttaattattttctgggaaggacaatatataatacagattagtatgaatgatttttatttatttattttgcgtgaaacttggttgctcattctttattaatctgattaattatcaaatcatatgtatacagcgtattgaatctcaaatttcactttcgttgatgatcagtgatagcttctttgatctaattatatcaacaatattttaaccaaagttgatttttaaggcctaattgtaatattttacaaaatgcatgatgcaaataatcttaactttttaatgtacaagatctaaggttactaataatacgaaatacaaccaaaagtaaataaatttttttgaaagaaaagtatatatatatatatat

SEQ ID NO: 382143 - DNA, 4289 bp, Cannabis indica
attactattgccccatgtatggtacaaaatatgaagtaatttttttgttcattttttcttttctaaattttcttttaattcttcaatgaagatggtgcggtggggcggaggcagctgtggcgtttcccgggggaacggcgggtttgcattggtagcacttggcaaagagtccaaacgagtcgatttgcctaacgaaattcgtgacactagcccatccaccgaacccgaatccaaccacgaacacccaaaccacaatgaaggcattgagaacatacattgcagtccagcttggcataaagaatggaggcttctctgctgcgttctgttttttttttaaaaaaattttacaaacaaacaagttagatctcatgaaaatgtgaccaaaaaataatttaatttaacataacatatcataacatgacacctctaaagttaattttagaatattcatatgttttattttatttaaaaggacaaggttgaaagagagtcaaatcagccagctcattggacacaatacatgactctgtagtgtataactaaacgaaaaggactcttcacctatctcacacaatctcttctcctaaatttcaaattaccaaaataccctttaaaaaataagataaattaccacatgtccccaccaaccacaccccaatagaccacttttatctctttattacttacacacacaaataaaatataagaatgtcaatgttgacatatattttttttttctttacctggcgagctgaggctgttctataagtgagcatatgagctagagatgggataatgtagacagtgaagctgacgagtagagccccaacagctgaattaatgggcccaaagaaaggaaatataatggccaaaaaccatattggtatcacaactggcaacctagccaaagccctcaaacatatgcttttagtatcatgcatccctatcaccttctcccacacaaagtacaatggggtacatgcgaaaccaaatgtgataaactgcacatacatgaaacatgaaattcattcaattcattcccctacttctaactgtgttgatatatatatatatagattgaaaaaagaaacaagaaaaagcaaacctgatgaataagcattaggataacagcagcatctcgaaaaccattcttggggagaagactaaaggcattggaatggttaaggagttcatcaccaaatgcccaataaacacatgcagctgaaggaagtgtgagtgtgaaaacatatagagttgctaacaagtatatgtacttgaacttttgaggcttccacatggcatgcataatttccctgaaataacatataaaatgtgtaataaatattaatacaataatgcccaaatgtcatttttctttctccagctactatagtatgatggagagattatggtgtgaagtaaaagacaaaagaaactaatgaatttttaatcaactgatgtgttagttatttatatttgttttaattaaataaaaataattggaccagttctttattactgtataaattttccaatagtagaagtggagatatatagttagatatatgtagattgagatgagaagttgttttctaagtaaacaaaaagtaagagttttgcattatatataattttgtctgtgggtctcgaacactgaaattggccggcaaaagctgctaacagaagccgcgtagaaacaaaccaaattatttttctcttttctaaattatttgtttatttattttaattaattaattaataatagtaaaaaagagatcataacaattattacaaagaacaaaaaagcttacactgttacggcatggccaccaaaggtgtaaagtatattagtggctccggtaaaataaaggacaggcttagtaggagctgagtgttggactccttcaacctataaaatacaccaaatttcattcacttcaaaacttaactttttaacatttatttaaaaagataaaagttgggttcagaaaaaagaccataataatggctttaagatcccaaacaagagatattatatatgtgtatttatttacctgaccgtgtacaagagcagctatagccaaataccaagcagtgtaagtggtcatcccaagaccaagaaaagaccaaattctgtagttatggaaagagggaacgaacactgttgtggcacaacaagctccaaagatataagtccatgtcctcttgtctagattgtcgttgatgtagtaaatgttactgtttcaaattcaaaaaaagattagattttgacaaaaacccagatgttaattttccttatttaatactaaaaacagagaaaggaagaatttttttgaaccttgcacaagctatgagttggattacagatccaaagagaagaaaagtacagttgaaagcaagtcccaaggccttccagattggacccaacaacccatcaagcacttcaaaccactgtgtcgtttcaaacaatgttagtgtcgtttagagatttttggcttaaatggattatataaagatagataattacaaacctgtatgacatggtttttgaagctagcattttctttctcctttctgcttctgtattcaacatagagtacactgatcaaataagcagtccaacttccaacaagtccataaaatatctgaagaacaatcccagagaccattcccagttgagagaatgagtatggcaatgttaagagaacctgagcaacctgtaaccaaattgtgaggaagaaattagtaacacacgacaagtgtttgataatatgtttgaatgggtaattttttttttttttcttacttgattggaagcacaactgaaccaagcgtcccaggcagaaccaccatgccagagaaaattcttgacattgaacattgattgattctcttcttcttttgatccttcttctttagcttgttgatcatggctatcaacctcactgaagttagagactatggcttcctctgcttgcttctgaggcaacattgttttttgatcacttaaggcaaccgtctaaatctttggtagatctaaattacataaaagacagttaatgagacaaaataatcaataaaaaatgaaaaaaaaaaacgcaaccccagaaaacgaaagccaataagaccccagatccaaataccagaaattcttttcacagatatataaaaaatgaaaaccctccacagaaatccaaaaggaaaaggataaaaacttggaaaaaccaaaaggggttatagtctaaattctaaaacatgttttaaacaaaagaaagatgaccagaaatgaactctttcttacaaactatatagtaatataccttgtctgaactctgaaatgtcactttctttctagtgaagagaagaaagcaaagtgaatgaaacctggatctttcactctattccaagcaaaaatgatcttatttttcggccttgactttgatttgtcaacttttatcaatgtataattttccccacctagttttcagaatgataaaactagtgtagcagcagcagtagtagtagtaatattagagagagtgagaaaaagcagacagagtcatacagttgtggcagagtgagaaaaagagagagtcatgaattatccattacagaatttggtacagagtgcatacgacataaatatatatatatatatatataattatattaatgggcttaaatgcgtcgaaataattgcaatattacaaaaaaaaatctctatgcctagtcttcttaaagactccacttttaatgcaccacgaaaatctctgctctcggaccgaaaccaaagacggcgagacctgaaaagctaggaaccaaattttagaagataggaaaagaaaatagaaagacccttttgagctcttattcaactgaatatattagatatatatatatatatatatatagtaactaaagagtgatgactcttgcttttatcgaagaagaagaagagaagaagaaaaagttgagagagatgaaactcaaattctctgtattccaattccaattccaattcgattcttgggatatcaatcttaagtgacagagaattttgagttcaaagtggaaggaagagaaggttgttttctaatcagtagtaaggaccaaatttatacaatagaccttctcttttatagaactcaaaagcaaccgcttcaacggctctgattacataatttctttattttaatttttatatattttttttatttaaagaaaacgactttttatttggataaaattacagtaagtatcagtagtagtaacagtaactaactactttg

SEQ ID NO: 382144 - DNA, 1776 bp, Cannabis indica
atagaatgattatattattttaaaataaaaaaaaattattcttgcaaaaagaaaaaatttaataattttattattaattttttttatatatatattttaaatttcatttcattctattcttaattttatctttcattagtattagttaatcgatgtgttatgttatttattaattcgttgacaagaatctgaaacttttatttatttatttattttgaaactgaaactttcattttctagtgctctgtttctacatgcatataacttcattctattcttgaaccattgatctatatttagttaccgtaactgtgttctgttaagctattgaccacttgattgacaagtagaattataattgttttctctctaattaaataccaaaaaaaaaagaaatataataattttattttcttactgttttcttccattaagagaattggaaataaagaaaaacgtagttcaagcaacaacaaaattgtattatgacgttaaaattttttacaccaaggtataatttagtcgaattacagtgctatgccagtttacacaattttctctaacttttggtaatctctctggactttctatttcagcttgaaatgttttgaggatgtatttcgactagtctggcgtgatcaagaacttattccctttttgaactcatttctctttatgtcctcgcgcgttcttccatctgcttctgctcttcgaactccgtacgctccacctttaattccttccttccagctctattctgcttttaattccttcaagctctgctctgctttttaagctgatcgagctctgtcttacttcttctgccctttcctttaagtgaaaggtgtgtttaatattattccggtcacatcattttattatctcttctacatttttattatgagtagaattttccacctactaaattaacttttatctttgtttatttaacatgttaacatatgtgatgccctatttacataaaactaaaaaataactcatagtcatagggattatattttttgtacatgcctacatggttgataatatatctgtttacaaaatatggattttaatttacagtgttttttggcagaggttttgcacttttcactcgtggaaacaaaattttggaaatttcaaccagcacaaaaatagggactttgttgactttctaatggtatctctgtttttttttttttatctccttcctcactcacaaaataaataaataaatgaattgatccagtaaaaactttataagatatcatccgctagtaaaggcttatatataagataatatataggtagaggctatcaacgaggttggaccatggtacatgtgacatcatttacagagtcaagtccttcactagttgatgggtcttcatttgcagtgtaacctcttttaaatacaaaggcaggctgttttggggtaggaataactgcttcattacccaacatgatagcaacttctaacatggtgggtcgatcactggcactgtcttgcacgcataatagccctattgtcatgcatctcaaagctttatcaccatataattcatccaatgatgagtccattatttccaaggctctgccttcattccacaaatcccaaacctagcttaaaacaaaagtttaaggcattatagatatgtcatcgagctgttaggctatttttagcctatgttttggatccgatttatgtgcattcttagctgtgttgggacggaattacgcttgttttccatgttttcaggttctttggagtaaaag

SEQ ID NO: 382145 - DNA, 1546 bp, Cannabis indica
ttcatttataaaaccatatttttggtttgttttgttaaaaaatgccatatattgtagcattaagttttcatgccatatttatctaaactttcttattttttccaatagttttgtaaataccccttttataaaagtatggcaactagaaaagccgaaagcccataactcccaccaaaaacccaaagagacatactccacaaaaactaccaaaaaatcaacctcacacaaaataagggtggtaaaacaccattattacagcaaaaaacacataacaaaacagcaaaaaccattcagaagcacacccaaacatcagaagaaatagaaaaaactacaatcttccaaagaatgtaaaccgtacggaccaagacaccacaaacaataaatctcaacccggtttgatagatttaattacaataaacacaatatttattaaattactagaactacttaattacactgctaataatttccacaatattaatttccagtaaaataaagccttgggaaggcgtcatatgttgttgtgaatagagaagaagagaggagagtacaagtgtactactactgtgaccccacttcacttttctcggactaaaagttagagactagactagactcactccacattattaatttctactatacaaaatacagtgctcctttcatattcccccactcccactccttcaactcacatttttttttattaatatgcccatgctcttttatttttatataataataatataattcgtaccaaactcaaaagctattttttttcttcttctttaaatcacatccattggataggaccatagaaaaataaaataaaataaattggatcatacacttaattatagattgtgctgcttcgatgtttgtacatacataccattacatcagattgtacctttctttctcaactctggctaagatcaaatgtaatttatttatttattattaatctaaaaaaacaaaattagaaattaacaataatttaaatctttgctctcatctctgtcttccactctcttgtgttttcttattttctctgttcttttcttcttttttgtttattaagaaaccctattcggctatatttgtttatgttagattatatatacaaaatctttcttttgtagtagtagtgtttgtttcccgagaaaatggcgcagctttggtccaatcacaacacgatatttactggaaagccatcaccattagccaccttcatttccatcattctcctttgcattctggggttttacacactgcattacgttcactctccatcatcaccactctcgagttcccaaaatgccctccgctttcaccacactttcctctcaaccgcctcaaacgacaccgtcgctgcttacctacgccaccttaccatgcaccctcacgttgccggaacacaaccatccattgaaaccgccaactacgtcctcaaccacttcaagggttaggcttcgactcccattccgtcccttacgaagcccttctctcttatccaactcactcctcgctctccttgccattttag

SEQ ID NO: 382146 - DNA, 2632 bp, Cannabis indica
aataataataataaataataactgatgtcacccaaaagaagaaagatctgttcaaatgtactgtttcaatgtgctcaaaattgcttaccaaatccaaatttattacttctataatcttattcaaaatttaaattttccattttgaattctttcatttacttgtatgtcatctctaacatgtggcaaaattgatttggtttcttaatcacctatttttgctgtactgtctgtgttttattaatgcattctcattccaattctgtaagggactggtctttttaaggaatgcaggatgcatgtgttttgctcactttgattttatcccaagttcaatcaatggatacttttgtagatgcaaagaattggttctagtttggatttgtatttttctttaagagcttttatacaaaggacacagtaccttaagaagttaagcttgataataattatgaatcaaattcgaaaattgttatggaagactatttaattcttttggggtgggtttcgaatagcttggactgacttaatggcagaacttcattacaaaagggttctagtttaagaatagaagttttggctggtttccttttcgacatgactttattgttgaagcctaccattaatacttttctcatttcatgtggaacctactctgttggtattattttagttgagttgaggtcatgcatgattctcttatagtgttctttatgtgctgaattccctggcaaaaccttgtcaccacaagttactctctaggagcagtgcctttaccttttgatgtattcttaatccttattgcggagtaagatatccatgctttctattgttattgaaattataattttgtgtaaacaaactgatgctttaagtattatatcaaattctgacaagactagtctgtgtgaggctaatttgctaactagcatgtgtatcacaattgcattggcttgttaagttgtttctttgcctaatgttacattgtttcttcctttgatatgtatgtaacttccaatctacacacttctgatactggataaattggtattaattattaatatttttttttaccttcttaatattaatttttcaggaggaagctccaaaaaaccgagggaatcgaaaaatgcagcgatattatttcaagtcaacatcagtaatggttgtccggatttggtcctcatggcttgtaaagcaaacatctcaaccagttgattttgctccagaaagtgttgtgaagctccaccttgatgctcctgacgagaacctaatggaacatattccaaactttgatgtggttatactttcttccggccattggtttgccaagcagtctgtatatcttattaacaatgagattgtgggaggacagttgtggtggccggacaagtctcggcatatgaagatcaacaacattgaagcatttggaatttctatggagacaatactcacggcttttggtactcatccaaattacacaggactcactattgtgcgttccttttccccagaccattacgagggtggggcttggaatacaggtggatcatgcaccgggaaaacaaagccgcttgcagctggtgaagttgtagaaaatggctttacaaacataatgcatgaaaagcaggtaagtggattcaaccgtgcagttaagaagattacaaacaaatcaaagatgagtttgatggacatcaccagagtgtttgagtaccgccacgatggacatccaggcccataccgaaacacagatccaaataagctcacaaaacgtggtcctgatggaaagcctccgccacaggattgcttacactggtgcatgcctggtccagtcgatacctggaatgaatttgtgcttgagctcataaggagagaccaagagaacaacaccagccttcaatcgtgagacacttttagcattcattaaagtactctgatctaatttgaaggtacctttgcgtttttactagatttaattaacataaattcaggaaggaaaaagcctagtcaagtatatttttttgccttgtgatattcttatagctttatagagagattatttactcactcgtaatagatgggagggttagttccaagttccaactcttgtactgtaatttgtaagttacccagatcattatgtacctagatagaccgagtattcttttttcccactgttacacgtttccattataaataagatatgttctgagtttcggcagatgctccattcatcaaaagggtttgttatttatatattttactgatcttttatgcctacaatctttatgtttttgggctagtttggtatgactgttgcttatgcaacaattagttttattagttgcagttgcggggctgaagataaaattgttgcgggtaaaggccatctccaagtccaaccacaatattatttattattatttttttttgaaaaaattatttattattattttacagtaacacaaacaataatactgaaaaattttatttattataattttactccactacttttttaaaatatatttaaatttagaggagtattaatggaactctcttttgcactctatgtgatgacaaatgtcatatttttagtaagagtgagttttacttaataattagttataatatt

SEQ ID NO: 382147 - DNA, 2658 bp, Cannabis indica
tacttgatgaaccatctacaggtgaaagagctaagatgtttttatttattttttcttaagacacaaattgatacaaaagcaatagaattaaattgcacattgttttcacactctatttatactacattgtctttggagagtactagaattcaatccattgcaggtctccgatgttcttatatttttctttttcaggtatggatccaattgccaaacgtttcatgtgggaggtgatatcccgtatctcaacaagacgaggaaagaccgctgtaattcttactacccacagcatggatgaagctcaagctctgtgtaccaggatggggataatggtaccaactacaaagttctgctctctttagaattttgaagcagaatctctacgaagtgtcactggcaatactaatgcttaactttgaattttttcttgattaaaggttggaggccgactgagatgcattggaagtcctcagcatctgaaaacaagattcgggaatcatcttgagctagaggttttattccgccttcttttcacttttaggtcattgttgtttggttgggaggaatgaaatgaaaaagaatccatttttattacaatttaagacattggaatgccgattccagtggaagcttttcaattattttggttggttaaatgacagctaaaaaatgagaagagaaaaaaagccatttcaatggacaagagtttttttaattattcatattaaaatttattcctttcctattcttattcttattttcattctcatttgtattatgttttctttactctcaaccaaacatcaccttaggttttccaataatgtggtgtcatcatgcttaaaaatatcaaatacctctttgtccttttcttagattaaacctattgaagttagccgtgaggacatggaaaatctttgcgaaatcattcatgaaagactcgttaatattcctgcacactctagaagtttacttggtgatcttgaggcttgcattgggagaattgacaccattacatcagaaaatacgtctcgtgcagagattagcttgtcacgggaagttataagtatgattggaaggtggcttggcaatgaagaaagaattcagatgctcatctcgtccacacctgtacctgatgggtttttcggcgaacagttgtgtgagcagttggttcgggatggtatgatatgatactgcatattgttacacgtaaatgtgcatataatttgtcgattttatttaaccttctgagttttcaggtggtatccctttgccgatattttccgaatggtggttatccaaagaaaagttttcagcaattgaatcatttgttgtctcatcatttcctggtgcaactttccaaggatgcaatgggctgagtgttaagtatcaggtaatacatgaccaacaacatgtcgaaattagataaatttataatttttatgttctcagaatcatgtgcattagaaccaagtgatggaaataatgttaattctctcctttttcttcttcttctcttgatataatgatatgttttccattttaaactaagaaaagttcctgttagtccattacaacttttgtcccttattatttactggtttactccaactttgttcttttaatttttgttaatattgtaattggtgtggaccattactgcagttgccttatggagaagggatgtcactagccgatgtctttggacacctcgaacgaaacaggtacgaatccattgatccatttcttcttccaccacaaatacatggccttttgattgatcttattagctaaaaatatgatatcttgtgtaatctgttcctcagaaatcaacttggcatcgcagaatacagtctcagccagtccaatctagaaaccattttcaatcattttgcggcaaacccctaatatataaaatttacacaacaaaattttacttggttggttttctcattcaacaaagagtaacaaatgaaacaattacaacttatagaagaaggatggtactctcctacaacaaaattttatccattgaaggttgagaccatcttctcttgactcttttgtaaatattactaaccccttattcataattgaaagttacagcatttctctctctctctctagatgtactttttatgctagagaagtactacttttgtgttaatattttcttcaattacagaggtgggtcatgcttatttcttttcttcgataaagtttggttgtggctgtgggattgagctttaattaatgtcttaaggtcggtttttatgtttcattaaagcatggcagagtcagacaagttagttgtgtgttaaagagttgtattccttgagattgcacgttttaaaggttctttcctccgttttccaaagcttctttttgaatgttgcaaagaagtaggtaattctttttctgatataattaatttgaaactaatttctagcatggataaaagcaaaaatatgtaactagtttgattataatttttcgtaaaacacaggttctaaaatagtatttaatctaattggaaagggaatcactattacaatttcattattttgtttgattttgaaaatattgtaatgctttttctatactattgtaatcaccattacgctgaatacgcataatatttgttcaataagagtatat

SEQ ID NO: 382148 - DNA, 1395 bp, Cannabis indica
ttacaaacaaaagattctagaaatattaatatctgtgtcagattcaataatgttactaaattgaaactcagatcataaatgagaacaaaactacttgatcacctgaaaaagagtcatcgggaacgaatggtgaatttcccttcctttgatctcatctggcacgatattattgctaatggagatattcagataactatacatcaaagccatgaacttagcgatcacctggacatagatagagaagtttattgaatatcccacaatgttttcataagccaaagaaggaaacagcataaccgataaagaaacaactttgttggcaccactcaccagagcctcatagcactccttaattgattccagaaacatgaaaaaagctttgcttccttggatatccactaagcccacaaaggacacgacggcatataatggagccataagaattatagttatgatggccttctgttctttcgggttcttccagtagaacaaatgctgtgacaacaactgaattgtgaaatgcatcgacagcatcacgcaagatgcagaccctagcagagtcatttgggcaggactcatcgaactgaagtccattgtttaagaacgagataagtaccgatcaaaacctgcaaaagaaaaaaagaaaaaaaccttcagaacctcttgatttcagacgctctaaacatcttaaccaaatcccaattcccacacagacaaatgaagaagcctaaacttaaatatatagttaaacaaagcatacaacccagtaacacagtttttctaagcatcgtgattttaagatgtacagtactaaaaaaccatttttttcaaagacccactaagattatcgtcacaaacaaaaagtacatcacactaaatagccgaaagaagatgagaatggtgattgatccattcagagaataagaaggctactcgatacacaagtctaaagcgagccgaatttgcggtttaaagggtgtgaagtaataaaattgaaaattcggagcacatgaattattataaattgagaggcaaagacgcggaaaaactcaccgaagcagaagaaatcgagtagatcaaataagttggagatctcagacctaagtaattttcttcgtgttcgaggcctcagggacgaattgaatgaaagccatgctctgctctgcaatttcttcacatttgaatcaagactactctttaccaataagatttcgccacgttttctgtgggactacacgattttgttcttttcattttccctttatttatacataaaaaatcatgaataatatcttagcaaaaatgtgtaaaacttttgactaatgtgtacaccttataattatatctcttttggtgttatggctgaatttttaatttttgtttttgttttttttt

SEQ ID NO: 382149 - DNA, 4922 bp, Cannabis indica
tttttggaaaattgtggaatgacataccataaacaaatgtgattaagtcagcaggtgagacaggagttcctgttttactaattatcaaatgggattgaaattcaactttgatgatgacagtgcttactgtaacattgagctacaaaatcaaaattccaaatgctttgcttacaagttacatccaaagaataatagcttaacaaagtgaacataagtatgaattttgttgcttacatgaaaagcgaatcgtcggttcgcttgattagtactataaataggtactaagttacccatgttcacttgtaatgcattagcaatctggtctgtagtatttactatgggaattctaaagtctaaaaagatcttcaaatcctcttttttgttagttgcaaggacagttcttgggaccccattaagcactagctcataagatggaactgcagtccagaaatccactaaaaccggccctctatctgtgaaatttatcgacatttaaaaaggcgaattaaagttgaaagaagggtgtgtaatcatttgatactctatgttttatctaaatataagtttagtatcttgtgttttcaataatgctcatttagtactctgaactcagatttgatcaaataaatttattaatatgatcaaactgtcttcaattatatgagttccaaatttacatttagttatttaattatatataagtgagatttgactttaaacatgtacattttcaaaatactaaataccgccagatgagcattattaaaaacataaagtaccaaacatgttcttcgagaaaacatagggtaacaaatgagtcctaagaagaatgctaaggcttaccaaagtgaatggttatagaggagccatttgttcttgtaaagctattccctgcatgatctgtacaaatattctctgccattctaactaccactcgtccaagtatgctcgttgtggagaaaactatgtcaagcttgtaatgaatagctggcttaataattcgcaatgatttcgggtttatagaggctggccctttgagtatgacctataagaagaagagaacatattgtattaactaaagcatggagtttgctatgaagtttctttaaacattgcaattacatcacagtttgatgaggtcaaacacttgaagccaccccttcccatgcaagcttcactgaatttgatatcaatggctactcttttagcattggtatagtcttgcttacttgaaattgttgcagttggcggtatcgtatctaccagatataaacagcaataacaaagtaaaagactttatcagtaaaagacttaaagaacatttactggtttttgaaaatgaaactgtaataaagatgcaaagttctcaccaatgaaccaagaataagctgatgagtttctcttgccattccaggttgtaacattgagaagaaatttatggtgatggttcacagttaaattcttgagtactaacaatttatgtggacatggactcaaaacttggtcatcaatctgtttacatacattactacatgtatgaatttccaagtctatagtttcaaattgccattataaatgccttaaaaacttcctacattgttaaatggcattaatgtagagtagaactataaagaagcttttaagtcaagaaccattttaatatttccacatagtacctgacagtagacagaacatgtattattgtggcatgcatttgaaccatccaaagtctcaaaagagtatctgaaaactgcataggagtgccttgatcttggtggaggagcttgagcaaaatgaatgaggacctttgattcaactgagttaagtaataatagtacatgtatcagtataacagcagcataggtatactgcagtaaaaattgaatcttgagagtgcccattttagaatgtggctagaagaacttgacatttaaaaaagaacagaaaataaaaagggcaaaatccaaagaatgtaaggtgttgttgggttttgtttatgaacaaaaacagaaaagaatgagtctaccaagagtgacattaaatgtgaagtgttgtgtggtttttgagctgaagagctacagagtaaaaatctcaggagacaaccaccaaaccaacttttcttgtcagtctaataactgctcctttaaagatgttcacatacccccatttactatcatcagccgacctagctgtaaattttattattttggataaattttctttacatatttttttctttataatgatgtaaatgtaatgctctctctctctctccaacatataatctcgaaattgatgctcataactattagatggatcatgaataagaccactcatttaagaggacaatatgtattcaatcttctctaccaaacgacaatatgcttaacaaacgacattattccaccattgcaaaatgttgtacacttgtacttggcaaaataagcataatgaccattttccttaatttaataattttctataaaataacattcccaacaccgtccaaaagtatcattatcaacagaaaatgaatttgcaaattagcattaaaagatgtctcttttttaccaaatactcttcttccctgcccatacaaagtgttagagactgaaaattttagtgcggaaactattgaccttattgacataactatgacggtagcagtaatctaacttgcaagttacaaagataactctgtaacaatgagaagaaatcatatttcttgaatggaaacctcatatgtgcactcaaactcaaacccttctgtcttatggggttacttaaactacaaggttttttaccggtacaataatattgaccaatctgtatttacaatttacacttctctctttcttaaacagtttccccctgtacatatgatgaatttttacacagggtttatcggtatgaatgtttataatttcaaacacagattgaaaaggtgatttatggtttttcttcatccgattcatcgtaatcttctgcggccatccacgataatttcggtccctggaaagataaacacacgtaagaaaacagaaatggtgaaagtgatttgaatttgctcttacataatgtgtttccattttaacaattgagccaagcgagtaccaccatcccttgctattggaaactctagtttacctttccttgccgaatgatttttggagggttaaccgtcatgtcaactacggttgaggggtcagcaactcttaacccggcatcaacgataaaatccagaccctgatagaatttttaatccacaacttgagagcaatattacggaacagatgatgaacataaaaggacctagtctatggtctagctgtgatttagcagttcaagacatgtaattaaatacagttgcaaaagtttatgattggaaaaaaatgaatcttgtcttcaaaataacaagtttcttcatccattgttattgtgaaagccaagaaatactggttattgttttattttcacatgttcttttgttctttccttttcgtgttgttcttacataagtaagttatactattttaataagagaaaatacaaagattagcaggattcacatagctaaagataaactaattacatagtttcactgcaaaacccaaaatttatataaaagatatacctcaggcctataggtatcagcaatagcaactggatcaagcatccattcattctcatttaagctcttcacactggcacaagcagcacacattcagcattaaaggagaatagcatatgtgatacaagaaaaaaaagctccatatagttatatacaatgatagtgaagataaaaacatatctagtctccaacctatctttcctatgtaacaatataaatgtatcaacctaccttgtagatatcaatggagcctccatcttctctagtattgcttgacatattgcatcatcaggtatacgaacacctacgtttttcctcgaagcatattttgcagttgtagtcccaaaccttatgcactgtttaggtaaacctttgctagccgttaagataaaggtgtactgtaagaaacaaacttgccttagataatcaaagtttgccatttcaaaagatctaatgaaccaattgaattgaacctacacaatgaaattagaaaacaatgaaagagcacacttacaggtccaggtaagcactgcttaacagcccggaatacgcttgtgtggccttgaccatcacctcgagggaatcctgttgtgtatgtatctatgtctcgaaaggagtggcataaaatgctaaggggctgcgcaaataatgtagaccatgttcatgaaaatttaataaataatgagataatgggcaggcagcattaccattacaaaattaatatcatgaacttattacacagcaactttgtgacattacaagtttgacagcacatttttgaccggtgtctggttgagttccatgctgaaacatttttttcgaacacttattaaaggaagcaaatgaaacttgccttcagaggttctatgttcttgattctgcaagagaaaaacacgaaagagcctcgtcaagaaggggtttatgatgtttgagaaaacaaagaggacttagaaaaatcggaggatcaatctgtcttagtgtcttactataagatctaccttcgaagtcgctcaatggcagagtggtttctcaaatcacaaacaaaggcatacctacaaaccaataattttgctaactcaaactcaagatgaaataaagaaaacagtaaagagaaaaaaacacatacagattgaatatgaacttaaattcaatgttaaataacaagaactgaaagataaaaaaggtcaaatgccattttagatctgtgtttagcaaaaagttatcaaaattatcaatttgacctgagtatttcaatggcacataatggtaccatgatctcaaaatgtaacat

SEQ ID NO: 382150 - DNA, 1006 bp, Cannabis indica
tatttttggttgtctattagtttatcctacaatactcagctagtcagcttccacaattgactagaaaaaaccattaaaaaacgcattttattattattctcgtgttgaatattttaattaacacatctttgttgttgtttttgttgtataattagctcattatataatccaagcttttagttagtggtactaaacttggaaggttgacaatttcatgttatatatattaactaaaccaatttaattataaataagatagatttgaacttaattagattagattagatgataattttgaaaatttaattactaattagattagattagtacaagtaatttaaagtcattaatcactcttaaagtgtcaactcatggtgttgtaaatcacaaataataaggctctttactattggagtactatattatatatcgatcaattttaaataatataattaatacattgtgagagactaaacgtgatttcatatttatatatttatatattatagtatatgatattgtgattttgatttaattgtcttactaaaaaattatttgataacgattgaaatctaattttttttgacattgagagatggagatttgaatttgagacctcttttttataaacgtgaaactattaagctaagtctatgaccactactaaaatctattaattagagctaaaaatacattaaaatcatactaatttaacaaatttttagtataaaatgtttttcttaagtggaaggaagacaattttgtatcatttatgtaacatgccggcctagctaacccaatttaaaatattttgatgccacaaatatgtataaaaaattttagggatattatttttgtctctattatacttataagagtatttatttatgtaacgtccccgcttcaagcctctattgggcccttacacccacggactaatggctcttatacacgagtacgccacactctggctgctttctggattgatgactgaccctacagacca

SEQ ID NO: 382151 - DNA, 2650 bp, Cannabis indica
ttaacaaactatatattttagaggtagatttaggtaatgttaaaagttcagcggtaaaaatattaattattctttattttattcttgagtttttaagttaaaactaaaaaactatttgtgagaaataagtatgagattctattaatagcatacttattgtaatttggattgttaaaagatttttcattctattaatcgcacttttatgattcgttgacgattcattcaaacgagcaaataattaagaatgttctagttagatccagtcctcgtagtatgtaaattgaaaattaaagtaataaataaagaaagaaaattcacataatttattaattgtaaacgttattataacaaaccatatgatatgtggtgagctaaaatcatgatcgaattggggtaaaatcattacgaacaatatggtttttaatttgctatatatatattattaatatgatcatatctcaattctaactatatagacacttacgaaatatcatttgcataattgccaaagttaaaaacttaaaacgtaaatcctagctactagctataaagcacgatcaagagatctatattgcaatataagtgttgcataaaacttcattattgctgtctagtctctgcttgtcattgtttatgatccaccaccatttaatgtcgcctattaattgatagggaccctgcacaaccaaaaaataattatatatgaaaaaatatattattattattatgtagtgagctatatttgtataattaaccatggcccatggaaaaagcaacattaaatcgacgatatataagaccttttatatattatcagtctctcttaacaaattaaaattcgttaaattgacatataatctatctccataacaccataacatatatgcactatatatgaatggttaattattataatttatatatgaccggtagtacaactgttcaggtcacggtcaccctccctcacacatatatttacgtatatgcttgtttattcaggggccgaaccatgtgcacccaaggggtcatgccccactatctatcactgtaaatttattatttggtccctcttttttagatttgttcataatggcccctctggtttggccactgtgtatatgcataatcttgagaagcacacagtacggcagctaaaatctttgcgttgtttgttcgtacgtatgtaatagcacatagcacatatgtcggctttgtgtaagcaattatctctctctctctctctctctctcatataaagctggaaggaacattaataaatcaatcgaggactctttagttgggtttcaagttgaatgatattttacgtttcaatggaactaattgatcattattaacagcaaaaaagcaaaaccactttatttaagtggtgagtaaaaaaaattattatagtttagagatgtttagcaattgcatattaattgatatttatgaatattattgtatagtattttattaaattgtattttatataatatttttatgactttgtttttagtcaacgaatcttcaaagtggtaaaattaagtgatcaattactaaataaatagtaataatataagtaataagaacacaacaatttatagaggttcgacatcctggtaataataatagtctactccccgtattgatcaagtcaaagaaaagctcttcttccggtcatccacctctgtttcttcgtcttaattaagttgagaaatcctgggataagactacaatttctataacccctgaggcaaagaaggctcgatacatgactgactgctactttgatcgggttatgcccgatgtgatcgagtagctgcaaggagcagacgagatgtcggtggaggtcctgaccagagacttgctaaaggagcgcctgtccagggtaaatttacttcttgtgaatatttttttcggttacagttgtctagtttttttgacttgttatttttcttttcagatgaacctcaagttcggatatctttattcctgagggcttttgctttccaggcatctttggaaagtttcgagctgaaacaggttaaggactcagtccaaaaaaggagacaactttggccgaaacaagaaatgttttaaggtgaccaagaaggttggggacttggagaaacaacttgctgacatgcctaaggttgacaagctaccttgagaatgagaccaaacaggtcaatgagttgatcaatgagaggaacaacctttgaaagcttcttcagagtcatgaatagaaaatcttaaatgtgacaggagatctgtccgcagagaaaaagaccctaaccaaaggtggtccgctgaaaaatgtcaccttaggtgaattaccaatttgtgaatcttgcctagaaggtaaaatgaaaaaatgttcattctctacaaaggaaaagcgtgccaaagaaccactagggttagttcattcaaatctttgtggaccactgaatgtaaaagctagaggtggttatgagtactttgtcacttttaatgacgattactctagatatgattatatttaccttatgcataagaaatctgaaacatttgagaagtttcaagaatttctatcattagctcaaaactaattgggtaaaactttaaagatcttgcgaactgataggggtggagaatatatggatat

SEQ ID NO: 382152 - DNA, 600 bp, Cannabis indica
tttttttattattattcttatacagtttttttaatacttatttatttttaccattattgttctattttaatgccatgtagaaagcatattattggagaagaaaatggagacaaaatgccttaatttcatacagaatggcagattgagaacatgagtgaagaaacatcactgaatttaatgatatattataatattatacacacaatatattaaatgctctcctctcactcttcttttgtagagagaatatattaatattttgagaaatactatcttcctaaagtgtaatattgatattaatgaaatttaacttattttattataaaaaatcacaaattatatagaaaagggaagaagtactagaaatcgtagtaagcttcatttttgttcttgggagcaagtttgcttacctaagcacttaggcttggtttaaagattatatttggacaattttaactaattaaacaagataatttgtgggttggttggataaatacaatctaactcttggcaatgatgtcagttttttttttttgatttaagcgtttatatattacaacatgttttacctgggactcgaacccaggacctccaacactc

SEQ ID NO: 382153 - DNA, 1051 bp, Cannabis indica
aaaaaatctaattgataacttttgcagaacacaaaggttcaaaataatatttactcataattaatcatattaaaaaaaaaaaaaataccccctattgttatattttaagtgtgcatatttacattattaaattgtaaagcaaacaacctcaagaaaaaacaaaaaaaaattaaagcgaacaattgagataatttataatttgagcaaattaaataaacaaatgaaaggacaaaagaggtggaatttgaaatagctgagatgatccatgatgttgtatattaccgcaataatattatatataactaattaagtttttgaatggattaattaagttaattgcgtgtagtgttatatctcaattttataaatatatattctacaaaccagtggttgtaagttgtatctccaagagctagattaatcgatttattctaagctttgtcatttaagttgtatataataacatatagtacacataacataactaactacaaaatatattaattatatattaaaatacattattatatataaggatcacatttgctattataatttgttcattattgcaatgcaatccaagattaagacaaatcaaatgtaaaaaagaatcaatgtaatcaaatataagattcttcaagatgtcaaatgagaacgaatataatatatatggaccacaattacgtgaaaaattaaaagttgtgtggctagctttataaagtcttaatcaataaaaacaaatgattatggaaaaatctatagtacccttaaaatgggtgttctaatacacttttattttattatattttttatttttgtattttcggagagtttttatgtttttttttattttatttttgttatgatattgtacattgtaattattttaaatcatttgtaaattatttaaaaaattcataatttatagtgtaaaaaataaggttaaaatatattgtgacaatcatgattattttttcttagtcaataatacatgtgtttgaactttttttttttctagtactataaattatttagaattttaaaaaattta

SEQ ID NO: 382154 - DNA, 3088 bp, Cannabis indica
acagctgaaggcttagtgcatgtggtatttttgtaaatatttgtatgtggactgtataaatgtttaatgggccggcccaaagtatttttgtaatttttttttccttttttgtattttttttgtttttttcccttattttttttcataaaatataactttttttttcctttctcaaaacgttagtaaatggtgaaaatcatttttttattgttcaaaaagtgattattattcttaatcttttttaagagggaaggtgtaaatgaacatatgtagggtataagagaaaatgtggatgtggatagataattgagttttattttttttactattgaaagacttaattagtctagtaaaaacttaattagaaagagaaattatctatatgagtatgaaagttggctagtaaataaataaaaaataagaaaattagaggttggtgtttgatttcgtgttcaatttgaggacacaagaaagaaatatgttctttggttttgaaaattgaaaatgtaaaaaagaattaaaatttgaaactgaaacaaagaaagggaaaagggaaggttgtcctgtcatatatgtgtttgcatcaccacaccaaattagatgcaaatggacatttaattgggccttaaattagcccattagaaagccccatgactaggcccattagttcaagttattgtattaataacatgattttattaaggtgatgatgtttgtgctcaccatattagaattagaatatagataggaataatatagtactatgtagaatagtataagaatagataataatagaataagaattatgggtttgataagaagtgatagtggtatgaaatagatgttgtagttaagaaaaataaatgaataaataatttttgacttaggattttggctccccaactttaatatacataaaattagtatctcgaacttttcaggttgttaaaaatttatcacaaactattgagattgttggatcaaaaaacttctgttaaattttactaacgaaagtctgacatggataaaatttcaagtggtataatttagtacatgtcaaagtttgagagtacgatttaatacatgtcaaagttcgggacacgatttagtaaaactacaatcgtcatgttaataaaattaaacgaaattagctagaaatccttaaatttaacaatcttaataatttaagaaaaattttaaacgacttaaaaattattaaaaacataatttaataaatgttaatgttgagaaacaaaaatcctagtaaaccataatttttttacttttccattttcaagattaccaaaaacaactaggggaaaaaattatttctttatttctcttctattcttttttttcaaaggccaaaagtaactatttgcagaataacatacacgtggcagaagccacataaggacacacgttaagttacagtgaatcgaagaacactggaacaaaaaatgagcccaaacaaccaaaggcgggaagaaagggtttgttcttcgcagttttgaaaaccctaagagagagaaaaaagctcagagaaagagagaataatggcgcacagggatgaacaccacgaagcaaccgacggtttggagaaccttttgaagaaagccaaccacgatttgacactggttcaactcaagctcgacaaggagtttcaacagacttatcccgaaaatgttagtcccctcaaaaattcaatctttaatttcactcatatagattataattagattcattcatgggtggtgtttgattttataggcaaatccaatgaaaatagtttctagaataaaaaagcttcaagaagatttatttaccttaaaggatcagtgtcgtgagcttttgtcagccaaacaggttgaaatttttcaacttttaaattgaattagcattaaaaattttgttgggttttagtttaatttgaagtattttgaaattcaggatttgattgataaagctaggactgttattgttgggaatagaaactcaatccagagaatgcaaaaatcaatgggtcttactcaagtagatgattctggtgattctgctttcgaaaacttcaatcaggtaaaaattatatttttttattcattctttttcaagtttgtctttgattccattggatcggatcatccttgaattttttttaattattttttatgagaataggaattgaaatggaaatggattagaataaattttggcaaagataggtgaaaaaccacttaatgctaagctcaagtggcaatatggatattgatggggtttggggttcctgggattgaatccctagcttgtgtaactcaaaaaaagtgtatatagtaaaagtaaaaaggcaaaaatgaggcaaaaattattgttttttcataggaattgaaatagaaacggaatggattaaaatttgatatgcatataaaagataggtgaaaaatcacgtagtctagctcaagtagcaataggagtattggggtggatcttagtttttgtagctcaaaaaaggtatatattaaacgcttcaattcggaaaaaaaaaaaaataggtaagaaagttgttgtttttttcatctttgtatgggaatgtacttttttcactaaattttgaaatgtaatagtcttctatcaaaatggtggaaagtttatgtttatttgaattgaaatgatactcttaaatggaatttggactatggattatttttttttccattacaatccaaacacatcctagtttgtaatttgattgatgttgaaaatggttgtctaattttccaagtggtgtttagagtaacttcaccatttgccagcaagcaaccaagattgatttatggcaaggcttcaaatatatatatgtatatatatatatatgtatatatatatatgtatatatttatatagaaaggtgttctgttgatagttttgagccttacatgttttcacttattttcttttcacttgtaaaattgatttgaatatgtatactttgtgtatattacatgtaaagttgtagactaaggaaatgttactacacatttggtcttttaattatgcagatcattgatgagtggactgttcaagttagatc

SEQ ID NO: 382155 - DNA, 4851 bp, Cannabis indica
atcacgacagctagcattggaatggaatattcgtactactttgacagctgtaattcggttaccgcagtagaggtcgtggccgaggaggcagaggcaacaatcgcccaatctatcaactctgcaatcgtattggacttgttatatcaaaatgttatcatcggtttgatattaactttcaagcccctacaccatgctccaatcaaactaactctaacttctctggcagccaaccttcatctggccaaaattaacatgcattttactcttccactggtgatgctcatcaagacaactcatggtatatagacagtgaggcaaccaatcagattacctctgatggccaaaacctgcagaacaagtctaaacacaaaggtactactaaactcattattggtaatggggaaccccttacaataactgaaattggtcagcatattttgacaattaataatgcctccaatcttttgttaaataatatcttttgtgtgcctcaaataactaaaaacctaccgtctatatctcaacgaacccatgataatgttgtttttgtaaaattttgttttgattgtgtcattaaggatctggtcacgaggagggagctagctcgaggagtgcttaatcatggtctttaccaacttcagctgtccaagtcttcatcaaaccacctcaatccaccaaaaaatccatctcaatgttttatagtttccaagaaaagtcttaactcagtcgtttccaagcagagtcctaacttagtgtctttttgtaagagtcaatcaaatgagcactttcatcctgctcaatccttgtttgtccagtctaccaacactactaatgtaaatgtatggcatatcatgtgggcaagtctaaacataaatactatcactcttttgcaaaatcagccagtaaaccacttgaaaccatttactctgatgtgtgggtgcatcaccaatcctttctagatatggcttaagatattatctacattttatagatgaatacaataactttacatgaatttacccccttaaactcaagtcagatgtcaaagaaacttttatttagtttcaaaactttgctgaacgaaggtttgattcaaaaatcaagactctccactcagactggggaggagagtatcgaagtcttgtgccattcttgaactctctaggaatttacttcagtcacccatgtccccacacacatcctcaaaatggataattcgaacaaaaacaccaccacatagtcgaaatgggccttacactccttcatcaagcatctataccattgcattactggtgggaagcctttagcactgccacctttcttatcaaccacctcttaactctcacattggataataaatctcctattgaagtcttattcaaactcaagcctcaattaaactttcttagagtctttggttgtgccacttttcctcacctttgtgactacaattaacacaaatttgattttcgatccactaagcgtgtctttctcggctatagtccagaccacaaaggtacaaatgtttacacccctctggctgtatatacactctccaaagtgtcaccttcaatgaaattgactttcctttttccaatagattttgcacctctaattttaaaaattctgaaattaatacatgctctaacttaattccatatagccattggtttccttgtttttctccatctttgcaggaccatgttgaagttaatcctccttagcagccacggaccatgatttagcactcccttgctatcttctccatcatcatcctctggctcaacatcctccactaatcaaggtaaaactccaaactcagcacactgatactccattctcccacatgagatttcctacctatttctacctcaccaattcctcaacatagctcaccttctctatcttcttcgccaattcctacaccctccaacatcactcaccacctcatgatcacccgctccaaagctgatatctacaaacccaaactttttctcaccactacatctatactactggttgacactacacccgattgcctttatcaagcacttcgtttccctcaatggtttgctgccatggatgataaaaacattcaccttaaaaagaaaagacatggattcttgttcgatgccaacctcacatgcatatcatctcaaataaatgggtgtatcgtatcaaatacaatgctgatgggttcgtcagtcgcctcaaagctcgtcttgtggccaaaggattttaacaatagccaagaatttatttctttgaaacatttagtcctgttgttaagcccttcaccattcgtgttatcctctcacttgttatcactaacaactgggacattcaacaaatcgacataaataatgcattcctcaatggcaatcttcatgaggaagtatttatggaacagcttgcagggtacgttgaccctaccaatctcacagctatctacaaactcaacaaaactctgtatggcctcaagcaggccccacgtgctttgttcgataaattgaaaagctctcttcttgctcttagtttttgcaactcctcctttgacagttctctattattttaccaccacggtgatgccttcctttttgtcataatatacgtagatgatatacacttaataggaaacaatgcatctcaagtcactgccattattgccaaacttcaaagcctttttgccctcaagtctctcggttccatccattactttctaggttttgagatcagtatggggcatgatacattgcacttatctcaaaccaaataccccttgaccttctcaagaaaaccaatatgatcaatgctaaaccatgtcccattccaatgaaccaaagcaacaaactgagattacaagacatcgttaaatttgaacatccagccatctttgggagtgtcatgggagcgctccaatatctcactctcagccggcctaacattgcttattcagttaataaactaagtcaatttctacaagcccctactcaaaatcattagagtgcttgcaagaaaatcttaagatatcttgctggctcaattggaaagggaattacattcaatagagcttccaaactagtcattgaaggttactgtgactcagactgcgcaagctaattagacaatagaaaatccactatagggttttgtatttactttggcaataatctagtcagttggagctctggcaagcgaaagtctgtgttcattcgagtatcgaaggaaagaatagagctttagcccaagcctatactgatgtggtctgattacaatcgtactcactaaaattggcataaaaggctctgaaccagctgtctctagtgcgataatactggtgcacggcaacttgcatccaaccccatgtccattctagaacaaaacatattttaatagatgtgcacttcattagaaaaaagaaattgaacaaggaagtcaaagtaaggtatgtgccaacataagagcaaatcacagacatactcacaaaacctcttagcatcgcacaatttcattatcttaaaaacaatcttgttgtttctcactctccacagcccagcttgaggggcctgttgaagatgagaaaatcaccataacagaattggatgagaggatagacataatagaatttaatgagggtcactatcacgacagctagcattggaatagaatattcgtactactttaacagctctaattcgggttacaacttttcccaattttgtgggatattttcccctttttgtatgattgtatattctgctatagaatcccatttattccttttacatccctactttaatctgtgaataaatagcaacattcatttcttcctttgtaattgttgagagtattaataaatcagtcattaaaggagcatccattttctctttttaactatgcgaagccaatcgcgtcccaaccgcgcgaaggacccatcctagccgtctaagttcgttcctctaccgcccattcagtcctatcctttgcctgttgcccatctgagccagtttgttagttaaatttttatttttttttattttatttaaatcaggccttagtctaggtccaagtctggggacgagttcagggtcgaggttcgggggtcctggcctagctctaggactgggttcgggatccgaattcgggtccagggttcgagtctgggtttagggtctggggtttgggtctggatctgagtccgtgcctgggttctagatccggatccaggtctggttccaagttcgaggttcggggttggggttcacatctggggtttgggtcaatgtctagggtttgggtccgtgttcgaggtgtgggtatagggtttgggtccaagaccgaggtctcggtctaggtccaggtctaggattgaggtcggggtctgagtcccaaggtctaggttgtggtcggagtctaaaatattaattaagaaaaaaaaaactgttcaaaaatattttgaaagtgacttttttttttcctcaaaattttgattcgcaattaaaaaattaaaaagtaaaaatatttttatagaacatatttttagaaaatatttcgacttttctaatttaaaaattaaaaaaatattaccaaatacaccctaaacattacattagtttttagctaagttgttttgtgaataaacattatattagattacagggattatgactcaactgtctctgtagggttcacgacgattgcaggcaatgctcgttgttgacgacggatggttgttggtttctcctctgcgcgctgtcgacgactggcggagacttttggtctatgaacctttgaaatctgcttggtttcaggaaaaagaaaatccttgcaatgtgctgacaaattgttttc

SEQ ID NO: 382156 - DNA, 4559 bp, Cannabis indica
aacttttttttttgttataaatactaggaagttgtattgtcacaatacaatctttactacactaatagcactaccaattacggagcctaaagactatctatacatttcctttccttcttcttttctttttgttactgagtatgtatatccttataatacctgagcacctaattgctcctcaatagttgttaattcagcaaggagctctgtttctttctttcttttctttcttttttttttttttttttttttttttttaaaaaaaaaatcctttcaaacttcatctataattttatcacaatcgttccctgaaattatttgtttagtctctcttgccattctcacagccatttagtttgcaggaatttaggaaataatggtgtttgtgtcattctcctgcaagagccctctgtttagtgaaaggaactcatggatcaataatttacttttgttatctttgaatgccaaagtttgcccaaaactgtttcaccgttagtgtttcattatcttttcttgcttacttcatactttgtgatccttcacaaaattgagtatagtctacaatggtatggtatgagtcctaaagactctcatcctttctgaagaaaggggaggtgtaagaatttcattttttattttttttgcgaagataaattcatgatgggtctgagacagtaggccacttaagaatttgagtttgcatgctttttctgtctttcctttgaaagtaagttttgatccttgaggattttcctcattaaaatcatgtttactgtggcataacaattagagtaaactgtatgttgattttcagagattggatgctggggatgaatcaagccatggtaataataccagcaatgtgttgttcaaaactatgcaatcactgaatgctcttagaggcgtaattgtaaagggtcttgaaagtggccttcgaaatgatgcttctgatgctgcaatagccatgcgtcaaaaggttagataggtttttagcattaggaagtataagcaaaatataccatcatagtttttgttggaacctactaattatacatgtggcaatttttttttggggagcttagtggcgactctgcgagattgggcttgaggactattcatttgttattttaagcaggtgaacatacttttggccttaacacttactttcttgtaatttaataaccaaaagtgctgccctgtgttcccagataataaaggtttcacatctagaggtctacttctgagtgctatttgtttgtttgttttttgtttctaatatagggaaaaaaaattcatatactatagtgattaatttacagggtatgtatctgtttttcttcactgggtatatataactctacaggtaaacaaaacaagagattaccttgtatctactgaaaataaagtgtgctggggaatgatcagagatttttactgcaatttttgtcaatggtgctgtatatcgcaaagttaatatatcagaaagagatgggttgttatgttaatgttgatttgggtcatgaacatctaaattgaataaagaaaaacataaaatctatttattagcaatagaagttatagaactgttttgtttctttcttagcaacttgatgggtccaattcacttttgacaacaattaacattttttagattcctgaatggacttgaggctattggtggtactaagtggctggcagaaaatgtgaaatcaaagaatgtaagctcttggaaggatccaattggttcgttgattgtcgggattaatcaggtaaagttatctggatggaagtctgatgaatgtgatgcgattgaaagtgaacttcttgcttggaaagaaaaaggtctatccgaatcagaaggtgctcacctcatctttcttggttcagtcagttacaattacgacttctgtttctatgttgaagagttcgctctatctttttcttacttctgtaggaagtgaagatggcatggcaatatgggcattaaggctcaaagctactcttgacagagctagaaggctaactgaagagtattctgaagcacttcttcaaatattccctcagaaagtccaggttatatatatttacatacatatgtctaactctatttatttatttttctattgtggtgcaattacagcatatgaaaaacttgtagaagtgattattttgacatctagtttgctcggaagcttatatgaaaaccttgtatgaaaagtttgcttagaagatccacctttacaaaagcaaatatacttgaaacaatataatttagttggcgtgattattaggagcctgacaagcatcaaaatttacaattattgtactcaagatatcataactgctataactttgaaactgacaacctttgtttcttttaaattattttcacgattctggcagacattaggaaaagcttttggtatcccagagaacagtgtaaggacatatgctgaagcggagattcgtgctgggtaacgccttctctttagcatatctaatttttacttccatcacagcctgcattactagtttttctaactttgttgttcttataggttgtgcttatgcaatgtacatataagttactgatcagatgaaaattgttttgaactttttttgtatgctttcttagggtaattttccaggtttcaaaactctgcacccttttcttgaaagctgttagaactacacttggttctcagggttgggatgttcttgttccaggtgttgctgtgggaacattgattcaggtacctcataggcatttaatatggaaaagcatcagatgactcttcttttataaattgtaattcctgtaggtgtacttcagattatttctctttgttctttgttatacatactcttatggtttaccatttcaattgatacagacatttaaataggtcaaagtatcacatgttaatcaatttaacattgttgattatccttaggttgctatttttccttcccctttgatatctttcccctgcaatctggtggtgttggaagagttatatctgacattaaatagcctatatgaactattcgcattgataaatatttttggctgttgggactttcaaagtcaaatcaccttttaacataagttatttgacatcaggttgataggattgtccctggttcaataccatcttcagtggaaggaccaattattcttctggtcaacaaagcagatggagatgaagaggttcttaagactagatgattgtacatcgccattttttaagatagatgtcttctcatagtcaatacattttggtttttgcaggtaacagctgcaacgagtaacatagttggtgtcgtcctgttgcaagagctaccccacttatctcatcttggtgttcgggcccgacaagtaagtaccatgtctcctatgtgttattagtgttgtttgttagatcatactttgcttattaatggacgttacaggagaaggttgtctttgtgacatgtgaagattatgataaagttgctgatttgcaaaagcagattgggacatccctgaggttaatttcttggagacctcctgattcagaatacttgttcaaactcaaaattgtgtttttaaatttcattgattttacaaatatatttgatttgatttaatttgatctttttcgttttggtatttctttcatgggaaacaatgaaggctggatgcatcctcaaatggtgttgatatctatccattttcatctgataaaagcagccagaaagttgcagcaaatgatgattcatcaattgttggaacacctcgacctcaagatctttcttctgctgcaaaaaacccttccgctagtcaggtatgatcctgtttatgttcacattatactcttcttagttaggttgcagctacccgattactattatgatgtgttaatgatgaagatatttcttgattattgatttgttacttgtcatgtttcccacaagggatccgctggaggagtactaccacttgctgacgcagaagctcagacttctggtgctaaggctgctgcttgtggtcgtttagcttcattggctgcagcatctaataaaggtattagcttgtcataactgcatctcgtttaaggtgttaaggctattgtatgttcatttacggactttgagtaaaatactcttgaaggcatagtctgattggctgatttataaccacatctcacgtaaccatgcatacctaaccaccaatatttaggctaaagtttcaaagtccaaatttgcagtcaacattttaggtgataatagattgcattttatttgtggttgtagaaaatagtaaatcgaattgtgtatgtatttcataaaatagtacatatttatatacaaagttaggagactaaaataggaaactaccaacaaaataggaaactactaaatacaagttactctaattcttttacaactaatatacaactaatactctagcactccccctcaagctggagcatagatgttaatcatgcccagcttgttacaaagataatcaatccgcaccccatttaaagtctttgtaaaaatatctcctagttgtt

SEQ ID NO: 382157 - DNA, 1970 bp, Cannabis indica
caaagtcatccacaaatttggttacctcatctacagaattctcgggaaagacattgctacttagcaaaattgaaagcgatttcttgagctcgaaatccctacccgattggatgacattatcaagatcaatatcaaggcattgtttgaagataattttggcagagtcaatctcctctggtgtccatgaaggagggccgaagctgctcacatagttctcctccttaaacctctctccttccaatatattttggatgtcaacaaacaaattgtcgtatttagtagtaaattctgtttctccggaattttttattggtttctgataaaatatgtataacaaaagaatcagatgactaataaaaaacaataataaatatctaaaatgcttattcataacctgatcagtattatagatatcaaaagcaaaataaatatcaatttttaatattaatatgcatttgatcacctgatcagtttttttattttgctcttcgtcttgttttttccagttttgaacgttgtctgccgggccggccatgaatatatgagcccaagacgaattgaattttggggcctaaaaaaaaatattaaaaatagaatgttatgggcctataaaaacaaataatgttagtaaaatgacactaaagccaaaacagagacttaaaaataattaaaagagaaattttaaaaacaaaacacttacttgatcttgattttagaatcgagacttaagagattataaaccgagaagctcttagtctcggttataccctagaggatataaaagtcaatattaatctctgacactcaaatcctacgccaaaaacctatatatctctcaggccaatacatcacattgtagataaaattaaaagaggtgtgtagcaggattcgtactatagtttgaaaggggtgaattggttttaccattttttaaatgtaataatctttgcagtgtggtgatcacttgtgcttaggttgtaagtttttgattgaaagcaatactcttacagacgtctttacaaaaaaaaaaaaaataaataaataatgaagtaacccattatatcgttctatcaaatacttctcccgatagtaaattatatatttctatagtaattaacaatagccatatatataacatgaaaattttgaaaattagactagctcgtacgcacccataatactgctactgctagttataatcgagaaattaccaatagattaactattgtcaactaaataaaaaagactttaaatactcttccaaacctatatataatacatgttgatattcctggttgtaaaactgtacatatttttaaattacaatacaagattcagaaaattaattaatatggatgaattattaataaataccaatacaacttacgtaccttccatttatatatatgaggcagtgaaacagaaaacagtacgtactagctattatattactgatctccgattttgtttgagtacgctatataaatacatgtttctttcgaaaatttacttgggagagatctgagaactgagaaggcacgggttcataaataaaattaattacgaaacagaaaaataacaatttggataactgaacgggcaatataattacttcctttcaccatcttcaataaaatattatgatcatgatcattttgccgactaaattaaaaagctagttttcctatgttagctatgggaagtggctaacctagttttcctataattgccgtgggaaatggaaacgacccaccattaaattatatatggatcattgattgtagtatgtatcatgatcaaaattattatatttgatcgaatattgatcatcaccgtattatgtctttagagcatctccaactgagttgcccattaaacacaatatgcaatttgctcttaattttaagaattttatataaagtgtgttgtttaatatagataatgatgacatgatttttttttaaattttt

SEQ ID NO: 382158 - DNA, 4239 bp, Cannabis indica
aaaaaacaaatggtgaccctctgcttttgtacaggataaggaaaatgtaaaggtaggtgaccctcaattccctaaagctcctgtatctcttaagaaaggtgcgaatccagccaatagacctatataggcgcataaggccaccaatgtccacaagacttggacgcctttctactctgaaaggtcctattgcgcaaaaaaggactgatgcaaaagtacccaaacccaaaaaaaggaaaaaccaccccagtgattgtgttatatgatggacgtgctgatccaaggactcacttggctaattaaatagaacaagatgatgcaagtggtcagggtaagtgatgatgctaagtgtttgtattttttcctcactcactaagtttgctgaagattgatagaagagattagctcccaaatcgatctatatttggaaagagctgcagtctggctttcggaagcaatttgtagctgcctgagactatgatataaaggtggggtcgatcactaatgtcaaacaacaggtaggaggtaggttcgacaatggagttctctaattctgaatttgttatttataattttaatgaatttaagagaatttataggtttttaatttaatttggtccattcacgcgctagccaaaatggagaatgttgtgaattgtggaagtttgagcgctttccgatgatggaaactaattctattagatttgcgctataaaatactgaagtagcacagtatatatacaccaatttttaattgattcaacgataattttaatgtaaatttaatgtttattatggatattaataaaaatttcccaacaacgaacaagtgtgaaaatgaattgtttttgtatttccaaactgattgggttataatgattaggttgtatagatataacaataaaatattctctacagctctacatttgacacgtgtaggaatgattccatagtatatggagctttgtgtgatctggatagaattatctagtatagaaaatagttatatatattctgtaataatcttttaattattttttcttctaatattaaagattttttcttctactaatcttttcccaattgtctatactttttaattgggtggggtttgatagttggtcaaggaactttgatagctggacggtttggttgggcaatgcaaggtctaacattgtggatagtgtgagaactcttttattagcagccgtggtttaccacttatggagcaactgaaacacttatttattctctttttactctaactcgatcatttgtatagtgaacaaaattaaaaataatgtgaagtataagttcttgttgatcaaagatagaaaaggtactagagtggagaagaatttactacaaagattgatttgtaactaataggttttgtgattgtgcttctcttggagaagtttatttgtttatattggcgagttgattaatgaaattcctcttcttcttgataaaaaaaaataggattagaattataaaagccaatattaccatattaatgtcaaaacacaaaagcataacaaatccaattaacatttgataattggactatatatatatatattaatacaattacaattctcatgaaattattaatttgagaccaaatatatatagtaatatatatgtggtgtggtgatgttatttttaagtagcatttgaattatataatggttgagtttgtagccatccatcttgattaatgaaagtgtttatattagtcaagaaactcctttcagcaggtgataatttcttctcccaactcactcttttagatttgtttgatccaggtccaaaacacatctcctcataaaaacttatgtccttcctattaataatacacaaacaaaaaatacatctcacattaatatttgtgtgtaaaaattttaaataattaagaaactacttttagctataactaaattataataatatgtgtcacattagcatattaaatactggattccaaaataataattaataccaaaattggatgaaaaaattcgcaatctaaaaattttcaatttttataagttatataaacaataatattttagttggttgtaataccgataagatatttactttttaatgaaaagatcagctttaaaataagtctttataaagtaacaaaagaacttatcacaaactttgtagatatttaattgtaaattagttaatttaggttatgttatatatctataaatgtttaaggtataatatttaattataatttaagatacattttattaattttcaactttatttgacaaattagttggttaccatatactataacaatttaccacatttattaaatattctttttttattagtttattgcatagctatatttttgttaaaaaaaaatataatacatacgctttagtcacataatttttacatgtgtattatatactgataataaaccaaataaaaatgaaacttacgaattactttaaaatcataacaaataatacatattttcaaaaaatttcattgaaatattacttaaatgaatttaaaaagcaactacaaagttaattatttttcacaaatattttctataaaggtaaccaattatagttatataattagtaccgagcatgctttgataaataagcaataataatgaaaaaatatatatttcccacatctcaaagtcactttagaagaataaatgacgatgactcacctttaaaatattttagtgttgaatatactatttatgttattttatattagagaaataatattattatgtcactttctgtgcatattttgtgtacatgtacactaatataatactaactataaacaacaacaacaacaaaaattaatgtatcacatggacacaaaatatacatcaaaatataatgacatgccaataatttttagccaatcatactgattaagacagcattcgctttcgtaataaaattttagtaattaaataaatattatgtgtgtgactaagcattcacagtactgttaaatgtgcatatatatatattttgtatgaacatatacatcattatatataataaaagtacttactcgctactgacgtagttccaggcgtcccagcccggaggcaaaacaacatcactcatataggttttgtaaaacaaaactcttgaataaggtctataagctctgcctaataatgtaggacctgaaccctttatggtgttaccaaaaaatacatagccactactttcactttgattctttctcccttgagctgctatatacccataactttgcccaggtcccaaaagtgcagtgtcagcaaataagttacatttctgtcaattataaatatgtatcaattaattaagctaaattaataatatataaatatatcaagttaataaatatatacctgataaaaggattgtgcgtcgccaaaaatgaagtctattgcaccttcgatataacaattttgaaaatagtgacgaccaagagcatcaaataatgtgtcttgtacactaatgaaagcacaatcgtagaagctagctttgtctccctcaacaagtgccgctggtgcccacaaaatcttctttccatccctatctttataataatcaccattattcgtcattacaggatgattataatagttctgcaccgcgtattaattaattaattaattaattaataataaaaatgtacttaattagataatatattaaatataagttataattttggacgacaataaatttttttagatgaaagaaactcttctactgatcagtaatgtctataataataaccttgaatgttattctagttgcgacaaaattatcagcgtgagatgaaaatgtaggacttttaacaacgtctccgccatctccccatgcaatcatagtggtgctgcgtctttcgccttccaaaaatatgaattgtttccttctttctattgatactttttcactgtaaataatcataataagtaactgaaaaattagtatatacaactaataatgtaattaatatgattttgtaacatataatatttgagaaattgttacagttatttgtttaaattttatactttgttaattaatatcaagagtacaacataaaaatacacatggatacatcaaaagatcgtattttcagtaaataaaatcttaaaacccgtaaaaatatttaaaatttcgcacaactatatttttaaatttttttattatttttttgtatttttgaaataatctc

SEQ ID NO: 382159 - DNA, 2874 bp, Cannabis indica
atatgaagtggtatgtactaatattggacccgtaccatactcgcatatgtacaccacaatttcgccctaattattatttttttgtttaatcggttaatctcctccatgttccgatcaaataatactataaatatccgtaattgtgaattatattgccttaattgtcaattatattaccattcctataattaaagtctctaattgtattgcttaagtaataaataattgtcttgtcttgtgacatggtcgagtttcaatagacgtcggtgagtgtgttctgtgttggtgaaagagttttgtactgattcttgtttcaatagttttggcctttagtatggaggaggattatgagaactatggtggaagaggtagagatgggaaggttgttgtatgaagatgaagatctgtcggagatagatgatcggtggggccttgtgggtcgtttcttaacgaaacatgtggtggattttcaggcgatgcaacataagatggcatcattgtggcaatcgggtaggggcatgtatgtgaaagaactaagtcctaatcattttatttttcaattttactatgaagtagatattgaacatgttatagaagggagtccatggatttttgatcatgcaccgcttcttttttagagggtgaaattggggggaaaacccaagatcaatctaattgtatatattggatttctggattcaacttcatgggatgacgttgggcttcatgtcggagagggtggttcgggacatcgggaattatataggggtgtttgttaagtcggatcccaacaatttttctagcgtatggaggaattatctcaaggttagagttactattcggactgataagccgttagaacgaaagatgaaactggaaaagaaaagtggtgtctcttgtgttgttcaattcaaatatgaagatctacctacgttttgtttcatttgtggtatgtttggccattcgaaacgattctgtgaactttgtttgaaactcctctgcatctaatttagaagccatatagctttgagataaaggctaccccgagacgaagacattacaatatgggtgcacagtgactccggtcaggcattgcatcaaaataaggcagctctacctctcatggtagtttccagcaaaggaattctgatggggacaacacagttatggaagagagaaaatttaggggactgaaattttggctccaagatatttggataataatgttggtaatttttctgatggttatggcaagaatctacctaatcatacatgtggcagtaatcaagatatacaaggaaagtcaacagaaatctttatggctcccgcttcattacaaaataatataattcttagtctacaggtattggacttgaaaagaaggaaaaccaatattgatgtggggtctagtggattcgtggatagtgggccgaaaatcaatatgtatgacaatgtgggaaaaggtgtcgatgagggtgatgtgattatgggcttcagtgagggtagtagtataaaaaaaacttgaaaggaaacccgccaagcattatgaatgttttaagttagaattatcgtgggcttgggaaccaacgaacatttcaatttcttaaagagattatttctcaaaagtaacctaattttattttttttatgtgagactaaatgtaacaaaaatagagtggaatgggtgggtagacaattgggctttgagggagtttttatggtggaagcccatggtctaaattgtgggctggctcccctttggaaagaaaaagatgataaaaatctattgggcttttcctttaatcatattgacttctgtgttaaagtggagggtaacaggatttggagacttactagtctctatggggatccaaaaagagcaagatgatttcaaatgtgaaaactgatgaaaacaattgctggtgattagaatcttccatggtgtgttataggagatctaaacaatgtgttaacccagattgataaaagaggcgggtatccttacccacgatggcttcttgatggtttctaggcgtgtcttacagattgtggtctctcgaacatggagttatcaggatatctatttaccttaggaaaaagcagagggtcgagttcgtggattgaggcacgcctcgatcgtgctctggtttttgaagcttggatgaatatttttccaggtgttattctcaccgatcttgaacattcaaccttggaccattgtccgttactgttagaactggttgaacgtagtaagcttattcctatcatcggtttcgttccgagaatgtgtggcttaaagagcctatatgttatcaaattattgaggattgttggggtcaagatagtagtatgggagtaatggagaaactgcaattgtgtgcttcgaatttggcacattgggggaaggagttactgggtgctttcgaaaaaggatcaaattttgtaaagatgagctaaagatttagagagatgtagttcagtccaaaggtatgaagacgtcaaaaaccaagtttcatgtatcttggatcaaaaagagacactttggaaacaaagggctaaacaattttggcttaaagaaggtgatcacaacaacaagtattttcatctcatggccagaaagcgcaagagaaacaatctcatttgaaaactcaaaaaaccaatagggagcttaggttgactaggagcacaatttaactgaggtaatggtagactatttttcctctctttttttttttggcttctagtgtttcttgtcccgaagtggttgataatgtggataggcttgtacctgatttggctagtgaagattttcacagaccagtcacggaagaggaggttcgtaaagcgatctttcaaatgcacccggataaaagt

SEQ ID NO: 382160 - DNA, 5863 bp, Cannabis indica
attattataataattaataacagtcatgatacacgtttacgaggaccttgtcatcttgcaaggctatctttaattattttccatagacgtaaagactaccaaattatgactactaaaaaacgttaggaagtattataataaatattaaattattaatggacctcagtagttttttttttttttcttttgtaacataagaacttttgaaaaaggaaaaaagaatttatatctatttatatgaatatatagaaaatacccattactcatttaacccgttttagtgatattggagtactttcatgtatcatcgtttattatcatttatatatttcacggaattaattaattaaactttaaatatgacgatgattagccaaataaaaattaacacaataaaaatcattttaagttatgtgacaatattatagaagcttggataaattttaaagttatttactgtaagctttgttcttgaattaataatataatactaataaataagtagtaataagagcttccactatattttaatttttcagatgaaatcaaatcatcaaaatatgggtccaatggtgtggaattccagtggtactatatttattcttctgaaggtacgtatgagtggactcgtatgattaatttacatgaatgatttgaaaatattgaaacttatactgtcgtacaatatatgaatctgaaattgagtttttatttatttatttatttaatgaggttaggaaataactcaaatatatcgctggctttcaagtggactaattgctgaaaatatggccaaacaagtgtgcaatgcccttttagtccttcaggttatatatatatatataattatttattatatctaagctatccaattcggacattcctaaatttgagaaaaaacattagtcctaattcatcaaattatatatcgttttcagtctgtagcttcacacccacaaagccggaaggaatttattaaaggtaattaaatcatccttattattgagatttacaaggaagataaaaagatttaacaagctaatactttagtttttagtttctttgctttctctttttattggttttgagtctaattattttttttttattatttttatactttagctaatcttgcagaatatctgtaccctttgatttccataacacacagacaggagccttatgaaaatctgagggtggccagcttaggtgttctgggctctttactcaaggtatggttctcctcactcattatcattaaccaatgaaaatgttcccatgtccatgtcttaatgtgcaatttttatgatcttaatttgaattagtttggtttaccaaatttttgtgtgcagcaagatgatgcagaggcccttcattaccttattcagggtgacatattttccaaatgtctaatttgcttgcagacagacagtctaactgtcaaaacggtaactagattgcattgattctttccaaccaagtatatttgtatttgtattgaattacttgttatgatataataataacttttagcaatttgagtttacaattttcgatggaagtatcatataacttctgtgagtgtattatatgaaggtggctgcgttcattcttgaaaggtttctgtcaattggtgaagagggtctagaacactgctgttcttctgctgaaaattttctctctttgtcccgaactttagcccaaaatattcaagatcttggtagagaaccctgtaagcgatttctaaatcacataattaattgctaccttaagcttgctgagaacccaaggtgagttttaaacatagttttgattatgattatgatttggtttgaatgaaatactttaagttcagcatttactaatgtaggctgtaattttcttgatagggcatgtgacattttagagtggcaactccctgcgaagcttactaatgttaccttccttcaagtactgctcaatttaacttttccctatgaaatgtaactctctgtagcattttcaatatgacatttttacatgttcagtgactgaaacttaatttgggtgtttttgcagaatgatccaacattaattacttcggtccgaaaattggttctcaaagtctctactggacatcgcacccaaaagatgctacacccaaatggtaaacaggtcttgacctttcgtaagtagaaagtgcatcctatcgatctctgaggtccatgaacgccaccggtattacagttgaagatgagccttggcgtttatgcattttttcttcttttctggaactagttataagttgtctttgttctttaatttcaatgtttttgatccttaccaataccattgttctggtactgaaaatttaaaccagtgtttcttaattttcttttaaactaatgacaatcaaattgtggaaatgagatcaaaacaacctatctcatatgtcaaaaagatagtttagtataactggaaagacagatcaaagaataaaagttacataatcagatataaagatggaaaatattgggcctcaattttgagataacgagttgaagcctccaacttgtgaggacgggactgaaagattgttgtcgagcatgaaagaaagatcatgcatttgggatagcaacatctctacatcatttgcttcggacttgatttctgcaccagtgacatttctgctcttctcgacatcttcggggttccctcctaccattgtattatcaccagatgtcctgcaacatgagagaaagtatgagaactgaggtcttgactagtatttattctagattcgaaaaagaccacgggccaaaatggttgtttcagcaaccttcttctcaaggttcacattcatttgaaattgatctctaagtcgttaaaaaaaggtttcggagaagtaagaaaggtcaaaatgataaaaatgaggggacaaaaacgtaggtgaaatcaataagccaacatgaacggcatccacacaggtaagaactggaaaatgttctgttctttagacatggtcaaatgcccaagaagtggatttaaaatacttaaaaacatactgttgtgatggatactacaaaagatagcattataacgtataaccaggcatgtcaaactaatattaataacaactgtaactgttataaagaaagttggaccaatagaagacctgtctaaactagaggcttctgacagcattttactcccttctgtggaaccagttggactgctaaatgctgctgaaacgacacctggttgtgaaatgctatcaaacaagtttatatcctgttggtgattagttgagctaaacaaatttacatctgatgtcatgtcatcaagcggcacaagggtttgttttagagaactactaggaggattgtttgcaacagttgagctggtaaagtcattccaatcatcaaatgaatcatgttcctcatcagccttattgtcaagtaacttgttgctagtgccttgccatctagtgtcttggacccaatcaacatctgttgaagaagaatgactcacactttccaccaagtttccagtcttcacatttgtgttcgtttgaaacacctcagaaggtccagctaacccagagttagaattattccatgaatcatccacaaaccattcactaccaatggaggaagatcctgttgtctctacatcttttgtgtcttttctagcaccaaatacttcatccatttgatcggaaagatccacagaacccacaaaagagtcaaacggttttgcttcctcattaggcattgcagaaagcagcagattgaaaatttgcaccccaaccagaatcagagacattactctccccttcattagatggatcagcagcttcaaagtgctgaacattctcaaacaaatcaagatttctgtgaccttgtacactttgtttggcattggtctgattggtactcaccgatgactgtacagtcgcattagtaatgacacctttcttttcctcagcaaaaaaattctcaatattgactcctgacaaatttaaggaacttttactctgacctggtgtctcctttaggtaacgagattcaaatctctccgactcagaaggccactttatctccaggtctaaaagttcagacaatggaaattcatctttgggtgcattctttcctcggtgtgagttattggtttcaacgggtgatgccacggtctcctgaaaaacaacatgccaaacttacaaatatatcatagaaatgaggttcaatttccatatccatgctagtatgtggagacaacaaacatcttttcttatttcagcccagaaaagtcacacacctctaatctccacaaaacagattgtaggacagaacaaaaattatggataaaaattacattctacgataatggtctgaacttggtattactatcgaaaccagcgcaataacaactaactcacaaagtcacatctgaaaaacaaaccaaagctagcaaatttctacggcacttgcggaattaggcaatgcttactgatccgtgatgagaaaaaaaaaatcataaacaaaaaggttcccaataatggaaatgaaacaaaatttgcaaatattactaatttagtgaaaattcccagtacgtcaccactttgcaagtaaacacaaaaaaaaaggttaaaggaaaacactttcccaatatccatttccattacaaattagtagacaccttgaagaattagaatcaaattcaaaataaaaatcttatcttatctactaaagcaatagaaaaatcctattcaaataacagttgaaatactcacgaagaactaaactaaattgttaagaacatcaacagttaaattaaaagcttcattgatttcttcctcttaaacctaatgtgaagcgacccaactgatatacgccaattaaaaacgaaatagattaagactaagaaaaaagaagagaggaagagagggagagagagaaagagagagcaggttataccgatccatccaaactcaatgactggagaagccattgataaccaagagtgtttcgaaaattgatgggttcaggtgggaggtcctccttagttgcttctccaccacataagacgcaaatcaaagactgtaagcccctaaggagtctgccattgcaatgcctgcaacgaagatatgggggcgagggatcaagggaggctagagcttcttcgagggaaggtagattggggaaggaattgtcgttcgggtcgtaggaggagagactggcgtgactcctgagcgagatctgtacctgttttatcagatcgattggaatttccatgtcgttagtttgtgacccttctctcagttgtaaatttactcagataggaaccattgacgccattttcttcgacattccattcaaactgtttatttatgtgaataatcatgttacctttgctaacaaaagccttacttttttaaaaaaatatagggaaattttatttattattttttttaaaaaaaattcctattacaaaaaatattttttttaattattttatagtttattttaataatttctcacgttacttcaaagagcacccccaattaggctaaaaactctaaaatacaaatacaaaataaacccaaaaaaaaaaaaagaaaaactaattaggctaaaaaaaacattaaaatatatgttttggatattagatttgcaaaaagaaataattatataagacataaatttttgtaaaaaaattacatttttatgtataaagatttttttacatttttacggtttctcatgaaaataacacgaaaacaacaaaaaaagggaatatactgatttagtaacacatttggaccctctgttttacaaaagttacaaattggaccctgtgttttgttaaatgacaaaatggacct

SEQ ID NO: 382161 - DNA, 1341 bp, Cannabis indica
agtagcagttttttgtaatgaatatatatagtaagaatttgtgtaatataggacttttattaacccatgtgtctaacaatatacaaccaattaacatatacatagtgttatattcaagtaagtccattaagaatgacgggccactcacttagtccaagtggattgagcagtctatctacaaacacagccaaacaaaacgtttgtatttgatagttattttcttgggtgctacaaaaaatcttacttttagtcgcaataaaatttgtgactaaaagtaaaaaagtgtgactaattataaattagtattcctatattgtgactaaaaagtctgtggttaaaagtattagtctcaaaaatcacaatttattgtgactaaaactaaattagtgacaacttgtacctaaatgctatgatttagtcacaagtaattttttggtgggaacaaaaagcaaaattaagcaaaaaaaatttatgttgtgactaaaaagttgtcactaaaagtagtctttttttgtaatggcgactaagttggacatatgatttcaaaaaataatcacacatttagacaacaggcgtcctgagaggtagagacagataccctcgggggtcatttgggaacgggagtcaaaaaggcgttcaggacctcatcctacgtggcatgtctctgatagggatcccaaaaaatttggcgacttatcccctctgtcaggccttggaaaggcacacaataaaaggaaatcacatttttgggccaatgcccactattctgacattcctctaacaatttgaaggctcatgcaagactatcactgtgaacagtatgtcggcgtacggacgatggttatcttcacaattaagcctcacctaacaaaccctagcgagcctgggtaagcccaacccattagccaagatgcatagtaccaccctctttagaggcgacataaagaggcgacaatatgtcgcccctaatattgttgcccctaaaaactaaaattgttgtagtgaaggtttcatcccttaatgtaaatggttacaaattttaggtagaaatacttgtacgagaaaaagtagtaaaatactccacagccatggcttaataatattgacttgtggactaagggtcagtttaaaaaagctatgctatgggaaaaggcaattgtagctatgttgtgggaaaatatagttgtaacgaattgtaaaaaagaaaaactgagctgggtgtttagtaaattataaatttcaaattgttgtgggttattaagattctattataataatgataatattataatctagttaattataatcacaaatatataaaaaattatgttataaattttt

SEQ ID NO: 382162 - DNA, 557 bp, Cannabis indica
agacacagaagaaggaggttgatgaggtggcactggagatggacatggagaattactattattattattgttactattgttaccacctttgttatcttttttgtgcttattgtgtggtttgttcttcttagtttggtgttttcttgcttcgactgagattgtggaaaaggtaataacaaagataaggaccaagatgagaagaagaataagaagtgatgagctcttgcttttcttcatctctagaatttatgaattttatgcttttattatcaagaaagagagagattttgatatgttgtagtttaagatgatagatagttctatgatttaggcttgtggagggtttaaggtagttatagacagtttagatagtgtgtcattttaccgaaatacccttttgtggggttctaaataatagtactctttataagtactatagcgtagctaatgcatgtttatttaagatgaatataaaaacattatataattgtgcccctcctgctatgaatgtcatacagcacttttttcattgacctaattatacaaaaaaaaaaaaa

SEQ ID NO: 382163 - DNA, 2738 bp, Cannabis indica
atttataattatttactgttaatttaatatttatttatcctttttgttaagatatgcttgtatttatttatgtatcttttttatttgttattctgtattcaatcactttatattagcgagattacaattgattaggaatattatgttaagttatagtatattttggttaaactaaaaatattggtgacttagactttaaaagtaatattaatttatttaaaaattaatattaaaatacatcttaataataaaaaaaaaaaactgttatttttgaatagaaaacttcttttttaagaaaaagtcacttaataatttttcataaactaagattctgttatattagacacactttatatagaatagatgtatataatttcataggtattaccttgagaagttttaagaaatggaaatttaatttaaacatatttatttttaaaattgagattttaatctggtaaccgataacaaaaaaatttagagttatgcgtttaattttctatttaattaagagaaaaaaaatcctttttatattatattaaaaatatatttacatttatcatttatcattacttttatctatttaattgacttcttctatcataaatgatcttcccatttcataaagattaattagctcgtggactaactttctacttggttatgtttaattaggtatatataggcgtatgtagaggttggcttatttcttatgaatccacttattttactcattcatttattttatattttgacttgtaaattatcatgtcccgtgttcacacatataatagtgtaaggaacaggagggccaactggaagtggataatgtatagagaaactgagaaacatatatatttaatatatggaaatttaaaagtatatactacttattaaaacaatacaaatattatactaacaattttaactacaaaagtgtcccagcaatattcagataacctaaaaaactttaaccccgggtggcaaaggccacaccatattattctgagcattcttatttatatttggcacttgtgcccaatactatatagtatataccttataattaattagttgttttttatattatttattaaattaagatatataagttttgatataaaaatgcattaataatatgtcatgatggcttatagtgcttaacaccttaagatagatagatgttcttagcatctctattttagtcttgatgcaaaaaatgagaaactagtccattaaaagttgatcaagattgaagacctttcatttatgaattaaaattattattatattcttgggttctggaaaaggcatgttcatatggattttatatttatgactaaaccctttttcctaatagcattgttattgttattgggcactaatagtacttaacatttttagacatatcaccttaccattagctagcataacattatactatatagactcaatacttaatgagacagtttcaatcgttcacgtacccatccaataaccgatattaattagagtacatgtataaaaaatgaaataaaataaaatagaaacaaaaacatatatttatatatatgaaacgatagatatataaatattatatattgggactagaagagttagtactaaaagtgcaatagtgatttacataagtaaacttctaataattgcagcttgagcactattgttatctgtggtcgccaagagctccgatagtcgatcactcaggtcgtctacctctctgtgtaaatttctaatgtagttacaagtctcttgcaatacatttgaagccgatacctataaaatttaaacatgttagttgtcagtgatattaatttttacaaaatctctagctatagaggtacaaagaaaatagttgttacgagtaccatcattaaacatttgctatataaatattcaaaatttatatagcaaattaatgtttaatttgttagtacacaaagtgaaatagcagcaaaaagaaatcatttaataactttgtcattatttagaaaagaaaaaagaaaagacttgtagagcaatattgagtttttgatcaaatatgtgatggagggtgtaatagggatactacaatgtatgcaatatctcattgtgagaaggaataaggaacaattgagtcccacactctctctcaacttgcgaaataaatgaggctgtaaaacaatcgtgacttatctaccacggcaaaatgaagaccacacaataataatatatatgaatttaattataagtaaaaagtcttgttattatttttatatggccagtactaatatatgtagaaataagcaaagctaaatcatatatatatatataaaaaccttgtcagagcgtctgttgcgaatctcaggaataaggcgttgtaacttggaaacgagatcggtgatctgatcatcagtgatgttgttattaactgaaacacccgactgtcttgaacgcgatcttctgctagacataatattaatttgttggatcgatatatataatcaggccactagtatatatataagtaatgctagctatagatatataaatatatcagttcctttcttatttgttttggttgaatatatttatgggtagatagagagaaagtcagtgtgggttttgtcagagaacaagtaatgaactatataaagctagctagttatattgtgagagggaagttgaggggtgtgggctatatatatatatatatatatatatatatatagtagtagtta

SEQ ID NO: 382164 - DNA, 2312 bp, Cannabis indica
ttgtttaattctcatgaattaataaaggttatatacagatttacaacatttctaacaagaaaaagaggggaaaattaagtgaagataaattaaaatattatacaaaataaaatattaaaataagatatttttacaatttttaggaaaacaaataaaactccctaaattcaaatttactttctatttttatgatgaacatcttattaaaggttagatattcaattacaattggattagatttgatgttaaaagttagattctaattagataggatcagttattggatattaatctctaatctaattaaaaatcaatctaatttaattatatttaatatatattacaaaaaaatatttatatataataaaatattaaaaaaaaaataaaaatatatattttaattatatttttactggttatttttttttttgtattgaatttgtaatacttggttgtttgtacatctattttcatgatattttgttttattttattacttgacaatattattgttttagatattttaaacttttcattgcattaaatttgtaagaatgatatccttataaaatatcaaacttaaatgaagggtggtatatcgtttttaagtatttttcttcacgttttaagttaatattaaaaattaagtgtataattagatacctaattaaaaaaacctaaataatccaattagtaatttgatttgaatttgaaatttaattggattggatcagatgatgatttttttaaatccatttaatgactggactggatcggattatgagaaaaatattggattagattgaatgttcaatcctatcgatattagtgaaattaagtatcaagtctcatataattttaaaatttgctaaaaaacaccacaggtgtctaacactctcctcggtgtcatatcgttattggtataattaaatatcaggtctcatataacataagaaaatagcttttagtgaatatcgctaactaatcgtgaaacaccacttataaaagatgttgagcactataatgcccaataacaatactctatgatttaatgtaataatatttatggaatattactatgcctctcaataatatgtagcaatgctctcattgtaacctttgaatatttcaatgaacatttcatagctaaaaagaaaattctcaaattagtatgtgcctagtttgaaaataacacttttcatcataatctacaaaggaaaacatatgctcttataatgatctttacaacctgtaattttcacaaaaagccctgtttttttttttactcaaaaaacccccaaaaaattctcttaagatacacacaagaaaacctttatatctacttcaaaaattacaaaagtgaaagaagaaacttattaagaaacaaaatgatgagtatagtcatgtaataaacaaattactacacttttgtatcttctttcactttaacttcataaacttgaggagcagttatgacagttatggtacctttgtcatcataaatttcattagtgttctgtagaggctccaatgagtctacaacatctctcattaggggcctcgctttcgggtttttgttcaagcaatggtaagccaacatggctgccttgtgaactcctttcgtcgggtaatcttctagcctcgggtctatgatgttaagcacttttttcttctctttaagcaaaggaatagcccaatctgttaagttttgttcccgagctggacgcaacttgtctagcgatttccttcctgttaaaagctcgagaagaacaactccgtagctgtaaacatcacttcggggtgttagatggcctgcgaacaaagacattgtcttgttagattgatctcgaaacatgttttcattgttagttctgtgtttaaggtaatgacattacctgtcatgatatattctggtgcagcataaccataagttcccattattcgagtcgaaacatgagagttgtcaccttctggaccgtcttttgcaagaccgaaatcagagagctttgcattgtaatcctgttcaagaattcaaaagtaatttcttatgtttaagcgaatcgaacactttggctgtaatggttgacattgcttgccttgtgccttaatcaccaaccgaaattcaattaatcaaataaatataaagttcaaactataatcatttaggattcgggatttgagggcccaagatacgagcctagtctgccttagtcaagaccgagtctgattataagacctctatatattgtttcattcaaaatgcttaacactttctcatctattagagggcgaatccatcaaactggataaac

SEQ ID NO: 382165 - DNA, 1075 bp, Cannabis indica
acttatcaggatgcatttggaatgaggcctttctaatttcttcatccgtgacattctcaagcaagctggtattttgagcagaagttacagtactaggaatattctgaataacgcctgcaatattgacacttgaggaacagtataaatcttcaaaataacatttaataacatcaaccaaacccgaattccagtcacacctttgccctgctgagttttgcaacctagtaatattgttatttcgttttctatttgttgctcatgcgtgaaaaaacctgctgttatggtctccttcatgaagccaaagttgctttgatctttggtgccaaaatacctctcgttgagcataaacctcgaacagctccttctcagcattcttaaatgctgctaccgaagtatcatctctgccacctttgtaatgagcaatttgctttttccagtaatgaattcgttgcttaaaattaacagtataattcttaccccactcggctaggtgttgaccacaaagagaaattttttctataatggcaagagagttattgatttcccaactgtcctttacagtttggatacatagaggttccctaacccatgaattctcaaatctaaaatgcttaatttcagaattgaaattcctagcagtaggttcgagtaaaatggggctatggtcagagctagttacctctaaatttaagagtttcgcagtgttgaaaatagtgagccagctatccgacactagtgcacgatccaatctcgcttcaatccaattcaaagagcctctccccttctcccacgtataaggataaccagtgaggtgaagatcgcatagactacagtccaataacgcttggttgaagccgttaatgagccaatttggataaggggaccctcctctcttgtctacctgcgatactacattatttatgtaaagaccgcttagtttaatttggaaatttagcagttaattatgtttaattatggaaaaaattttatagctatttaaataattattatgatgttattattgaattctgaaatgcattatatgtcatttagagattttcataattttgcattt

SEQ ID NO: 382166 - DNA, 2681 bp, Cannabis indica
gaacaattgattgatagtggaattgagctaccaaatctggggaacagcttaacagggacatagccaatttgggtgaatctcgggaaaaaatttctagtgttttttctatattttgtgaaaaagatcagatcaatttagatctgatctcgtgcttatgtgtgtttagtgtttctggtaaggattaggtttgagcatcgagtttctttggacaagaaactctctgctagggtttcaaaattgaagctagaacctaagagaagtgatcgagaaggttcttgatctagggttttgttttagacaaaatggagtcgttttagactcggttgacttggtaaagtcaaaaaggaaaaaggttagatttgaccttggtttaaaactgataattgattgttggtgtagggcattttggtcaaattaattcctacatcaataaaaaaaatcaataaaacccaattgcaattttgaaataaggcatgtacaaattttataaacaaaatatgataaacaaatttcgataacatattaatgtttgatatggtatattaggttgtagcatgtaaaacgattttagtgaagaaaaacaaaggctttttcaatttagaatattcgtcaggtagtaaatcaattaaaaataggcttaatcacttcaattatacaaggaaataaatattatcaaattgcaagttcatcttgactttaaaaaataaataaaaataaaatacaatgtttttttttacaatgatcgcaaagttaaatcgtaagaattagtagaaaattaagggattaattaatattttatgattatatgcttcttagtagaaattatggtttattttcaggaataaaccttagtaaaatatttttttaattatggagatatatttgaatttcagatgtgttatagaagttatttatgaaattttacggtttttatattttatgtcctgtaacagtggaatgcgatgattttatcattagagtcacccagatatgattaagtatcttagaattagcatggcgtgatagataaatatttggaatgtcgaatttaagcggggttatggtttcagactatttcacccctaatttattatattacttcttagtaagtaaagggcaaatgggtcatttgcatttttatttatttttggggagttagtgaaattcatagtaatcactaggttattctagatggtaaaatgttgaattagatttaatatactaagctattcttttaaacattttacacaaaaatcacaaaataggcctttctctttttgcttttctcttattcggctagaaccaccaaagacaaaaccaggaaattttcacccatttcagattaattcaagcttaattggttctgcaagaatttttggtagctagtgttatctcaaggtaagcctaactctggtttctctttgaattttatgatttaaggttaggttgagtgtgcaagtttaaatttgagtttctgtttgtgtttgggtgagtccgtgaactatttggggtgctttttaattgattgttcttgttttggagcttcttttgtggttgagccatgtgttgagcaattttgagtttttaaactcaaagcttgctcaacaatggctagttttgatacagggctttatcaatgccaattgttaggtggtttatgtcttatatgatgtttttagatgttatggaaggtttggatcaattggttagaattaagtttgaaatcgaaatttgggtgttttgtgtagaaaaacaagtctaccatttttctagaaatagtgaaccgttttcctaggcagaacctcagaaaacagtctaccgtttggtattttagttaacctatttttttcaatttttttagagtagttttgttgtattttattgatatttagggtattgtcattctatatatcgataaaataacttttaggttcgagtttaggttctcaaaaagtgatatagtatgtcacttgctaattttacgtaaatgtgacttagggccttaaatcgtcgagcaacagtttctactcaaagtaattggcatacttgcattcataatcaatgtaagattagtataatagtttcatatatgtacacatgtttagtgtgcatgttagttgtcgtcagaataacgtattagggtatcggtgaggtgtacatagagttgcaccaagataccaatagatatatgttaggcaaaccaataagccattaaattagcatatcgagatattggtgaaatatatatagaattacatcgatatataaataaatatatgctagactttatcatatgaatgttctagacttgtacgtgttagacacgggataatattgtaattaggtgtatgggtgcctcattatgatctgcatatatgtttatgtttatgattatattttttttactcagtctgtcgactcacagttattatgttcatgtgtaagtaggagctacaacgaaactagaataagtctagagttggatgaagattgtacatatcaagatgattagacttagaatgtttgggtcttcaggacagtactgtagtttttagagtaattttttgtattttattgatatttaaggtattgtcatgctatatatttagggtattattttttagagtagtttctttcctcttattctcgaagttctataccatatcattattatttagttt

SEQ ID NO: 382167 - DNA, 1874 bp, Cannabis indica
ggcatgaatcggtacaatttttaaaatacaaatttgaatgggattcaagcaactctaatcatgaaaacataactaactcaagcataattattcttgataaataataatactgaaagtatttatcatctataataggccattaacttgcttgccgcataattttgtaagaaattgtaagaaactttggttaagtgtaaagattggttgttcatcattagccttgcaataaaagaaccaaggacaaatagaaaccatttgcattatttgagttacacaaatcaaacctactttactgctgcatcatattacattaaatgtgtacacaacatttatttgaaatgtagctatggcaactttccaacaaagaaagaaagaaagaaagaaagaaaaaacagaacacatcaacgtacatttttcttgcgagctagttcccgagccatctccctcatctcctctggtgagtgaggtctcggtgcctctgggggataaactacataagaatgctgcaaggccaaaagtaaggatccataagaaatttgataaaagtagaagctatacacattactatgacccttgtgatcataagtttatactagaaacttcactatgtgtctctaatgtcatcaaaccttaatattgcaagaatgtttctttcagtccaataaatgaatacacattattatcttaagctgaaatctaagataaaagcatcattatatgtagtgaagtgcatttaagatagaacacttcgatgaacaaccaaaacttgtataactccaccaagttctggttagatatggctaataatctgagtcatataatagcttatttgctcactaatgtatctatttcaaagtaaattaggcaccaactcaataccaaagcatcagttgcttccacttctggccttccaaaaagaaaagggtagctttatggaaaattaagaactaagaataagcccccaaaggtttatttaatgcaaaaatgcgtctttcatttcatctactttacataccacaataaccatacaaagtggtattctgttagaccccaagatagcagagtatgatataagagatcaaatcaaaagtgtatgagtcattgtattgagggtggttttgcgagtgagaaataggttagtaagggaagaacaaaggaatgcaaggatagagatcattctcagcatcactggacagagaaggacattccctttcctgctgtaatttcctttatcagaaatacagtgaaatccagggctgaattggcttagttttcactactgttctattttacagttactgttttattgctttttctattctctgcttactgaaataggaaattggttcacatcatattcctctgctctatcatagtcatgaaagaagcattgacaattcaagtgaaacaaatcatcagtgtgaaagagactaggattgtagaaattgaaaaatgtaccacaaatcccaacttcatagaggaacataatcagttctcttaaaccagcatcttcatctaaattcagtatcaatttcagtttacactaaccaaatatatcataaaatttatagctatttattattactttactaaagtcatcacattcacattggctcaaaaagagtgccacaaactaactaactaactctaattataattacaaaaaagctcaattcaacaacaaattatagaacctaaactaagacttggcaaatttgattcgaaccaaactgaacaattcattttctaatccataataccagaaagcactaatttaaattgattgttcatttttaatgattcacgcctttactagtctatgaatatatatatatatatagatagagagagagagagagagtattactagttcg

SEQ ID NO: 382168 - DNA, 2109 bp, Cannabis indica
agatgatcttcccattgcactaatgccaatgaagggtctatcctgaagattgagattagtgagaaaaaggtctttgatatgagaagaagcaataggtgaaaacagaatggaggatttacaaaaattgatagcttgaccttgaagccttagaatacagtaagaacatctctaagggcagcgcaagaggttctactagcagtacaaaatataagactatcatcaacaaaaaataattgagttaaggagggagctctacgagagatggatataccctttagcacattactatcctgtttagctttaagaaggcaagataatccttcagcacaaagaataaacaaataaggggataaatgatccccttgcctaagacctctagtaggtttaatattgccatgaacagttccattaatcataaaagaaatgttagtggtagtgatacatttcataatgagtgatacaaaactcagagggaaattaaaatgaaacataacacttctacaaaaatgccattcaactcgatcaaaagccttagccatatccagcttaagagcagcccaagctaccttactttgtttcctcgaattgatagcatggacaacttcctgagcaagaagaatgttgtcaaaaattattcttctcgaaataaaagcactttgagaaggtgaaataaccttatccaaaacagattttaacctattaggaaggataaatgattttataaagagtattacacaaactaatgggactgaaatcctggatagtatgtgcatgttgttttttgggaataagggcaataagagtagaattaatggaggaaaaatccttaccattattaaggcagtcaagcacatcatcaataagatactggcccatggttgaccgatttttttgataaaaaaaagacattaaggccatcaaggccaggagccttatccacagacagctgaaaaagggcccttttaacttcagcaaccttaaaaggttctcctaagcactcagactcataatcatctaagggagggcctaaagtagagagaattttgtctacagagtcagtatcatagccctgggtttgaaaaaggctagcaaaataagaggagacaatattacaaatgccatcaaagtcagtaatgacttcaccatcctcatttttgaggaaacaaatagtgttagtttttttcctacgcgaagcaaaatagtgaaaaaacttggtatttttatcaccagcattaagcaaactaacacaagctctttgtatccaatacacctcttccttatacaaaaagcatcaagttgtgattgccaaactttaatttgagcaacattactttcatccataggaagagaattctgaagattagctatagctttactaagggcagtgattttatttttgaacagattacgggtggagacattccaagattcgagagaggaaatacaagagtcctgcttggcaagaaaataggggaaagctccactattattaggaggagaacaagagctggaccaagattcttgaacagtttgaaaaactcataattttccaaccaaacattctcaaactaaaaatgctttttggggaaaacaggattaatactactctcaagactagtaacaaattttaagacccataatctgatccataaaaggctaaatgatgcagaatagcatcagaaaaaagattagatcaagactcagagcaaacaaccatctaatctctcatgggtagaaccttgtttccaagtatatttattcccaacaaaggacataggagaaagattgaatttatcaagaaaaagagcaaaaggctccatgtcaacagtagagtaaagtcacttccaatcttatcactatattaaagataacaattaaaatctccaacaataaaccatggaagattgggagcattataaaaaactttatgcaaaagattccaagtaatagggcgctgactagagacaagtgaaccatagaaaccagtaaaatgaaacataggtttatcattaaaagtaagattacaatctatatgataagaaaaagtctatgttcttggtattcaaattattagaaaccggaagaatagatctcttgctctctctcaaa

SEQ ID NO: 382169 - DNA, 1019 bp, Cannabis indica
tttttcgaaaagaaggaaaaaaaaatataaccttgagaagaaacttgttaagggcaacgaactctgagataagaaaattgttagattcatcaaaaaaaaaatcataaataaatgcttagaaagatgaattcaatacaatagttaccatcaaagctcatagttccattcctgtcaaaatcatacatcctgcaaaaattgataattttgatttacaaggaaaattcatgcgcttatatttttcatgttaagggaagagagctaagcgagaaattggacctgatcatttgttgaacaacggagatagagaattcgaggtttccgacggcgagagctttctgattcatacaaaatttgggaattaatttatgagtgaatgaattcgagataaatatacagagaagagagaagagagaagaatggatgaaccttgagctgagaagctgtaatggagccggacttgtcggagtcaactcggtcgaaccattctctgagaacggtggaattctccattttcgaaaatataatccaaattcaaatcaagcaaaacaaaggcagtcaaatgatttctctcaattcaatcgctccctcgactcgtctgatcattgatcaagttcactaaaacgacgtcatttatggtcgtacacaagacttcactttgttgcccttaattacttatgtaaatttttttggtaacacttaaattttgtaacacttaaatttctatgttagggacaaatttttttataaagtttacacttgatagtaaaaattaaaatgaaatttttgcaacaaagtatactacaaagcaatttttgtttatcttaatattcttaatatgattgagtgctgcatatttcctctctctataattttttataatttgtatattatagttatttaaaatatttaataaattttgaaatttttacactaaaaatctaaaatgataaatttattacattaatacctatacacggctaaaccaacttttttacacatcttttatattttattactat

SEQ ID NO: 382170 - DNA, 1511 bp, Cannabis indica
aactatccgaatgtttcggatcagtaatgatccgtcgaatcgaatcactgatccgacccgaatgaatgaatctttttgccatgcctaaatatttctacatttgtttcattaattatatatcacatattatagatgatattattacctactcattactcattttccattacttcatacacaaatgtataatatattaatctattcttctttataacacattttctattttaaaaaaagatgagtaaattgtgttgctcaaaaattaaatacatgatgtgcaaaaatcagttgagactactcaacttttcaaaccaaattatatcatctttttcttttaaaatgaaaaaaacttatcatctatatctttttttaatcttaattatttacaataataatagtatacatttttcgcttcccaaagcacaatattccgagcttcccaactttacaaccaagtgatgaacttatattttggaatactaaaatgattctaaataaaagcatacccaactttcttcaagctgtctctttcggccaaagtttgggacaaagttgagaaatgttaaatttcattgacatgaattcaattagataaattttgtctttaatctcatcctttacctttacaattttcttccgataccaacttccccttgtggagctttatagctctaccaatcttgatttttaatatacactgagttaatccatttcacacacaaattatctttctctgaacaatgtcccacacatattttgccaaagctccaatgttctattgttcaatatttctaaaacccaatccacgtaagcctttgttaaacctcgaactcaatcccacatgctgggaatgactccaagaacaatccgagaacactcacaacttagaacataatgtgtatagctttactactctgtaatgacaagaatgtttacaatttgatgaactatcttacatgtaaaggattagaggtatttacagactgaatatccccactaataatatcttaacagaattgagacaagtctgtgaagttaataggcttaactggctataacagctaacaactaactaactacctaattgacactacaaaaaaaactgttatttttagtgacaactttttagtcataatataatttttttgtaactaaatatgacttttagtcacagcaaaatgttacttgtgactaaaacatagtattagttacaaattatcactaatttaattttagtcacaacaaatattgactaaaaacacatttagtcacaacaaattgtaatttttgtgactactatttttagccacggaccttttaatcacaacataagaattataatttataattagttacaattttttcacttttagtcacaagttttgttgtgactaaaagtaaattttttgtagtgtgactagagatataaggacacatgtacacatgaactaaataacacattaaacaagtaatgaaattaaagctgttttttattgataattgaatagaaa

SEQ ID NO: 382171 - DNA, 1184 bp, Cannabis indica
tctccaccaaagatcatgtttctgtaatcttttaaaaggattaccctctacatatgatacttttgttatttctgtcaactctagaaatgatgcttattctgtagccgaaattgaaaccttgcttttggctcaagaacaccgaattgatgcccacataaagaacttgattctgtcaatcttgcttctaaccgtggttttagacataaaccacaaagttcacccaacttttctccccatactgataccagaaattcacatgaccaaaccagcaataacaagaacttttggaacctgaatgctgtccccaacaggtctagttcagcacctttttctcagcaacctcaaggccaaggtcgtggtcaaccccctgccaatccctccttatctcagtcctcttcgactgctacaaaacctgtttgccaaatttgttcacgaactggtcatactgctgcaagatgttatcagaggttcaattatgagtttcctggtgtaggagctgcaaacatccctaaatactcagccaacattgccactgctgacagtgttaatgatgaatcttggtaccccgattcaggagctactgcttactgcacggctaatgctgcaaactttacacagaagcaaccttattttggtcctgatcaagtgcatatgggtgatggtgctggctttcccattcaaaatattggtaacacctttctacacactacaaactccaataaacttttatttttaaatagaatgttacatgtgcctcatatacaaaagaatctaatctctgtttctcaatttgctgctgataataatagtttctttgaatttcaccctaaaaaatgttttgttaaagaccaggtttcgaatgagacaatcctggaaggtcatcttaaacatggactctatgtcatagatcctacacaatttcatctgtcatcctccaagagatcacacaattctcattctttgaataatgttcaatcttgtaatcacaatattaatgtctctgcttcatgtaattccttttctttgtggcataaaaagcttacatatccatttgttaagattgtatctgccataatggccaagtgtaacattcccaattgaaataaagatgctactgacttttgtgatgcttgttgtaaagggaaaattcacaaatttccttttcccacatctcaaaccatttt

SEQ ID NO: 382172 - DNA, 2147 bp, Cannabis indica
tgcaaccctctagtgcgttgtacgaggcagtaagggcatgattgagacacaactaagtttcttcttctctttatcagaaagaaagtatgttctgaaatcgatcaatatattcaccacaaaacacgaaaaagatcactatcttgttttagtaatgacattagaaaattaaatcaattgaatactacaaacaaatacacaagtaaaactcaaatacatagatttaactaaaattgtcgctttatttcaagcctgttcgggagtgattttattttttgtttttttaaattttacttaacaaaatcttgtactttcttcatggtttttgattaattaatcaaaaaattgattaatagttcccgaacaactccttcattaatttaataaaattcatctgagattattacaattctctcactcttactctttttacagttctaaagagaatttaatcacacgatttttacaaaaaaaaaaaaaagagaatttacatgaaatcaatgcttagccagcttagagttaaaggtttctacagaagtttaactattaactaccgaaacataattgggaacctaactaacaccctagctaacttggaccaacatgcaccaataggtataagacttgatgactggaccaactaattgacaaatctccaccttggtttagaatcgagtctggtgtggtgatacttttgagtagtgagatcaatctcaatctccgtatagatggatcaaattcaaccaatgaaaaaacatactacttgacactattttggtgatcatatcagaatgattatgatcaattgaaaccttcttgatgatcactgatccatttgaaattacttctcggacaaagtgcaccttgatgtctacatgctttgtcctttcatgatggacatgatttttgggaaggtagattgcactttggttatcatagttgacagtgatggcattcttttgcatcttcaactctcgagttattttcttctaaccataaagcttctcttacatattttgtgagtgcaatgtactctgcttcagttattgacaacgttacaactttctgcaaattagctttccaagtgatagtagttcgaaaagcagtgagcacatagcctatgagtgattttcaaatgtagcatgcatagtttgaatccacaaagcctttaatttcagcatgcctatttcttcctttagctccaccatagactaaacaccttccaagtgaccctctactatatcttagaatccactttagtgcctgccaatgagcctttccacgatttgccataaatctacttaccaaattgactgcatatgctatattaggccaagtacataccattgcatacatcaaagagccaactgcatttgtatatggtacactctccatgtatttctattcatcacgagttttaggtgcttagtttttactcaatttgaactattgaaataggggagtgacaacgagtttaacatttgacattttaaacctattcaagaccttcttgagatactcctcctaagataaaagcaatttcctcttatgtctatctcttttaatttctatcccaagaattttcttagcagcatctaaatccttcatctcaaactccttactaagttctttcttgaattttgccacttctaacttgcaattgcaagttattaggatattatcaacacacaatagcaatatgacaaagtcactgttaggcaggattttaaagtacacacaaatatcaaacttacttcttgtgaacttgatttttgttagaacttattttactagatctaaatttactaatatatgtatattacttatcacttaagtaatctaacattaaaatatgaaaatcataaaaagatcaaataacaccttaaaatttaggattacttacattaatggtagcaaaatacaatgacttcttatgttcagtactctaactctcgaattctttttgtaaaagagtattaccaagtattgaacttggatctccttccttaacctgaaaagtgatagtttttcataatcttctcaacatgagattagtgtggtctgatacttaattcacgtttggaacacattttgaaagtgagaaagactagcaatttcgaaaagggaaatttgattttatatacttaaaa

SEQ ID NO: 382173 - DNA, 1210 bp, Cannabis indica
aaaaatgtgcagtcgttacataaatccccataataattggcaataaagtcatttttttatcataaagataagtcatttgaagagtccaatacacgactaggcaaagtttcctagtaaaagcttttatagtcaagactagagctgaaaagtctctatccgtatagacgtctgcatagggacttagggggcaaatgttatcccaattatttcccaccttacgtggcatgtccacataatcataattgaaatcacgccgaatataacctgtcaataaccgaacaaggtcaccttgcacgacacattaattgtcaacaattctgaggctatcaaacaggatcaagcaaggagagaatggccatccagggaaccctggccggaccatgcctggccgaccaatgaagtcccacatgacggctaggccctagaaatagggctagccggccaatgtgtgcagacaacctcaaaggaaagcttgaacaaatcgtggggtccatagccaccttctggaagattctcaagctaaatttcagttacgggatagatccatcaacccacaaagatatgcatattccctcaaagatattagtccaatattctaaggatttagttagtaatttaaatataagataaaaagatgttatttttcttattctagaagatatatttacatatttgaattatgatcttttgtaaaccctacactatatataaagaacattagaccacatgaaaagagacctcaagcccaagtctcacatgccccatagcctctttctcagtcctccgctccacttttgtttcctagacactaaatctatttcctttacaaaaatctcacaagttcttcaatctgtaatactcaattcttattattgtactattgaaaagaactatagttagaaattacaaggtctaagcctgtactccatgcgatattatctcaagaataaatataactaagagggaagtatgtcattacccattcatcaagggagccgaacctctataaattcacgtgttatttttattatttattattattatttacatgtggtgaaaattaataattaataagattctactgtcacttaattaaattttaagtcaacatagccacggttaggagtaggggtgttcatcaaaccgctcaaactactcaaaccgcccgcaccgcaaaaaaaatgcagtttgaaattctttgcgatgcggt

SEQ ID NO: 382174 - DNA, 3117 bp, Cannabis indica
atggagactaaagtcaaaaattataaataattaataaataggcctactcatggtgattttttttttttgggggtgaatagattaaaaatgtagttttttttttctccataaaatatataaacaaaaagtcaacagcttttgtgtatacataaaaatttgagaataaatacatgtgatattatatacaataacatattattgcttgaatttacatatatgtatttatgtaatattattaatatattaatttgtagggagaagattgtaattccaagtgataaaccaatgataattttgcaaggagaaggaaagagtagaacacaagtaatttttgataatcatgaatcacttgctcaaagccctactttcacttcttctgctcataatattattgtcagaatgatgggttttagtagtaagaaataatactacatttctttaatttattcatattattatatcttataatataacaactaattaattttgtttttttaatagaattcatacaatgatagaaggaataataagagaattccagcagtggcagcattgatttcaggagacaagaataagttttataaatgtggattttatggattacaagacactttgtgggatgatcaaggtagacatttttatgaaaattgcaccattgaaggtgctgtcgattttatctttgggggcggccaatcgatttttcaggtatttatttgaatgtctctcgtattgagtctgtgtgaaaacttaataatatttataagaatacgagatagctagctatactcgatttattaccaaatggtttcgaaatgaatgcttttattgtaaaccctaatttgatcgaaattcaatactagtataagaaagagagttaaatgtaattcgaaaatagtgaactaaaaacttgttatcaaactatttaagattagcgagaaaaaaataatcatatcaatccagaatttcacttcaatagtgtgaaagcatgaaactacttcattattactaaatagattaaaccatgcactttttttctactttcaaactacgtacttcacattatattatttttacatatattacatttcgattcaacttacatctcgaattatgtagtaggatgggattggttgacagtactaaagttgttactcagcaggtcataatcttaactaggccaatcctatcctaccacttggctcgagatgtggatcttggttgaaatacatagtactatgtagcaaattggtcttacttttgttactaattaaatttgaagaagtgtaattcaaacttatttatactttcaccgagtaaagaaacacgtgatatattactagaatattctatgatcacaatagtttttatgatgttattgactactcttatattcatcttccttttaattcttttgttttaatatataaaattattttgtgatatatatagggatgtaacatattagtaaaaggaagatcacttgagagaggttttgtgggatttattacagcacaagggagaacaaatagtaatgatgggagtggatttgtgttcaaaaattgcaatgttaatggaagtggtaaagtgttcttagggagaccatggagaccctattcaagagtactcttttacaactcatatttatcaaaggttgttgtccctcaaggttggaatgcttggaattctattggccatgagtaagtaataattaataatttcatattacatcaaaaccctactagactacctctatatatattattagattttcttcttatcattattaatcatgaaaattataaattttatggctttttattttttttccaaaaaaaattattttatgggaagaattaaaaaaaatagtataagataattaattacccttaattgtttttccaatttccctctattttttttaactttttaatttttccaatcaaataatttttttgaaaagaagccatatttttgtaaaaaaaaaaacggtaaaatgaatattatttttattaataggtatattaatgtaccattttgcttaaatactcatttgcacacatgtatttggtatttttggaaagaaaattttattttaaaaagtttgaatagatcaattatttttaagtaaaataaaataaaatacaaatgttttttttaatcaaaaaaatacaaatgttttaaaagttacttttctatttatcacattttaataataatatttatgttaaatagtaatttattatttttattttaattaaataaattattgctaatattttcacaatatcattgtctaattagaattgttaaaaaatatggagatgtaaataaatatttgttagataatatcacattgaaaatgtataaaacattaatactatttataaaattataaactaataccattggcatttaattttaagatgaaaccttatatttcttaccatactcattatcttattctaaaacaaatattttttaatatggtatcggagctaaaaaaaaattcgggtaactaattgtaaattaatatatatcttctactattgttattagaaaccaattgacttttgcggagaacggttgttatgggccgggttcagatacttctcgacgagtgggctgggagaaaaaattaagtcaatcggctctcaacaatatgattagtgaaagcttcattgataatgaaggttggcttcactctatgccattttaattcaaattcacttttgtaataaaaaagtggtttaattttataaaatattatttatttttcttattaatctattcttgaatcaaaaaaaataatcgtgataatgacattgattattaaatgtaaaaaaatttacttgtaaaaaagttaataaagatgtatagctagataaataattgtttggactatttgtttcaaaaaaatatttttgtgtaacttcacatgttatacatttgatcaaaatagtcgcatgttaatgtaacaattaacgatatacttttatttaggaaatatttgcaccaataactattattattaaattatttaagaatttacccttacctatttaatactcatatttagcatttcttttttataggtataccaatgtatatttattgttt

SEQ ID NO: 382175 - DNA, 2615 bp, Cannabis indica
cttatgcatatatgcctcactacatcctaagtggcttaaaataattttgggtcacttagtctgaatttaaaaggatattacattacgtcgttagttcacaaaaggtattcttaacttaaaaatttaaagatgaaattaaatactaagctcctaactgttgatagtacttgaggaggtgatcgacattccatgctcttaggagtagggatccatccatacgttttagcttgtaggtctcagagcctatttcgtcttcaattttgtatggtccttcccaatttgggcctattactctcactcccagatcttaggaagcagggaataccctgcttaggactagttatccaatattgaaaacttctaatctttgacttttaagttaagttgttttgccaccttcctctggtatgttgccatatgtatttgggactcctcctggagttcttctatgagatatagtgattcttgtagtagtgcttggttcatgggtggatcgtaagtagttcttttgtggtagcggattgtactttccacaaggaccatggcttcacatcaatataccattgaaaatggagaatgtctagtggtggtcagagcagtggttctgtatgcctagagtactcgtggcaaatcttctggccaattgtttttgtaggccaagagttttttcttgagggtgacttaatattttgttcaaaacttctgcttgaaaattttcttagggtcttttcattgtggaaaaacttttagtaactctatatttctcgcataactttgtgaatgcatcagaatcaaatctcttgccattgtttgagactatcttatgggatagtccctgccaatagacaatttttattacaaaatccaaggatttcttggccgttatcgatttcatcggctccttttctgatcattttgtgaagtaatctactaccactattgcatacttaactctgcattttcgcgtcaagagagatctaatgagatcaataccccatactgcaaagggtaatgagctcatcattaaagtgatttcatttggaggagcccttgggatgtttgtgaacctttaacatgggtcacacttttagacatagtctatgaatctttcttcatagtgggctagaagtagccttgtcttaagactttcttagagaggcttggaccaccattgtggtctctacaaaatccttcatggattttcttgtatgtttgtttagcttcatagtttgagatatagctgaagtagggcatgcttaaacttctccagtgtaggatgccttcgatcatgaggtaacaaggggattgatactagatcctcttacagaccgcccagccttggggtaacactccctttgttaaatagttgataattggatccatccagcctggtacttgatcagttgtcgcaacttcggccttgagtgtgatatttggctcaaggaggtactcgataggaactacccccaatttttctatttcccaatgtgatgttagcttggctaggcagtctacatgagcattcttttctcagggaatttgtttgattttgtaactcttgaattcttgaagcaattcccttgtagtagagacatatgtagccatattttctctgcgagtttgatattctcccaacatttggttgacaaccaattgggagtcactgaagacttctatttttcgggatcccataactttatcaaatttcaaccttgccagcaaggcttcatactcgacttcattgttagaagctggaaatttgaatctcaaggaagcttgaagcctcaaccctttaggagatatcattgttatccttgctcctaatccattctcgtttaacgcacaatccacatacaccttctatgcaggaacaactagatctaataaattggtggttgcctccattttactgcattctatcatgaaatctactaaggcttgtcctctaattgaaatgtgagggacatatcggatgtcaaactgattcagttccattgcccatttaagcagtcttttagggcttctgatttttgtaggacttatcggagtggatggttggtgaaaactttgattggatgtgcctaaaagtatagccacaactttatcgatgctatcaggaggaagaaggctaatttctcgatcaaagggtaccggactacagcctttatcatttatttgttgacgtaatatatggtggtagattttttaatttctttctctcggaccaaagtagcactaactgcgttctcaaagatagcaaaatataattacatgtcttccccgtgtattggttgggattggataggtggcatggccatatgttctttaagttttttcaattcttcaatacattctttggtccatttaaatttctgacttttctttaaaattttgaagagaaagagacacttggtggtagatctaaagatgaatcagctttaagtagctatttttccagttaagctttgcacatccttatgcttcttaggagaaggcatgtctagcaagtcatgtatcttccttggatttgcttctatccctcgctgacttactaagaatctaataaattttctagatttgacaccaaaaatgtgttgcgttttgtgccctaaata

SEQ ID NO: 382176 - DNA, 2797 bp, Cannabis indica
tttttttgttattatttttaaaagatggtcagctatagcaactcacttgccaaagagaacagacaatgaaatcaagaattactggaacactcacttgaagaaaagactgaccaagatgggaatagatcccgtcacccacaaacctaagatagatgcccttggctctggctctggcaacccaaaagacgccgctaacctaagtcacatggctcagtgggagagcgctcggctcgaagccgaagccagattagttagagaatccaagctgttgctaaccagcaataacaacaatgccaacaacagcatggcactaccacatcatcacaaccaccagctgggctcggctaatcatttcatgaacaagccaggcggagccataaccccaccaccgtgcctggacgttctcaaagcgtggcaaggcgcgtggactaagtcgagtaacagtagcagtcgagattgtaatactctcgcgggaatgatggctatggacgaccttgaatctccaacgtccacgctgaacttcccggatgccaaccacaattaccctaggattaataatcaaactgctaccacagttggattcggtactaatgataccactgctgatcatgacggttggaagtcgtgctacagcacgacctcagttaacaacacttctacaaacactaacaaagtagtagtagcagcagcagcagcggcaacgatgaatagtgatgataatcacgaccacaacagcaacattaaccatatggtggctccacctaccccgccggagttcaaggagagaaatatggaacatggtaatacgatgtccttgcaggacattgcgttcgcttgtagtgaaggaggagcctggtttgtcgatcatgggtttagagctgcagcggccagtagcgacggtgtggctgcagtgtcgaatatcatcgaaggattcacggatgctttcatgtacaactctgaggagccgaactcggcggacgtggttggagatggtgagaactcaaacgactgcggtggggccggcggagaaggaagctgtggagctagcgggttatttgaagagaacaagaactactggaatagtatactgaatttggtgaacacgtcaccgactgggtcgcctgtgttttgatattagagtttttgttgtagtagccagtaatggtaactattgtttcttaatgatttgtttaattagtgactatatatagggctagtcaaagattatcatagtggccttattaaacatgattagcaagttagtgtactaataatgatggaaaactcctagttaataataataataacatgtgcttttttagtttttaataatttcttaaactcggaacgtccaccatctatttatattcaaacattaatcatgacttttaacattttgcctgagaatatttcttatttgcttaatcccaataatttcagtattgaaaaattgtgatatattattatatttttgtgcaacattatatgaaaactgatcatgatcagcgcgattcttgttattaaaagtatgtacgtgtatataaaaaggtctgatgcatgtaacaaggaaaaatatgtagatcgccaatttctttttagtaagaaagaaagctttttattcaaaacagccacaaacatgcaaaataactgctgcaacaactacccatataacaactaccacttagtaattacactaatatatgtgatggtttgagaataaatttgtattggtttaatttaaaataggtggatatgtaggattgtgtttagtggttgttgtgataatatagtaaagtaatgatgttgattagtagtagttggtttaaaatatgaagatagtttagcatagaagagagaattgtatgtaggaagtagtaagcttgtatttatagtttgtagttttagtttggatgttggagaatagttgataagagtagttataaatggaagaatgagtagtatctttggtagtgaaagacttgatttatttttcaactattggaatttcgatggcgtaattatagtttatgccccctacatttgtgactagaacaatttgtctagattgttcaaattttatatgattcacaattactctagatttttcttgattaatttcttctaaactcttctaaatattcgaggcttctctagttatttatttttcctacaaatgtgtcgaaattactagagtgcagaattgtacgtagcaacttatgatactcctccttggtacacatttcggtaatctcgatcatgtctcgcagtagctcaaactttctcattggtagtgccttcatgaaaatatttgtcaattattcttcggtcttgcagtgcttgagcttaatttttttggtagctttgctttcctaataaagtgggatgcttatatatatgctttgtcttgctgtgaaatacgagattattttccattgctatagccaatttttgcaattataatagatctttgtagtctctttttgtgattctcccatgtcttcaagtattcttttaagccgtatagattggcctgtagtcattgctgttgcaatataaattgcttccgctaatgattgtgcaactattgtatgtttatttgatgcccaaaatattccagatgcaagtgtgaaggcatatcttgacttgttcttcatgtcgtcaactgacctgcctagtcattatttgtgtactcaaacagttttgactcatttgtaacttcgtaccatattttgtatagttttgttcctcgcaagtatttgacgattgtaaagaccgcttacaagcaatattatctcaa

SEQ ID NO: 382177 - DNA, 1830 bp, Cannabis indica
gttttttttttaaaaaaagaaatagattgctattattgctcaactcagtatcggttacccccaacaaacgaaaagacaaacaagtccttacgctagctgtctgtgactctttgatgtggctaaatagtaaatagtaccctttcatattaagatttgggaaactaattaccataataaagtagtactgatatagttttatgatgaaaatcaaattgatccactagttagaattttgtcttcttcataaatatatccataggatcaaattaaatttactaagctgtattaataataataataataatgatgatgggttggcctatatatatacatgggtattgaatgaacattaatcataagtcccaagcgcttagtatctttattctttatatatagaatggttttacatgtgtacttactactacaattaattattatatatagaagatgtttggtagagttgccaatatatcccactatatatataggctactaatggataattaattagtataatcaatgctactattactttgtctaaatgtaccaaattattaatttgatttatcttaatttgttaaagttgacttgatatagtaatagtactttgcaattagtgcatggcattaatgaccttttttattaattaagatggcaaatcaatttggtaccattgaataaaatgtttacaagtttaactagtcggtaaaaaagtgagatgaaatatttcctctagaaaaaatgagatgaattaatttggtacatttatgatgcacttagtaccatgctaatggattgggaggcaaagaactattttcttgttattatatgatattgatgggccaatttggtgtagtgtggtttaaagaattatttttattcatcttattatatgatatgggtcaatttggtatagtagggtttatgcaaccacaatcggtttcaactgtaagaaaaatatatgctcatgtatttggtaaatgtttaaaatgttgttgttgatgcagataatttgagaaattcaaaataaaaaaatgacagaaatagagtttttacattgttggaatgttaagaaagttcgattcactagtcactgtatttcacattaaaaacttgcaagatagctcaattttttttagagttacaaaaatgagaagaacttagactttgcacctgaattgttgtatttacaaagaaccctcactaccatatttataggtgacagtggaagattagaaaatgagaatacaagattaatacactacaagaattaagagttttgccagcgaaattcatgaagtgtgctgacaaaagctaaattttctcggcgaaacaaccaaattctgtcaacataactaacccaacaaattggcttaagaagtttactttgctagcgcttatacttgccagcaaagacaatttataccagcgaaataatataattttgttggaaaacgtgtatatccaactaccaaaaggtggtaaatttatggcgccttttaacatcttttgccgacgctttaactagttttgttgttgaatataattgttggtaaaagtgataagaaaaaataggtgagaaatttttcgagcgaggaaaacgtgtaatattaatttggtgggaaagattttgtcggtgatattatgcactgaaaaaattgaaaatttatcgatgtttttcaattaagtagggttttaaaaagttttgcaaggcaaagtgaactgcgccggtaaaatttttttgcatatatacctgcacgagccctttcttctccttcctttgactctacaagtctcttcgcctctctctttcttactctctctctctct

SEQ ID NO: 382178 - DNA, 2106 bp, Cannabis indica
taaccgaatactctgataattttgcctattctttcgattgtataaaatctgctcccaacattaacattgtgtcaaaattgtaagtacaaacaaaaacaaagctctcaactctgtacaaagggtgtaacaacaatggaagtaagaatatgaaaaagccttctcttttgatacatagttttctttgttttgcatttcaaaaccaacagctctagttagattagatatggggcacatatccatgatcacaaaggttagcagttaatgaattcaattcagaataaatcaaatgggcatctggatggcccctatcaccagtaacaaaagtatttacaccttccttgagctcaatccaactacaaccaggtgttttcttcacattttgttgtctcattgtttctctaacttctgatacttcttcatattgaccatctactccataaatattggatatcagaacataactaccacaatgccctggttcaagctcgattactcgttctgcagcaaccttggcaaggtctgcatcaccatgaagccgacatgctgccaataaggctctccacacgacagggttggcctcgattggcattgttagtaccatttcgtatgcctccttaagtttcccagctctaccgagcatgtcaatcacacaagtatagtgctcgatggttggaaccacgctgtatttcgttgtcatttgggagaaaaacttgcgcccttgtcttaacaaaccagcatgattgcaagctgatagaacaccaactagtgtgacctcatcaggcttgaaattcgcctcacacattcgagcaaacatgtttagtgcttcattgccatttccatgcataccgtatcccattatcatgatattccatgaagctgtatctttactactcatcttatcgaaaattttatgagcaattctcatactcccacatttcgcatacatgtccataagagcattgttcatcaacacatcgtcgataaactcgtgttgacaatcgccattgtttcccaacgatttacgaatcatgtatccatgaatctctctaccgtgcattaacgcagctagattagaacaagccggaagaactgtagttatagtaaccaaatcaggcaaaactccaacccttaacatcctatcaaaaagcctaattgtaccatcatgatcaccacattgttcaagaacagatataattgagttccatgaaaaaatatccttctcattcatcatctcaaaaatattcaatgcatcattattacacttacatttcccataaacatcaatcaaagcatttaaaacagtaacaccagaatcataccccattttcaccacaaaaccatgaacacctcttccattgtagatatctcccgtcactgcgaaaatagacaacaccccagtaactgtataactacttggcacaacaaaaccttctctactcataatcctaaacatctccaaagcttcatcaaaacacccaatctgtgcatacccattaaccatagcattccacaacacaacatctttgtcaggcattttcacaaacacttgttgtgcatactccattaacccaaatttcaagtaagtattaaccaaagcactaccaacaaagatatccaaatccaacccaagtttaaacaacaacccatgagtcttcctaacctcaatggaatcaaaacaagctttaattacacaaggaaaagtatacttatcaggaacaacaacacccacttcacgcattcttctgtaaaactcaaacccatctttggatctctcattagcaatgaatccagctatcacagcattgaatgcgaaaacgttacgatcttcatcgctcggatgattaaaaacagaaacagcttcgttcattctttgacactttgagtacatattaataacacttgtaattgaaggaggagagttgataaggaagccattggtgaccataaatgagtgaacttgcttacctttaatcagatttctctcatttgcacaagattgtaataaggttatacatgttcggaggtctttcactgagtaacgatgctgaagcttcgaacttgaataatgatgtagaagaagaggtttcattcctcaaagcctgtaga

SEQ ID NO: 382179 - DNA, 2581 bp, Cannabis indica
ctaaccttcatcttacgaaaatgaactttcctttaaaaaaaataaataaataaatatttatttacacaaacaagaaaaactttctatttcttaactgtctgagtagattttagaaggtagctttttatttatttatttaatttatatgtatctataaatctcgtaataaaagcccatttaaacatagaaagcagcttgtcagctagctggggttttttgtgggggtcagtattattattattagagaaaacgttggtctgtttgctctaactattttttaataaaattaatttctaaatagaaatatattaattattataccgaatgaaatatgggtaccttatttattacaattcaagtgtctttccaatttgagtttaaaaaatcttgtcagattttatgggttacacctcaaagcttcgtatatagttagtaattagttgcattgagctgtttaacattattacccgatttattgatgttattatggttgagccatacttccaaatactccctttcccttaattaattaattaatttaataacatttatagattttcagtaattaggtaaaagagacgggactcaataaatttcataactaaaatagatttattactttgtttcctaattaaaattgattttttacaagaaataaaaaagcatctacttttgggctatggtgggtaacttggcagagctctcacaagcggacaaattagacaagaccacgtgtcaagattgaggaactttctaaccgagtaagcctagagttagttcgataaaatgacaaaaatacccctgtttagactgcgtgtcgtaaagcaaatcgtttggagtacttgggggtgaaatagaggataaaactggaatagcaaataaaataaaaagggaagaatctgaggccgttggtttactttatatggattgggatgagtaacgtaaattgtacgttagatgcaaaaattggtaactgaagagccaccgtttttttagctcacgcgcgctccaacaggagtgaatctgagaccacattattcatgacctgaacaatgctttcattgtgttttttttgtttcattctacacctttttttcttaattaaaattgttattttgaatgttttattatatacccctatttttatttttacccaaattaaatacagtactgtcactttttctaaaatttatgcaattctttattttattttgtcaactaaattttatacaattctatgttcttttcaaaaataaaaatcattaaaaaccgaagaaagttgttcgatcattgtgatctcaattctcaaattcaaattattaaatgatatttaattaacatatttatttggcatttgagtgtagtagttgggttggggtttttctactaaaaaatctaaccaatatagacatcattaacatttcaaaaatatttagaaggtggtgaaacatatgaatcatttctaacctttattacttcttctgattatatttttcaaaatcatttatgaaaatatttataagtagaattaattggcttaattttccaccgaacaactcatgtgcttactttttcaactgaatatatatatgtattccttttcaagtgaattgtcacagatgacaacagtactatatatgtatattcttttaacatgttagtctgttctcttcgccggagcgtgagaatcactctctccaggtgcgagtgggatagaatgagagtccacaaatagacatatctttttgcggtctctatctaaaatgagaagattagtgaaactgaggttgcataggataccttgttggagccttgaatatgctcatctaccagatctctatatatatacaaatatatatgtacatataataaaaaagaagaaataggaagattggtaggaatgggtttttaccaaatataccaaaccaattatcacaaatgaatctttccacgtgaactgtctgctcttaaacactcttattagcttcttttatttatttatttattgaaattaatttaatttaattctcttctctctttttgcttggttttcaccgttaatgattagccttatacaaaaagaaagaaagaaagtaaagtaatagtagtagtagtagtagtgaaatctaagtcttaataatattcttttcatcatccatgtgcccttgggtttagctctacataaatattgtacacatacataatatttattatttctttttttatataaatgtggctatatttggtgatcatttccaacactcaattctacataattataaattattattatatttatagataaattttcaaatttcaaactgagattcaaattggcggccaaactagctatcactatatataagttagtgctgtgtgacaatatatatataattttttttatatatattgtgaatctcaggccaccggactgttaaaaatgtaatataaattattttatcaattcgatcactgttaatcatgttctgtaataataatctgagtaaaaaacattacatttatagaccacagtctaattgaattttttattaagttattattaaatgcttgaaataattat

SEQ ID NO: 382180 - DNA, 812 bp, Cannabis indica
agttttcgtcgacccaatactgtaaatccccaatccaaagggttctgacctcctcaacggtggtaggctgatggtggtggtgttgttgttgttgttgttgttgttgttgttgtggttgtggctgttgaggataaccctgaaacgtcgttgttgtcgccattagaggtaccttcctacctactttctttgctctctgtctttcacagttcactcacacagtctctcttccttcctaaaccctttcctttgcctctctttctctctctctctgctctctgaaaatgtaatatgttcgcccagtagtctaacgccaccaccaccctacgacgtcgtactaatagaatggcaaagcaatctccttttccacatttgatttgaatcgtttttacatccattgccgttatatacaataattgtcgttacttacaaaataatttattattttaacaaaatatatctatcttatattaaacttatattaaaggtgactatataataaaaattgttatttttttaaaaaaatattacaatttaaatttatactacattaacggaaggtgtgcacccatctccacatgggcccagctctagatgtcaaagcctccatctgcagacttgcttggcttctctccgtgaacgaagagcctattccagttcaatccaggaacactgtcgagcccttgtaaggtttcgtacttcgtaaaattgccataaatcctaaatttgttgacatattcctccatttcctaaggattgtcattcaacatcagtcttggagcattctcttgctccaggacctcttcttccagttc

SEQ ID NO: 382181 - DNA, 5462 bp, Cannabis indica
ttctattattttggtctataattatcaaattaaaaatattacatttaatttttttaaaagacaatattttttgttagtgagagcttacttatgggtcccttgggaggctactaataagtgtcattgctagcaatgctttttaaagtacgtttagatatgaatttgatatgtgaatttgtaatattttatctaacaaaataattagaaattagaaattaatatttgttaggagaattaccatatatattattttttaattttttttttcaaattttacattttgagtttctaaagtaattgcaatagaggtttctatacaattttttgttgcaatttaggttgcagcgttagttgcaatatgaatttttatgtagaattctaataaaaaaagactaaaaaaaaaaaaaaactagttttttaaagtataaaaagaaataagtctcaattttttagtaattattatttaaaataagatttattttttagttattatagtataattatacttaattttcataggagtcatgagaattagttagtataattaaaatgcctctattttctttaattatacatttataatgtaatgatatagtcacacaattatgttaaattatctaattttttttgaacaattaataaaatttcattgaaaaataaataagcgttgagtacatcataaaggaagagatcgaagattttctatgcaatttagctcaccatttaccctaagtgcgtgcgcaattaattcatgcatagtcatattggccgaatgatttgcataaataaagaatgccttaggaaaattgaacaataaattaaaaaaaaaaaacatcaaaaagagagcctaaaaaaaatctctagaaataggcatagaacaaatctaaacaatcaggctcaaaagaaatgagagtaagtccaattccagcaacaaatccaatgcaaccattattagagctataacttccgcctgaataactgtgagatttccttgaatctatcttaatctaactaagaaagtaagatctgctgctagaaaagttgatacctattctaaaaacattaaataaatatatttaataacttcataagtaaacgttaaaacaacaaattttaaattatatcatatgaattaataatatagtaaaattttgaaaaaagagaatgtacaacttaaaattcgatcacaggactcgcacacacgcatccaccctcccatacttacttggccacttgagttagcctcaagtggttaaattgtctaattacatctatatctaattacaccataacttccaaatataccagagtcgggcctgggctaggtccgcacttagtgggcccaaaaaatattttatatttaaaattatacatactttttagtagttttcaaaaatatcatatattttttaaataaagggtctaacaattttttttttcctacgacccacccaatctcaaaactgggccttgaaacacaccctttagttattaaagcataacttattaatagagtttttcttttcttttatagtgagtaagtattgttaagaatgtttcatccgattcaatttgtactattttgctcatagtagattcgatcttacaagtgcgaatttcataggggttagtttttaaataataaaaattgggggaccaaaattgaattatttttaatttcaccaaagaaaacgtaaaattggtgcaaatttcagaaaattgggtctcactccttctgaagaactaactttcgactccgccaaagctcaaagattttccgggaaagttttttctcaagaaacaaacatggttagttttccttctcactttaacattcttttccttctcttcaaatcgatccttacattgttcggtttttatatgaaaaaactgtgatgtaatgacttcaaaggcctcaattgtcagtttgttagtacactcgatttgaggaattacactatatggcttagattagggtttaaatttagtgtttttagtgcttgtaatgtagatcttattgtgaattgaaagtgatctgtatttctagtgcttcacgcacgatctttgggtttggatccaattttttattaggtctagatcctgcacgttatgtttttttgaaaattatgaaattatatgtttttgagaatcttatatgtgcttatacacatatcaatgttatataaaactctgttgaaagaaaattatgcatttcaattgagagcttgactaattatttgatcaatttggatcaaaacaattatattttaatttgattatttgtatggtactattttagctttaaacaatgttattgagcaagaattcttgtcagaatgtaataattcctttgtttaatgattaaatttactcattaaaatataatttgtttattttgctctcttttgtgatcatttcagtttatataatactgattaattctgaagttagatcaaggtgatcagctcactgtactttcttgactgagtctaagaccagtccttttgatactctcctctaattaaggggaattttattaatctttctgctcatttctgtgattgagatacttggtatcctatcaaaatacttagtcataaaaataaaatactatgtttcgaaatgtgctttattgaagtgtatatgttgtgtttgaagttgtaaaacctttttgcccaactatgaagtgattgctgcaattactttctcattagaagtttgagagtcggttgctgttacccgagtaatggttttgtgatttcggttgttttgagatttttaatttttcgtttgcctgtttcttttggcaggaggcatgcccgtctgtgaaaaacatccttctccttgattccgaaggaaagcgtgttgctgtgaagtattattcagaagactggcccacaaatagcacaaaggaagctttcgagaaagcagtgtttaccaagacccagaaaacaaatgcccggacagaaggtagcctttctttctattgattttctgtcaaggcgtttctttccaagtccttataggtgagccatgtgccatgtaatttttctttttgtttccttggatatcccctagaattagatgatctgtatgcctgtaaatatgtggtctcttagttgtaagttaaatgcaaatataaaactcctcgttgttagttgttagcaagttttgcgtgcctgtcggtttttcttgaatcatgcatattaatagggttatatccttgaaggattttgaaatgggattataagcattgcacgagcaacaactttttgtgctttttagtttagatatcatataagtctataagatattaatctgtctcatcaagtcgacattttctttatttcgttcttgttatcatgtacttatagttatacttaatctacagcggagatcgctatgcttgagaatcatattattgtctacaagtttgttcaagaccttcatttctttgttacgggaggagaagaagaaaacgaactcatcttggccacagttcttcagggcttctttgatgcagttggtcttcttcttaggtttgtactttttcgttttcataatctctgcatatgcctcgtttctttaagttcattttcaaatatttcaccctgatgttttcaatgctttaccattttgtattggtttcaatctttttccagaggcaatgtagacaagaaggaggctctcgagaacttggatctcattctattatgcctcgatgaaattgttgatggcgggtatgcaatcttcctctgttgcatgaagcattaacaccgtcctttttgtcgtttacatgttatgtattctcgtctttgtgcagaatcatcctcgagactgactctaacgttatagcacaaaaggtggcaagtcacagtatggatgcaggggcaccattgtccgagcaggtacgaacattctctcctcagaaatgatacaaacaaaaccaatcccagtttcaccattcttaatacattttcggttttgcagacaataagtcaagctctagcaactgctcgcgaacatctagcgagatctcttcttaaatgaagagcgtctcagattttaacaagagaatcgaaaagggaacgagtaattttgtgtgatcggagtgacttgatgtgcaagtcttataattgttgacctatataacaagttttcacccaaatcaaaatgtatttgcatatgagactttctacttcccaatattagagttccttcttttcttgtcggcattagtttccttttggtcaaatattatcttctcttcccaactttttcatcttcttcttcttcatgtaaacttgatttagatacatatatatagtaaaaagaaaaggggtataatataattccaaacttaagccaataagaagctaatttggctgtgatcaatagtctcttaaatattgataaaaattattttggaaaattttgtaaaattttatgatctctttgagcttttagaacatcaattttctgtttgtttgagtaatgtttccccctaaaagaagaatcatacagagaaagaaaaagaaaataatggtattatttataattgtcaatactgacattttgtaatgaagcaaaaaatggtaactaatctttacattctttcttttataatttccaaaccataatattctttcatcttttcttctactttctttagattacaagtactgaaatcataataatgaaacaccaactcaagtaaataccaaaagatttttcaactttaagtttgatatttcaattcaaatagtataatatggggggtaaatgagagtattctttatgtatattgtaagtataaagaaggaacacactcattttattttataaattcataaataatttagaaagaaaattaaagttcaaacatgtggaatatatataatattaggtgattctacaatgcactctcttaaaagggatgtaagaattttttagtctatattcatatacgttataggtatttaagatcaaacagtctattttacacgcgtataaaataaaatagtcactcgtgcaatacactgtttaaacatagttttctgcgtgttaaacttttctaaatttcttaaaattttgcatgatgtcttaaataactataacgtacatgaccatgagaaaaaatctgactaaaaaaataattcacagacgaaaaaaaaaaagggtgcatcaatatatccattttaaaggagtgcatgtaaaattttcctataatatttgaaccttgtgtaaattattcaaaatttcttaaaaactgcaatgtacaaaaaattagaatattacgatacaaatgccgaaaaacacagagattacgatagacattcttataatatacatatcttcttattattgttgcttcaactaaactggattatcatgtctaatcacttttggggtatcatgagaagtactatccccttcttccatagtctcttcatgtggatcat

SEQ ID NO: 382182 - DNA, 2573 bp, Cannabis indica
agctattctggttcgaggaggttcgacgcctattgtagtttattgttttgttaatcatgtattttattcactacgttaaaaaaaaatatgcgagtcagaggacaagtgtacaaatatacgagtaacaaatatcttgttatttcccaatcactaatcactagtcactagtcactggtcactattcttattattatcttttttgtcatagcaacagtcaaacagttggaccatgtatagtttcattggattggatttttgttaatgtgtatcagtatcacctatcaaaatgttcctaagaaaatgaagaatggccaaacacacaaggacaaagggaagtgtctttagtgagaaacatattaggtagcttttgtgttagattgatatacttgtaattttacaacacacaacaattccacaacgtatatgtaatctcagtactcctctttcagttgaagccccacagaatctaaacactgtgaccaccctagataggtatgtacaattagggtttacattttgatcaagacaaatttaaaaaaaacaaaaaagaagaaaagaaaattgatgccaacatcactaaaaaaatttaaaaaatgttaaaagatactagtcgaaagataacgtatcgttattagtataattaagtatcgagttttatataatttattataataactaatatgaaatatcactaattatttacaaaatgtcacttataaataatgttagatatatctaatgtctaatgataatattctaaattgttaagctaaatattcaaaaatggctaaaatttggaagaaaaagaatatattcaaagtatacattcaaagtttacaaaaaaatatggaggaccataatcctaagtggagagtttattttttgaaaataaaacttacaaattcttaataatacacttttttttaaattatatttaattttttatttttgaaatcttaatttaaaacattacatcatatataataatttaataattattataaaagaaaatcatgtaaaacatcacatcataataatattcacagcactcatacttaataattaaccattagagaaatactatttttttttcattaacaaaaaagggaatcatagtaaaactaaaatggttatcagttgtgctgtgagattcactggctttatattttagtcattttgtcttaattaaattggcataacttaacaacttcattttttacttaaccaaatatacattaagaagttgagatttgtatcaacatatcactttgaaactacaatcatttaaatatgagactcataaatgaactggaaatttcagtaataacaaaatcaacataaaagtttgatccaacaaattctttagcaaaaagtaaaccatgatataccatttgatgatgattaattttccataatacccctacttcatatatcctaataattatatattatacattaatgctaaataaataaataaataagagacacttaagtaacaaaaagtaatgatccaattccaaattaatcaagctacaaggaaaattcacactctattatagatagagaaaaagaaaagagatcaatcatcaaaccccagatgagatttaagtagcaaaattcaattattttaattaactatatagttttcttttaaaattttgaaattcttcaatggtcaaacttgtcaaactgttgaagcatttgaaagatggtgagattctgagttggaagaggaggcaaaggtgacattctggtcaagggcattattgtcttttcattatacttctataatcattatcatcaccatcaccatcattaccatcatcataatcatgatcatgatcatcattctctgcggttagagtgatgtgatgcctcttacgaaccggacgaaccgtaccagtaccgacctctttatcatcttcttcaaatttcttctcttctgctactgctattctcttctcttgttcctgttaaaattttctcatcaaccaaacaaacaagaaaataaaaaagtaatctttcttataaagtttgaatctttaattttgtgagtacttacattgataagagaagaatgtggtatgggacatttgacaggcctatcttcatctgggggttccattgggtgttcaactggccagatttcaaactcaaattcaactccattattaatattattattattatcatgattattcatcatcatcatcatcattgtactatccataactaagttgcttctttcctctgtttcacttactctcttctcctttctttcctaaaatcaaaaagatttgttttttactcaaaattaagtaaaccccatttcagtacagccaaaacagataataatatgaaaaagaaaacttacaaaatcattatcatcttcttcatgtgaaggtccattggagtaaatgttcatagttttgtgccttaacaaagagaggagagagagagagagagagaagaaaagtgagtgagtgagagagaaatggagctatgggatcatctgaggaagaggaagaaaaagattcccaccaagtgattcactttttctttttttagttttt

SEQ ID NO: 382183 - DNA, 3419 bp, Cannabis indica
gtttttatgcttaatttagctatattaaaaaaatcactttttacattatatccaaaatatgtttatatacaaaatatttaagttaaactcaattttttttgccgaaaaactttttttcttaatttttttcagccaatagaacaactccaactcatataatgtaaatatgtgaaattttttttaatttgataaaaaaaactaagcataaaaaaatcaaattttcataatattacccataaatgtgtgtaatacctattaaaagtgcaccctgaaacacttttcaataggtattgccattgatggttactaaacaatttaactataaatatatatacacaatattaaaccctaaatcaatatataaaaattaaaattaaaataaaaaattatagattaccttgactgaaaaggagaaagtgggcagaggtggccgaaggtgcgcacgccgtcagaggtgggcgatgtgctacctttaagtttatctttttgttaatttacaaaaaaattaggaagaaagagagagattgagggagattgaatagaagaagatggagatgatggtggtgagggtggtgatgatggtggactaagaatagggaagaagaagatggagagaaagaagaagaagaagaagacaaagaaagaaatggggaaaggggtagctgctggattttattcagcatcaacttttgtcggaacacttaggttcaccggcaaaagttttacttagaattaacttttgccggtgcacttacgctcgtctgcaaattattttccctaaattaaaaatgaaatgcatcacttcattaattataaaaagttttttcggctagcctaagtacgccactaaaactttttcacctaattttctgagcaaatttttactgcgcgggaattaaacaaccaaatatttcattacttttgccgatgtatttacgcatcggcaaaagtgaaattaaactgccaaagttaataatcttttgccggtgcacttattttcgccgggaaaatagaattggactgtcaaaagttcccaccttttggcagttggtttaccaccttttgctgatgaaactaatgtactatgctggcaaaataagtgaccgatataagtgctacccaagggaataaattggctaccttttgcctgtgaggttcatgaactgcgtcgacaaaagttaacttttgtagcatagttcatgaacttcgccaacaaaaaggtctttttcttgtagttttgataagtattattttttttttggaaaaataataaataataatgacacttatttttaattaaatataggttaaccctaagacaagaaaactttcaaatgttgtggagattttttgaaagttctgccataaatgataataattagtgtaacgaatatgcgcaataagtatatgtaagcttacattaatatttattaatgtctgaacattttttttcaatttattttgcattaaaattgacaatttaatttaattaatttttttaggaccaaatggttgaattggctgcaaatcaaccaacgctcactgaggatcagtctgctaaggatgttatagattccacccagtactcacgagacctgcatgttatgacacaagtactgggtgagcgatctcatacatctgagaggctttggccatctcccgagattgtaggcagttgggaccaaaagagcacctaccacgattttttttacctcacagactgttactatggaacaatatgaggccttacagaaaaaagtggaggcacagaaggaaccttagtattcaaataagcaatatgaaacacaacaattctacaccaagcgattccaagatcaatttgagtatctcactcgggttatgcctagtttcaacatacatcctatggattttctgccattccccactcctcctgatgctggatcgtcatcgcatcgtcctgagtttcagaataataacgacgatgacattacccgaagttagaacaatatatattttgtaactaaattttaaatttgatttattttcacatcttttaatattttgcttaattaatatctttagtataaatcaaacatgtttatatattttactttcatcaggatactattttaattataaatgtgaatattgttatttttaaattatatttctttcaaatctaatttaatatttaaaattaattataatactataataaattattaaaatataataaacgaaaaaaaataaaaaattaaaataaaggcttttacgtgtatttttgtgctagcaaaacttacgcctaaaccgtaaactctaagacttttctcaggacataagtgcgccagtataggtcattcccacgaaaattcatttgacaggtaaaggtttttttgacgcattaatgaaaaaatacatgaaacccttactggcgcacataagcgctagataaaagttattttatttgtcgatggacagatttaggtctcaaatttataacgatgtctggtttttttggtgcataacagagtcagtaaaagcctattttattgatgcaaatgccaattgcaccggcagaaattcttttactgatggagattagcagaaaatttttatacattatgcctacttttatcggtgcaaaaatatgctgacagaagtaacatttcttgtgttgttttacacctttctatcaaaacatgttaattttacgctaattacattggagcactattatataattttgaccaaatataatattgattcatttttttgagcataaattatacaccatccattgaagatgataatgaaaattctaaggggtcatttggtatgagatttatacttgatgggagtaggaatatcaaactaaatttaattttaataactaagaggtttgtgtttctaagtggatcatactttttaaattaaaatagtgataataataaaaaacccccaaaacacgtaagttcaaaatcccctccaagtctactctctccaactcaaactcacataacaaacaccccattatttgacatttcgttagaaagaataaaaatatagttaaaataaaaatgacattccaatactttaaaataaaaccaaataaaagaatggaataaaagttgtttcatttccattctattccatttccttacctcaaaccaaatgccgcctgagggaggtgctaaacaccataaatggtggcataccattattggtgatttcaatattggttctcacaaatttttatttagtaaataatataggaaactactaactaattattaagtatcatatgcatatagtatttggcatcttaagatgcactacaaaaaatgtagctttagcaaaaccatacttttttgtgactaaaaatgactttttgtcacaacaaaaaattatttgtgactaaaatatagtatttagataca

SEQ ID NO: 382184 - DNA, 4002 bp, Cannabis indica
atgctaccggtactgctttatgagcattcatatctttacttcctttctcctcacttttctaacttgtttattaagtaaagaattatcactaaataacattggattcttctccaaatatatgccaagttaaaggaacggtaagttcaagattttggttatgaaaacatccaaaatactcctaaaaaaaatagcaatgcaccaagaaaatgacccccaaaaaaatgaagaaacaaatggcatttctcttcattacatttatgagcacaatttatttatttttttttttttttggggggggagattttgttacaaatgttttgagcaaagttggtgattttattatgatttttgtgactataataatataaagtagacttaataatgatgataataaagttttattgttttttgtgcttgtcatgattattgtgatgataataaaacaaaagctatcaattttggaaactcatatcattggatgagattgaataaattgagaaacagtatatattgaagttcagagcaaaaatatcatcaaaccacattataataatatttccaagatcctcacacgacacatttatagcatagaatataaatagaatcagagacaaaatgaagcacaacgaactgttgttcttttatgtacatatatgatacaattagaaaagagtacacattgtattgttagagagaaaaaatgaaacacaacgacatgttgttcttttatgtatatgtatgataaattgtattgttagagaggaaaaatgaaacacaacgaactgttgttcttttatgtataaatacacattgtattgttactcttcttctggtttatgctgcactgcagtaaacaaagttgaactgtcaaaaagaatagatgatgttggctcctagcaactcctcatcgaatgtggatcaaatgaccggagaaaggctctgggttggcttttgcagcaggtttagctgcttcagggaccccaaaaacattccaaaaccgaagtgtttcgtctcctgctgctgaagcaactgtgcaaccatctgggctctgaaaacacatatacaaatgagagaggtttagaatcttgtttaccaaaggttaaaaaagttcaatttttttgtgtaaaaatcatgtgaataattgatttacctgggccatgtaaagaactctagaggtatggccagtaagttctgccatcttaaccattgacggatacttccatagggtgagctgattctgtgtaaaaccgtgagagctaagcagctctcgctcgttcttgttccacagcaaagcacagacttgtgagccagtgtcgatagtgttgaggcaagcaccgttgtgtgtgttccagaatttaatggtacgatcactgccacctccaccggtagccagcaaattgctctggaaaggacaccaggcaagcgctttaactgcagatgtgtggtttgacaacctgtgaagccacctagtgactgaatttgtagaagcagttgaactgtcccaaatgtggacgaggttatcattaccgccgctagctaattgctggcctgaacctgaccatttaagcccgcacacctcttgttcatgtcctttgtaggttccaacgatgtgtgatcgaattcttacatcgttgttgataattcgaccatccattccacctgtggttagaatgtgattgttccatgctagtgaaccaacgagagctctgtgtccgcctttaagagttctcagctgaaataccattccacagcaaaacaatcagcataatttcgataatcgaaacaagtacaatagtagaaaataaaaggagtttcagaagatgtacctgtttgttagaagctgaatcccataactgtacttcagaattgtttagaccaatggcaatgtgccttccatcaggagcccagctaacacttgtaacagggccactttcttcatcgattgtaacaagctccgaagtagagccttctgtagcgtcccacagaaaaactgtgtttcctaaagctattgctaaaacatttgaacacccccaatccaagagattcaagtagaagttatctacaagttcaggagcatccagtgtccgctcggaagactgcacacacaaccaagttacagtaagcatagcatatgttaatattttggtttgctcaaaacttagcatcagtttatgattgaattggaaacaagaacacacctgaggaatgtgacgcttgggtttttctgctctctccaccggtgcagaagcaaactcacaagggaatttctcaactggagcaggaggcttgttcttgaaagctaagatccgaccccggttcatgttgaaggtttctgccagaagcttcttgtaggcttctcttgcaggggataaactaatcgggctttccttacattttcttccctcagtcagcatgtagtgggcataatcgaaatccattgcggatctatttgggatgaacctgtccagctgataatcacaaagagaaccaatcaattaaagttcaaacaaaaaaaaaacaccataacactaaagatcaatggagataaagcaagaaccccaaattaaaattttgagaatatgacttcaaagaccacaatatcaaaaatcaatacatgcccaaattaacaaaaaaaataaaacaaagccctaaatcaagaccccaatcaatcaagattctaaaaataaattaacagaaaaaaaaaaaactaaatctaaatagaaacaaaacaaagccctaaatttgaccccaaatttcagaacaaacctaaatgaagctccctaaatcaagaacgctaaaatcaaaacattcaaataatttcagagaccccaatcaatcaagatttcatgaataaatttaaaagaaaatcccaaaacgatactcaatatttcaacagcagctctcccaaatctaaacagaaacaaaacaaagccttaataatttcaaaacaagcctaaaaatctaaatttcaacaattcttacattatcgcgagaactcttcctatgaagagggaaacgagaacgcgtcttcaacgttgaagaagaagaactaagagatcctcctcctgcatccataataaccacaaatattatgtatatatatatatatatcgcaaaaaaataaaaacaataaaaattgaaattcaaacaattaataataacaaagaacttcttcttcacttaaaaatcccgcaaaacaggatttaaaacaggattagtataacaattatggaagtaaacgagcgttggttggtgatctggtgatcaccacagagctttaatcgtgagcaatagtgagcgaaagagagagctagagaaagagagattgagttgatctgtgagagtgaggtaataatgggtttgaggaaaaagaaaccattttttcattttaaagcccaacggctattttttataatgaataactttgcatagtaaagttattgttaaaacttttttttttttttactttagggttaaaatttactgtttttctaaccaaaaaaaggaaattgtaatattcttttaattttttagggtgtaatttctagggtgagcaacggttgatttggtcggttttttacaccaaaaaaattcaaaattcggttttcagtttttatggttctaaaccgaaaaccgaccgaccattataaaaatataaaaaaaccgaccgttttaatccacaaaccgaacttcaatttttttttaaaaaaaaaataagttttaaaatttttataattatttgaaaactaaaaaattaaagtattgtatcaaatatcatataatttaaaaataaaactttcttagttaaataaataatgtaaaataaacttttttaaatttgttcaaattatttgtgctactaatatggtaatgagttatattaaaaaactagtattattttatgaatgtgtgtatataatatgtaaatgcatcaaattataataaaataaaataataaataattgagactttaaataaaaaagatataagtaaacttagatt

SEQ ID NO: 382185 - DNA, 3693 bp, Cannabis indica
aactcagctcaatgagcatgagttacaatcttccattaaatagaaatatcaggcacagacagagaggctcaaggccaataacagagtgccacgagtacagaaaatgtctcacagaaaactaatcattacagaaataacaaacataatctctcctgggattgctaaaaccgttatgcattatcaaccagcttattaccaatttccccgacaccacccctcaagctgtagggtagtgaagcaaccacacaaagcttgttgatgagaaattgaaatcgtgatggagtgaggcctttagttaggcaatatgcaaactgatcatgggatggaacatatttaatctccaactttttttcaagcactttgtctctcacaaattgcacatctaatttaatgtgcttagtcctggcatgctacacaagattagatgataaagcactggcatttaagttgtcacaccaaatcactagaacagatggaagcttgagtttcatttcattcaatagaccctgcaaccaagagatttttgctgcaagttgagccagagatctactcagactctgtactagagcgtgctacaacattttgtttctttgatgactaagaaaccagagaatctctcgggtagacacagtagccagccactatcatctaggcaacatgcccaatctacatcagaaaatcctaccagatggagatgatcactatgagctatatgcaaaccatgataaattgttcctttaagatatttgagcaccctttttactgcactccaatgcacatatgtgggtctttttaagaattaactaagtttgttcacaacaaaaaaaatatcagggtatgactgagatattgcagagctccaatgatacttctatacaatgttggttgttccagtggcttgctatcattgatagacaaaactttcctagatgtcattggtgtagcactaggcttcacatgttgcattcgagccttctgtaacaattcagaaatatatttgtcctgagacaaataaattctagtattatctctaaagacctttacaccaagaaaataatgcaaggcacctaggtttttgcaagtaaaagtcttattgaattttgaaatgaaagtgctgacttcacttgaccaatatcatgatgacaacctgagcttctttgagcataaagaatgaagagtttactcttgaattaacaaatttccactgaatcaaggtggctctgagttggtcataccaagccttgggtgactattttaacctatagatagacttgtctagtttacaaacatggtctgatttgtgttgatcttcaaatctcggaagctaagacatataaactttctcatcaagaataccattaagaaagacattgtttatgtctctttgtctcacctcccaatctttagcaacatcctttgtgaggaccaccctgatagtatcaacttttaccactagactaaaagtctctccaaaatccacctggactctgatgaaacccctttggcaacaagtcttactttgaacctttgaaatgtgccatttgcattgaatttttccttaaaaatccatttacatccaactaggttgccaatgttaggtctagaaactagggtataggtcttattccttttaagagccaatatctcatctaacatggctgaattctacccctcatgctgaagggcatcagtcactaaagttggttcatgatcagcagggttgaatcaacttagattaaggtaaacttggctcttgtaaccatgggatgtgaggtaacagttttagcaagtggagaaatactaagtataggacttgatttaggggatgcatgagctgaaacatcatctagcaaatcatcaaaaacaaaaggaataggataaccatcctcagatgaagcaggacttacattgttatgtggtgagggtgtagaagaagatgatgttgcaggaatagacggagaggcatctaaagtgtgagagatgagactgctggaaattgaaaccgggaatggggagttgagacagtgataagttatttagattggtaattgttgaaggaaccaaaatgataggggaattctaattcattaaaggtgaaatttctagaaatataaatcccccttgaggacttagacatttataacctttatgaactttaatgtatcccaaattaagacacttaatagaatgatactggaataggcaaacgattgattaagtaaattgaagtctgaaaaacatcataccaatatttaagagtcatgtttgcatgtgcaagtaatgtcaaacccatttcaactatgtgtctatatttgtgttcaactctcctattttgttcagaagtatagggacaagagtggtggaaaaatattccattagcaacaactaaatctaagaaagctttaaactctccttcccaatcagtttttaattattttatctttctattagactgattttccactaaattttttaattgaataaatgctgcaagaccatctgatttttgttttagtggaagcaaccaagtgtacctactataattatcgagaaaatgaatataatatctgaaattggtatgtgaagcaactggggcaggtccccacaagttagtgtgaataagatctaaaacatgtaaagcatgactttcaaaatttttaaaaggcaaagcatgtgattacccaaatcgacaagcatcacaaaaagagtgtgtttcaatgatagaatgctttacattagtagtttttaagacttgatgtaaaacaacattggacggatgacctaggtatctatgccatgcatcctttagggaaataaaaagttgatttgtagacttggactcaattgctacaccagaaaataacttggttagaatttgacaaggttcttcacctacagtgcttgagaattgacactatccatctttaaaggttccttgcagcaccaccttccctattgctcaatccttcacacaacagaaatcagagaaaaactcaataaatacatcattgtcacaagtcaatttagatacactaatcaaattcttagttatacatggaacgtgaagcatatatcttaagattaaacgcactatttccaacatatttaattaagagttttgtaccatcaccaattgtcatatgctccttaccaccatactccactttgttgttcaatttttcagcatctgcaataaggtgattggtggctccactatatgcataccaactgtcatcattcagagtttgaggagtggccactagagctgtcatttgatacatctctttgctattaatatggtagaggagttttgtttattcacggcaagggcgtgtagtcttgtttctttttgggtacattgagataatatcaattggttcaaatcaggtttgtgtatgtagcatgattactcttgttcatgttaaattatgggagattcttaaaatcttattggccccatggcttatggtgcatttatttattacaattgttatctccatggttggttgctttgctattttcttttaggttgtcattactcaatttttattgaaaaatctttgaataatttttattaaaaggtgtgatttgtcacatatttattcggattgaagatctaacattctttgcacttttttaaagcttcaccactggcagcttattatttttagttgaaggtgttattagaggttt

SEQ ID NO: 382186 - DNA, 1398 bp, Cannabis indica
atgtaacattatgtttgtttagagttgatatcaatgcaagtttcaagcaatgtgtcccagtccagtgtatggtgttcattcactgtagcttgttctttctactcgtagtttaccattaaggtgacgtttggttggaggtaatgaaatggaatggaatggaaagaaaacaattttcattccattcctttgtttggttgcattttaaagtattggaatgacattctaataaaatgctctttctaccaaaatggtggaatgactattctattttaaaaaaaaaacggaatgacaattccaatgtaacaagaaaaaaaaattaatgatttttttatcaattttttttatgtcattttaaattttgtttttaaattatttcatagaatctgtaaccactgtaatctttgatctttataggtggtatttcagttttcacttgaaattgaacatcaagtttatatctctttgtgtccaatcctaaagattcacaaattttactttcaaaaatttcataacagcaatttttaggtactaatattcctctgagtttataatttgtgtaggtggttttatttagtcaatatccattgtaaaaaaaaaaataatggctccaggaaccattattatctgtctagaagatacaattgtgtatttagtatttcactgctcaaatcaaaaatagaattagtcgccattttttaagacattagttacacattgtaaaatttttgattcaaatttgaatgatgaataaataagaacttaaagcttataatgcaaattttaatagaaatcacatagtggagaattttttttaatacaaataagaactttttgagtaacagaatgcaattaagaatgcttaaaccgtgttagtccatgctcttaaaaaaaaaaaaacaatgattttctaaatgttaattcttgatgtatgtgaagatcagtggtgttggcattacaatttcaatgattgctatacggtgaagagtggttatgcggttgctcttgatttggtgaacgaaaggattggttgttcttctgtgaatcaatctacttgatggaatgggatgtggaatttaaaaataccacagaaagtcaaaatctttctctggcgaatggatcatctggctctcccgactaattcccaacttatcaaatgtaagattcaagttcaaccgatttccacagatgtggtgaggacacgatgactctggagcatgcgttagtgttttgttcttctttgcttcctatttggtcaaagcttcgggtttggagtcagttaaatcgatgtaggaatggttcgttagcggagctattggtttgcttatttgaggagcttggtcagagtaagtttgcgttgttgtctatgatttggtggtggggtgtggtatgatagaaact

SEQ ID NO: 382187 - DNA, 3568 bp, Cannabis indica
tccttcgtgcgacgaaatcttctccctcttagcccattttttttttattttgcaacctaaaacctagttttcaagctccgattgaagcagtatagtgaatcattaaagaatgagagcttatggtaagaattagttttgttttaagttaaaaacgattagttttatataggggctttgtgatttagagtggttatggagattctgacttcgtagcattgttctttggtagctatggaactagttttgatgtttacttgttgagtttgaggggattttgagttagaaatttagtttggaactttttgaagcttaagtccgagcattaatggggttttctgtctaagggctcacttttaaattcagtcacgttgggactatagtatatatggtatttatgtgtcctgtttggataggtttccggggtgtttcggtagtgaaaatatgggattttcgtgtcagactattttttgaaattcttaggagatcagaaattgcatttttatcataatttttcactcgagtgtccgttttggacgttttatataccattctgaagcttgcgacgagctctataatatggtgtatgttttagaggcaaaatattttttttatttagtgtatttatactgtagggtttggtagaaaatcctagattgccttgtgtgaatcttaaacagtattttgagatagacacttattggtttactgttgttgtgacataaagtcgagttcatcggtgaggtttctccatttggtatctagattaaaggtaagaaaagcatattgtactgcatagcatgttatattgcaatacaattaatattgttgagaattgattgaaattgagattaagatacggttattattattatgtaatgaaaaaattgcctgactaggaaatgacaatgtgaggataacatgaatgtgatatacgagctcacctagttaggtgatgcgatatacttttaggtgaaaccttattaggtacgggtggcagtgatatgagaattccaggctatggcatagattgtaaccgttgttggatttcttcctggcggcgtaccttattaggtacgggcggtagtgacatgtgaatactaggttatggcataaactgaaactgttgttggatttcttcctggtggcgtaccttattaggtacgggcagtagtgacatgtgagtacttggttatggcacgggctcacctaataaggtgagggaatgatattatgtatgatgttaaattatggcacgggctcaccttatttggtgatgcgattatgtgatgtataagtgccaggctatggtacagacttgcctgattaggcaatacattacaggataatcaaattaaagcatcgatttacgtgattaggcaatgtgatgtaatagagatgattactttaagaggtaacatatataatttatattattagatgaatatgatttctattattgatataatggtttttcatttctaaatatctttatactgatgtttttttttcatgacagatgccagtagtgatttaggtttcatcttatgagtaatgcgtgattgtttgattctaattgtctgagtataaatgataatattcaaataataaattatatgattcttgttattacttttcttactgagtctttgtgactcacgggtgctatgtggtgcaagtaaaggcaaagaaaagttaaatcaatcatgaggtgacagtcttctctagcaatatacatattgaccctaccggcctgcatgctaaattgtcatgagttgtttttcgggtgtatctgccatgtattttgatgtagtacattggcttgttgtcgtatttagcctttttgtaaaacttgtacaacagggatccccgaaacataattttagtgtcattatgatgttcgtttttagtattttattttagtaaagttttaatattatcacactttttaatagttaattaatttattagtactaaactagtttataaaaccacacacgtggcgtccctataggatagggtgttacaaacttatagtgtatgttggcattgcttggagaattacgaggaattccttaccacccatcgagaacacagaccccttccaaccacgaaccttttgctagactctatttttaataaccttaaacaattccttcttgcttcagcccacaaaagactgtagccccaaatattttccatagttattcataaccttaacttccaacatcgaagctagccgactacgtagactcctataaactcttttaccaaaacatatttttgatttatgaaaattaactgcttttccagacgcaacagtatatttatccaataactccttaaatcgagcacactccaccagagatgcttcagaaaaatgcaagactgccgtcagaggaaacctgtagcctacttcgactaaaagatagtccatgtaaccgacccgccaaatcctctctatgaataagacttgaaaaacttcaccacaaaaaaagaaacatgaaagacgaagcagatccccttgttttaaccctctttatgcgactatcttgccacgtacttccccattaataataaaggaaaatgtgacagaagtgaaacacatcataaccttatgaacccactcttccacatacccaagttttctcataacttcagcaatgaaccgccattcaactctatcataagccttagccatatcaagtttcaatgcgaccttcgtcccattactgaatctattctttgacatacaatgcaacccctcaaaaaatactatagcattatcatgaatgactcaatcctttacgaatgcactttgtgaattcgagattaacattcccaaagatcgtctaagacgattggataagcatttggagacaatcttgtagatgacattacagaggctaactggtctatattcctccattcattgaggcttctcaactttcaggatcaatgctatgatggtatcattcaaattgcatgtgtccgctttattattcaaaatattaaggcaaaccgcaatgacatcacccctgagtttctcccaaaatattgataaaataaattcggtaacccacctactccaggggccttggccagggccatgtctttaactgctaaagcaatatctttggccttagacttctaatatgcttccagcttgcgaaaaacagttcgaagaacctccctttcttcttggagactgttcacttcttttgacaaggaggcaatggcagcttcaagttgatcagaagcctggaggtctttagtcagcttagccacctttttttcgacggcaagaagttttttgttgactgcacccatctccattcagatagctccaagctgaaccctggcttcatcagcatccttcctggccaagtccaattctgtcctcatggtgttggacatggcagcgttcttggaggcaaccgacttaactcgggcataagcataagccatcttcagaccagtctgcacaaagaaaaatattagaatctaagccaagtaaagaaggatagaaggaaactgtcaggaaagacttacctgttggaaattattttac

SEQ ID NO: 382188 - DNA, 3184 bp, Cannabis indica
aaatcaagcacaatcaagaaccacatggaattagactgcatgtttacagttaaaagttttacttttttctttttttttttttttttttttttggttaagattaaaagttttactcttacaagtatgttactgtgctaaatacatttacaaggcaggaaagcaaaccttatcataaaatttcttttacgggagacaacctggttcactggtttaaacaattttgaggattttcttggttatcttcctctaggacaccagatggacaatagtatatgaccctaccatctctcaagctttgatacatccttttcttgagaacttagaatctaacctaaaagagatgatgatatgtttacataaaaaaactgaagtacaatctattaggcaactagtaagtaatatagaaattttctatcatcgacagtttattggttagcttggaagaatttttgtcatatattacagcaaaactgcaaaagtcctcactcatgcctgaatttccctctattatataagtatacaatgacaataacatcttcattcatctgaaaaagttagaaaactcactaaatactcaccacggtaagtctaatgaattcatacatttcaagaagacataacccaaggaaagaaaaatatgttccaaagtatcctcctatgcatttgggtttacatatcttctccttttctcctcatgaatgatatgacaagaaaaacttctcaaagatgacatctcatttgtgttgttttcactcattacaagacatatactaggtgagtaagtaatgatatgactgattggcaaacaagaacaagtccctaatttatccattcattacagaagtaattcttttatataaaaaatttaaaataataccaaaaacatcacctctttattttctcatatatgatgtaatttacttcaaacaggaaacttttctcaagggcacagtaacaagatcagaaattaaatgagtccttgtcaacatcactaattatgtgaaggaaaattcaaacagataattacacaagtgaatgaaaatgaaaaacaaccgcctcccttatttatattccttttactatatgaactatgttttgtccatacaatttgttttttattgtaatgttaatgtatcaaaggtacctctaggtaggtaatcaacgatttttccaaatctgagtgtgatttattggcaggcaaaccatactgcttgcacatgttttggagctcttttcttgaaaagttgtcatagaaacgctttttttccttactcaccattacctgaaaccaaaatgaaatcgtcaccaattgaaatgatgatcaatgaatccaatattcgtaatttcctctgattatggaacttacgaagtttccttcaggattatcaaaatcatatcttacgcacaaaaacatatataaccagatatacaatattaaaccttcaatttcagttctttcttcttcacttcagcttatatttatcctgactttctaaatatcagtttgagaaatagaaaaaatagtgaaaaaacgataaaagaacactaagctacaatattttcagattagaatctctgggataacttaccgtcaaaataaataaaccgaagaatctcgggtgccatttctgccgaaactggcaacacagaacacgaaaaagaaacaagagaatgtggggtaagcttacctgatcgggaattttcaaggaaactttccgagaaagtgcgggaaaatgcgaaaagaaagaagaaagaaggagggagttgaggagagtcaatgccaagacttgggagactctatgccttgcaaatctggtgttggatttccgctcgatttttcagacccagactgaaggaaaggccaatttcgtaattacatttgtttttgtctcttgctacctctttggctctttgtctttatctaagaactgattctctgttaactggcgtacgattgtcaatgtgttctaccaattatagatgacaccatagaatgagaatccacgtggacgagtgagctaggtttttgaggaatgaattttcatgattgggaacacggatttttataaagggaaccaacatcaccgaccttccaatcttttgtgaaaaagaacatggagacatatttagtttggaaaatttgactattaatgcattatattgatggtgttcttattgaatattaaataaaatattttatttttttcagtactaaatttattcttctaataataaactaaattctatttatttatttttattctcatctttttctctacaaagttacatacacacttttaccggagtatccttgccggagtcttagcttgacaaccaagtatgtaggagcaacccaaacttcctactaactcatccttcaaaaagataatgggtatgtaatttatttaataattattgttagattaagttgtatttagttatattaagtttaaaatgaatagatgtacacatatcattcatttactttggttgtcatgtttctgaaactcgagatgcttgaattctgcattttttttgatttttttcatattttagcgataatttgcaatatctaacgatatatcgtgacataagagcatgttgaagcttagagatgacttttaacgacattctacggcatgtagcgattaagtttacgacttgtgccaatttatgcttaccatggacatttttcgcaatttctgtcgacattgtttgcgacatgggtcgatagtttagagtactgtgttggtttagtaggaaaggggttatattgtcgacatgtagcgatgttatgcaacttgcttatcgacataatttgcgatcacttgagacatatcttgcgatatttctcgacatagtttttattaactaatatttttttctttttttttgcggattcaactttatttgtggttgtattatatgatgggacttgcacagttgaaggtttcaactggatattcaataacctaaagagtaagatgttaatgtttgaggttgacactactttacaaaagatacatgaaattttggatgaagagttggatatagacctcttgtgtatgaattgaaagtagaggtgtgttacatgtacatgaaaggtaatatgataccgccagagattttagtgaaagatagtcaagtaagattattcttaagaatgaaggcaaaaataagtgtg

SEQ ID NO: 382189 - DNA, 4185 bp, Cannabis indica
ttgttgcattgattttgatggtcatgatggttaatacttggtttctcttcggcttcaagggagagctttaagcgcttagctgccccgcccactggaagagcacttttcgcaattgcttcaacatcatatcgattcatctcaaagttggtcactgcatttatacctctgaactttatagctgcaatgtcatatgcctcagctgcttcctcttcagtggctgtagggaaatgcgttaatttggtaatctcattaattaaccaattttataactaattcttaggccctaattggataagagtaaaagttatctatttaccaaaggttccaagatatagatctttgtttccggcaacacggccgattcttgcttgccatcgaccttgctgatgatgtctgtacagtagattaatggaccttgattactaatttttcaaatgaaatataaatctatacactaaatagtattttatttatttaggctacaaacaagtggaaatatataataaccttgttacaccccggtatattgaagcaccccttgagaaaccactactttttctgcaacaaaaatagattcgggttaataaattgttctaattagttgagtcaaaatgcaccacaaagtaaatagaaaattattaccttctgagggatgcaataaattcttgcttggtcacgtgtttcatttcttccaactccttactgtagttcgaaaccttgaaaaagaggaacaaccaagattgttcagtaacgtattaagaaattaagatactaatctgaacagcatttgtaagatacatgaaaatcttacaggaaagttggtagtagctgtagcgccccagtattttaaagcagccaaatcgtaagccctggcagctttttcttccttgtcatagccacctaaaacattaatgaagttacatttagggacttgctgcctaaaatttaatttgtgaaacttgaatatgagaatattgatttttaggtcctaatggggaaaggatatgagaggttcttacccaaatatactgcagaacacaatcaaatgttgaattgttgtcaatagcaatgattccgatttcatggaaagaaagagaaaaaaaaggttcaaacatcagtttacgtagtagtcagacattattgctgaaagagttccacaaaaaaatattttaataactaaaagtaatgatgaaataaaagacttttacttcatatttcacaaagcaactctttttcactatacaaagagaaaataatgctcggctaatcattattaccatctaacttttatagccattgtatatttatacattttttttaatatggtgtacaacttggattattattattcaagttacataatttccaaaagctaccaatctttgcaagaagtaaaagaacccgtacattcacattatttaaaagaacccaatgtgtatggacccaaagctaagcccactactctggatccacagagattttcaactagtttcggcgacaatagtggacaagaatttaataatgtcaaattttcaaataggtgctttggtcaaaccagactacctctgatgggatgaaagcaaaagcaaaagttaaagctaagctcagtaaatcagaccccattgatgtctgtaacatctggggttttgggtatcggtcgcatcaaaaccttgcacaatggtgggtacggagagagataggagcgtagtctctgtgtttgagagagagaaagagaaagagtagagagaggaaaatcactgaagcaaagaaaacaaagtaaagaaaacccacatatacaaaatggcggcacatctgatcaaatcaattgatgagaaaagaaaagaaagaaattcagaacagaaaaataaaagtaaagtaccatttgtacatgtatatacgtcaatcaatcataaaagactcatgtaaaaaaaaagagtaaatctaccccacacaaccaaagagcgccatccattaatgcattttaattgcatgcaagtttcttttcagcttttttcataagtttctttacgaatattcaaatcctttaggagttcaaatattccatttatgcaaagaatttaggcaaaagatagatagataataaatagagaaatttgtatttatgtatatatacgaaccttgacgacctttcctggcctgaccctctcttctacagctgttatcccatagatgcgcttcatatctacccgtccacctatgtctgcaacagttcagaaagttagtaaaaactggtacaactcaaaggaacattttcttccaaacttggatcgttcgtgcgtgaaattattatatttaatcaaaaatgaaactataatacattggtgataattatgcttagacattttttactaaaatacaataaacaacaagtctctcaggtgcgtgcatatatctagaaaataatcaaaacatagtactattggtaagaaaataaacactaaacaatgcagagactgcttaatgaatcaggctttcaacttttcaattaattaaaacaattacaaaaggacaattatcaggcgtttcttaaaagaagacatgactttaatttctgggcaatattagatactgaaaataatttctgggaaaataataatgaaaacaaatgtagaagatagtaaataccttgtgacacctctgtaaattgatgttcgctggccaaacgtatcagaaatcttttttgtagaatcagtagcagcgggaacaatggccttctcagaggtctgagtagcaacagcaagagataaagaaccggtaggacagcttgagaaggccaactcgtttccggaggactcaatagaatgagtacccgtgaactcgctgcaactcagctgagctcttgggattgaggctgagtcgtctacttctgagcccgagttagtagagaatgcttgaaatgcagtaacggctttaagatcttgatgttgatcgttgaaataggccgagctgtggtcgtagatttgggtgagggacgagtcctgggtctctgtttggctatcggagtaccgaaccaaagacgatgagtctccaagaaagtcttcgagttttggaactgggtggtggttttgggtacgtggatctatgaagctggtcagaaccggtgattcagcaatgcttgcagaatggccattatgcttgccttgatgatcttcaccatctggaaaaaacacttgggatttctggttcgaccaggctgaaataaaaagtaattacataaataaaaaatgagtaaaacagaataagaaaaagtaagttaagtcggtcaataaagacttgaaactccattaatttgggttcctgttccttcccgagaaaatgaaaaggaaaacaaatgaatacatgaaaaaggaaaataaaaataggtaaaaattcggaccaaagtcccaaatgcaactgtgcatagactcgcacatgcagctgaagtaatcatacgaaagtttcacaaataatcttcccaaacttgtgtatttactacccacgaaaataaaaaaaaaaatgaataaaagaagaaacatttcatgctggtcagtgacatcagttttctcagtaaccaaacagaaagctgaaaaagcttgggagggataatcacgtgactcggtaagattatttgaatgttccattaaaccaaaataggctttcaacgtcacactcaatctcacacaagatttttgttttttccacattgatcattacccttttctcaaaataataataataataataataaagcaagacatatactgtaaattaccattagtgtagaaactatcgagtaaatattgcggagaagcagtagaggaagtatcataagccatgaatggagactgattattatcagaggacctcaacatttccaatggagaaagagaaaacgaaagccagttattcgtccccggagccattacttggtacttgtactattctctctctcacacacacctcaacttcttcgtcactagtctttattgtcacactactattctttgttttgccttctcttctttccactaaatccgaataaacaaacatatatatcatttattgcacaacagattttctcaggaaacaaacaaaaaatcaaaaggaagaaagaaagaaaaaaaagccaaaaccgtcatttaccttaaaccgttactaaaacttcctcactcaggatgaagaaaa

SEQ ID NO: 382190 - DNA, 3469 bp, Cannabis indica
atggaccaatataaatgtcacgtgtacgtgatgatacatgtaggcagtaacagttaaagggttttaccactaaaatttaatgttaaaagattaagtagaagtaaaataaaatggttgaaagaatttaacaccaaattactctatttatttattttcccaataaaaattgttcaaaaataatttcatgaaactcgtgggatcttaaaaacggcgggacccacaccacacgcacgacactactatactatagaatcggaatcttcaagttaatcagattctgtttctataaatagtaatattctaactaaaaccaacaacacaaccacttcgatccataaccataaataaacatagtaataccatgatgttgttcttcttcttaacttcttcaccattcaataacattcttctcatttcaatatttcacttcttctcactctctcaaggactaaatcatcttcaactactcttaaatctcaagactgccatgatcggatctcaagcttctcatggtcttcaagattggatttcgaataacccatcttcttcttcttcttcatccttctgttccttctccggagtcacgtgcaacaacaaccagtcacgtgttacctccctcaacatcacaaacctccctctcttcggccacttgccaccccaaatcggaagctttacaaacctcgtcaacctcaccattgccggcaacaatctcaccggtacacttccggctgaaatggctaaactcacctcacttaagattttaaacatctcaaacaatttgttcagtggaaacttccctggagaaatcattcgtgccatgacagagcttcaagttctcgacatttacaacaacaatttcaccggtacattacccactgagattatcgggcttaagaaattagcccatctgggtctcggcggaaactacttttccggtaatattccggaaaattattccgagattcagagtttgaaatatttgggtcttaacggtaacagtcttactggtaatttcccgaaaagcttaggtaagttgagaaatctcgaagtaatgtatgttggtcacgacaacaattacaacggcggaattccacctgaattgggaggaatgatctcacttcaaatactcgacatgagtaactgtaatcttactggaaatatccccgaagaactgagtcaattgaagaatttacagtctctgtttctatggaagaacaatctcaccggggaaataccaccagagttgggtgatttagtaagcattcaacatatcgatctttcgatcaataaactcagtggaataataccatcgagtttttcagagttgaagaatttgattctgttgaatctgttcagtaacaatttcttcggtaacattccaagtttcatcggtgagtttccgaatcttgaagtgtttcagatttgggataacaatttcacgtttcatcttccggagagtcttggtagaaatggaaagcttaaggagcttgatgttgccaacaaccatttgagtggaccaattccacgtgatttgtgcagaggtggaaggttgaagacacttattctgatgcagaactcgttcaccggaactattccagatgaactcgggcaatgtaaatcgcttaccaaaatccgaatcggtaaaaactttctcaatggaaccattccagttgggattttcaatttgcctaacgtaaccattactgaactcaatgataatcatctctccggagatcttccatctcaaatttcaggcgactctctcggaatcttggtcctttccaacaacttgttcactgggaaaatctcagctggaattagcaacctcaagaatttgcatactctgttaatcgaacataacagatttgatggtgaaattccaagtgaaatattcactaaattaaacttattacaaagaatcaatttcagctctaatcatcttagtggtgaaattccagtttcaatgtttagatcttcttctctaacgagcattgatttaagtcagaatagtttaaccggtgaaattccaaaagagattgctgatgtcaaagatctgagtacactaaatatctcacataacaatctcacaggccaaatcccaacaacatcatctcaaatcagttttgatgtttcatataataatctttcgagtgatcaagttccaaatcatgatcatcaccacaaaattttcaaatcctatttactaactctaactctgattggagtgagtgcactattgtcaatcatggtaattctcctaatcaccatcatagtacttcgtcacaagctcaagaacaacaaaccaaggccatggaagctgacaactttcgcgaaatcgctcaatttcaacgcttcagacgttatagaatgtgtcaaagaagagaacatagttggtagaggtggtgctgggatagtttacagaggctcaatgcgcgacggttgtctcgtggctatcaaacagtgtcgggtaattggtgggagagatggcggtttctcagccgaaattaagactcttggacagattagacacaggtatatagtgaggcttttggggtatgtatcgaacaaggagacaaatttgttgttgtatgagtttatggaaaatggaagcttgggagaggtgttgcatggatgtaaaagagggtgttttttaagttgggaaatgagatataagattgcagttgaggctgctaagagattgtgttatcttcaccatgattgttgtccgaggattattcatagagatgttaaatctaataacattcttcttgactcaaatatggaagctcatgttgctgattttgggttggccaagtttttgatagacgatggaaaatctgaatttgtttcttctgttgtgggcacttttggttatattgctccaggttagtcaatctatcaaatattattattagtatctctttgtgtgcactcatttactattgagaaatagcatgcatgttcatatattttgatttaatagcaatgagctgtacacgtatttttctttagtcatgcttatatagtattttagatttggattatttcatagataaaataccctaaaatataaaaagtttacaaaaaaatttaaaattttaattggtttgtgggaaaattcctataatattcagaatttagtatcttactaaaattatcaacatttagtaccttactcaaatttgatgaatacgataaaattaaaaaaatttacaaaaactcgtcacatcaatttttttatttttaaacaatttttatttataaaaatactttatcaataaaaacaataattttttttgttactttatagtttaatagttgtcttgaagttaatttttcattattttttgctgagaaaagtatatatttttgtaatttttaaacttcaaaaaaaatattgttataaataaaaactttaaattataaaattataaataaaacataaaaaaaaaataatatttttgaaaat

SEQ ID NO: 382191 - DNA, 2918 bp, Cannabis indica
cagtgatcgccggagttgtcactagggccagagagtcgctggagtttgatgtgggcactggaaaattcatcaaagtagctaccggtgttgaaatttcattggagttggtcccagcgtaggaaaagttgtcagaattggcattgtcaccggaaaaatcactaaaaaaatcaacaagaaactggtttcttcatcaagaaattgatttcttgatgaagaaaacagttttttggcgaagaaaccaacaaatttcttgatgattttgccggtgatttttccaacgacaatgccaattctgacaacttttccagagtttgctgtcggtcccagaaaagtcaccgaagtagatgctggtgttagaaaaatcaccaggtatttttttggttatttttccagcgacaatagaaattcgaacaacttttcgggcaccgatccaacaatttttccagcaccaatgataaataaaactgcttaaacaaataaaaacattaaatatgggcttgaaaaacctaattacatatatatggcatatcaaataccataaaaatacctaaaaataaaaaaataccatataaattggtcaaacttaaaattgtcatatttaagtaaacaacttttaaaattccatagtgagtgtaatttcctcataaaataaaggctgattagaatttttttcccttgatctttgacatgtaccaaattatacccctaaacttttcaggtcgttaaaaattccttacaaactatttagattgttaaatttaaaaacttgtatgtatcaaacttcttgctcttttatttcctatagtccatgctctttttatattttctcaaattgaatgagattatcttagtaatttgtatttttttttctatagtccttgctctttttatatttttctctaactgaataagattagattttagtaatttgtattttttttcctgtagctcttgatctttttatatttttctcaatctgataagattatatcttaataatttatatgtcttcaagtatgtgtttggttttatttgtaccaattatatttacatgttaaatagttatatatttttgttgtctttctcctctattttttcatatatttctcaagctttgtacttattttttttaatgagttaatatattttaatttaaatgaggtttgtatgacgttatgtcgagcatctgcttgtattgtgctctgtggcaattgcaatgtcctatatggtttttaactatttcttgcaatttcatatcagtttcttgcaagttcttattagttaatagcagtttctagcaattatttccaattttattcaaagttttcaaatattttacatcatctttacctggtatctgtgaaccttcaacaacttttgattattttgggcttcgattcttcatttctctgaactatggaccctttcaaagataaaatgaaatcaaaaaatcaacctcacggaggaggagcagactgtgtttgagtttgatttcagtgaacctttttcttctagttcagtcggtcacaatgtgctttatgcccgaatcatgacaacaaagaaagtttggttatctactttaccaaggcagatggcagagcattgggatggacgattccctgtaaagatttttgaggataatgatatgtttatgctaacatttgtttgcaaaggggataagcaaagagttttggatagagagtcgtttcactttcaaaaccaccatatcatcttattttcaccaaatattggtgagaatgtcttgtcttcaaagcttatctacacacccttttgggttcaagtctataggctactctttatgagcaaaacaaaggggttggttgtagcacttaaaaacttaattggttaattcattaaagtatttgaagtctctctttttgaaggttaatgccctttcctacgcattcgagtcaagattaatgtaacaaaaccattattgaggggacgtatgatcgcttttttccaagttcaagacaaattctgggttgaattttgttatgaaaggttgcttgaatattgtatggaatgtgggagcattgttcatccttataataagtgcataacctaaacatgaatataggcctaacattaaaggttctccactgcctacatctagctatgctaggtatagaaccgattttgggaaggggaacgcttggcctttgcttacttgattggctaggacttcacttactgctgctgttccttctcttaatagacggtcacaaccacaaccaactctattgttccatggagagtcatctcagcaagtgaatgatgagtcacagactatgcataattcttttgttttaccaactgctcctaccactgtaggagtttcagtcacgacccctattaagtttgcaccagcaaccttttcaccacacctttcaccaacaaatttggtaacaaattcacaggccacacctattgtccaaccacaaactggtgctcacagcactcctactatctcaaaacctggttcatatgatgacttgtctgacatttatatcccaccaacaggtccttccaattgtccaaaaatagttaaaacttatcaaccccaccctctcactatcatatgcctaaacaacaataatctgaatgctcctttttcaaataacttagcctttccatcagtaattgtatcaaccaaagctgcaatttttgggaaagaaaatttctctccaaactgaagtttcaagagacaacatgacagaggttttatgcgtgatactctcaagaggtaaaggggtcttcaacagccaatgtttgctccttctttgttagttggggatgaacaaaacttgcaagtttccaatgttgatatggattttactggttcacttgacaatgcagctgtaacaccctaactagcataggcgtattacgtgatt

SEQ ID NO: 382192 - DNA, 6980 bp, Cannabis indica
aaaactaaaaaaaaaaaaaaaaatatttgccggataatctatgcaatcttaattagtttgagaaggttgaatgtaaaactgtgtaggtacaagactatatagttaaagagagtttaaatagattaattggtaccacttatcactataaaaaattttactttacttagtcacaacaaaatttgtgactaattataaatcatcatgttgtgattaaagggtccgtaactaaaggtactagtcacaaaaattacaatttgttgtgattaaatatattttgtgtcacaatacttgttgtaactaaaagtaaattagtaacaatctgtatttaaaaactatattttagtcacaattaattttttattgtactaagagtcatatatatttagttacaaaaaaatatttgttgtaattaaaaatttatcaataaaagtaattgttttttgtagagtatatcaacaagtctatcttgttttcttgtagcctttcataaaaattctacaattaagcgtgtttgacctaaaataattaaaggatggatggcttataatgtagcacaagttaatatcaattcctacatattaaatgttagtatatatatttaaagctgactctttattagacaaaacaatagatccatttattatttattgtattatataatattatatcaaattgttttattatatatttatataaaattatgtcaaattttgatatatatgatttaagtagttttttaatgttataagttgttagctgtagcgtttttttggtgcattgtttgatgatatagttttattatttaaatttttgtagacagttttattctatgtagttagcttgttttaaccctttatgatttagaaaagcataccctttagataataaattattctacattatagagtaggagtgtacatcgatttatttggtcggtttacgttacattttatttaacctaatagatcatattataaaaatttaagtacaacccactcaattaagagaaaaaaaagtttcaaacccacctaatgaattggtcggtttagtcaagttaatccgtccaacccgagcgctaatgttttttcttcttttttattttttttattacattcaattatatattttagttattatgataatgagataaatataaagattgaatttaaaattcaaatcatctgccataaaaaaaatatagtagtttgaattttttattttttataaatatgtatataaattatataatatatagattatatataatagaaacatatatataacttttttaattgggttggtcgggttagatcgggttaattgggcgggttgatattattttcaacccacccaatataagattggacgtgttatatttttgtcggatttttcagtttgtatttttcgtcgaattatctcagtttagtatgggcgagttgttcgtattaggcagtttacaaaattgatgtagaaccctattatacagtattgtaatgagctattaaaatgcttaacatctttatcacattacattttataattagataataattttttataatttatattaaattaaaataaactaaatatatataatattaaattacactattaataatattgggacacgattttgtctcatgatatactttcacataatgtattccgtggtacgttagatgggtctcagggtatgttactattttttaaccctaattacttttagatcaaccccaaccctcatataaagtaatttcattatctaacagttgccgtacatcacagaatgtaatccgtgtccctaaaaatattatatctcctaaagaccagatagtgcactttaacacttctcaatattatattgttatagtaaccagtgtgaccacgggaccattttgtgacgggccaatatccgctctctgtatataaatgctcattaaaaaaccattagcatcaaaagttgttcagcaactacagtcttttaaaaaaacactatatgtaaaacgttcttcagtaataatattaaagaaatatatacttcaaatccatacattatttttgtcataatataatgttttctaaatagtaaaacacttgccacactactggatagataaggtatttatatttggaggaaaacataatcttggttttaccaaattaagaccaacataatataattgaatttcctataaatctgtcaatacagtactactacatattgaaatctgcagaaaagtagaataagtaataattaaatttaacgctatttgagaaaaaaaaaactcaatattactatatagtagatcacaaatctagctaaatgtatttaaatctatggaaaaaaaaaaagattgtgtttagtaaaagaagaaaaccgtaattagtacttatattttatagaaaacaaaaacaatcaataaaaaattgagaggagagatcatataatattggttatacccatagagagtaaaatataatataaatatacatatatatatattattaggtcaaataaattaactaataatacagttacaagaataatattgaattaagatgaaagagcagaagaagtatcatcagatcagagacattaccagattattatatatatatatggttatattattcttagaaagatatacatgtcatatatataatacacataatattactcaatatatgatcatcataagataataaattaacttcaaacacagaaataaactaaacaaattattaataataaaaataataatgcaccttataataatatatggtcctcctcttgatcatgatcctcatctcctcgtctctaaaactaaaattccctcataataataataataagttgtaatattttcaatcatctaatatttaataaggagcacggccaccgtgagcccaaggaaaagcttgttcgtgattattcaactgtccaccattcgcaagcaaattaggcggcgccaaattataagccacggatgggtcggcgccttgcataccagcgccaccgccttgctgtggggccccaccaatccccggtggagacccaacaccgcctcctcctgcggcttcctcttcttgttcctccagaggcaatctttcataagtagcgttggaaaacgtggcagcaatcaccattactgggccagcagccatgagtgggcccacaacgctacccccaaccacctgcccctgcccgccggccaggtatatagtcagcccggtcgaaccgggaggtgcaggtccgggcagaaaagcccctgtcagagagagaatctcgaaacgaccttgtagagccataacggaggtagcggctgaaggttgacggagcgtgacgttgttgacggttccgcttccgctcagaacacaaacccctctttggcggcggcgagcgaagtgagccacgctctcggctatgtcggcgccgctggctatttccatgacgtggcttcggagggcgtttgggctgtctcttgttacgaatatgggtggttttggcttgtttttggatccgggcggtcggcccctgggccttcggttacccacttcgattgctccttctcttggttcgtcgctgttctctctttcgtcgtcttcgtcgtggtttccgccgcctgcggtgttgctcattgagatacccagatctggtttcttcattggggatgagcttgttgaggtttcaactactccctgtaaacccatttgtccaccccaccaacgattattcgccataattaatttaacaaaaaaataaacacaaatagaaagatgatattgaattaaagagaaagaggaaaaagaaatatatatatatatatgacttttattttttgcttaattaatttaacctagtatgatctatatatatatgtgtacttgatgagacagtatctagtagtagtagtgatcaagtaaagagttacacaaaaaagatgatatatatatatatgtaaaatggttccaaattaagaaattaagaggagaagaatatgaatatctgtatatacatatatatttaattggagaaacagagaagaagaaactaataaggaagaaggggtgtgttgggaaaaaaggaaaggtggtttggggaaatatgtaaatatatgatggtgtggattggttctttctttgctttttgtatatagttttagtattttttttttctctctttctcttttttctcaagagctgtgtgaggttgcagtggtagtggtgttgtgtgttaaaatatgttaatggtgttggtgttgggagttgttgtgtgggtgcagcgtgcgcgtgatatagtggggtgcatgtactcactcactactctcacttctctcttctattctcttttctttctttccagacttactatattaatttttttaatgaaagtgagatataaccttcagctacaacaactacatatatactctctctatatatgtatattattatattatataaaataataatggctacctctctataggatagataaatacctgtactttgtatgaaaacataaatataattatttattaaatataataagtacgagtttcccataatatttgattattaatttattttttaattttatggttcaaactgatgtatcacaatccttgtcatcaccacttcttttccttaaactatccgatgatgattatttctttagctccggccctttttcctttttcattgaatttatctaagtagatattataattatatggaaaaaaactatatgaattattattccattattttaagtttaaaattttaaccttttaataaaaattaaaattttgattgatttcttaataaaatatcaaaaataaaaattataaattttgttttcatagacaaccaatcaattgaaaaaaattatagaattgatatgagaatacctagtatatatatttgaattggagaagatatattcagtaaaaaaaagaattggagaagatataagatatttaaatattacaaaaaaattaatatagaaaagcgcgcagttgtatgagcgcgacaaacatttaatatatatatcaaatatcaatggcttaaaaaaaactggagagaacttattatataaaacattattattattattattattattattattattattattatttattattttctaaaggcttaattagcaatttttcctccgaactttgacatgtactaaatcatgtactaaaattagacaaaaatctttaaatttaacaatctcaatatatagatcaggagaaatttttaacagccaaaaaagtttaggaagcatgatttggtatatgtcaaagttcggggaaaaattatcaattagtctttctaaattatcttgtttaaaagttgttagattaaattatatgagaccctatataactatattgacttgtagaaagatgttaagcaccctgacttttgactattctcctatataaattaacaaataataatttagaggatttaatagaataataaaatgtttgagcattgctaatattgagaactggaatgtacctaacatcacatagatatatatattgcgttattatttattaattgaatattaatttatactaataatattatatcactcttcgtaatgcttgataagtgttcattagcattttctcaaatatttatatataaaagtattatgcattttatataatattgagagaaacaaagcacacatgcaaatctgcttcgtattgcgcttgaattagccatgtcaaaaaataatctacgctgaataatatgctagtatataatataatgaaagagcatacaaatagttataatttttatttttataatataaaagtgtagatagtagatatttagaatattttaccagagatttaataattgactgtaccaaatacaagactatatattcaaatatcttttgtgctcgtcctgatttattttatatcatgtgtttgtaaaatatattgtttgaactttatttatttatcttcagttcttcaaaaatttataaatatttaaataattatgatacatattattatataagaataccaaaaaaaaaaaatatagtacttataattaatggtttataagtttcaaaggaaaaagaaaaattagagagagaagagtttagtacttaccggtactaacacgttgagaatctatgattgacagagattttgcgagaattagagaactgttgatacttaattggagtttgacatttattagaagtacatactgtgtcattcatcaatttacgtatttatagactatccaaagagagaaaaattagatatattctataataagcaaatttaaagtataatttgtgaagtaataattagataagatattttccatgaaaataaaaatagataagatatttaaaccctggtatttataataaggacaaataaataagatattaaacgtggtatttataattataaaatatctacaggagagatgttaaattttttttttgcagaatattatttttaaaataagtttcattaggacttttaaacaaaaacacaaattgaattagatcctgaccccgatttcgatccttgacctgcacccatgcagacctataattaaatcccaatctcgatttgaattttagaccccacaccccagccactagactcaaactccggaccctggcctcaaaccaaacaccaaactcgagcccaacccacttttttctcctcacaaaaaaataaaataaattaagttacaaaaaacatatttatattttgaatatcaattaaaaaaaaacaaaaaaagttatcaaacacatttttatttaaaaaaaaatgtaattttcatttatttatatattaaaagtgcatatttaacggcaattcttggtttaacgattcttggtttaacgatctttttttatttagccttacacgattaactttaacgttaaacgttaacaaataaataaacccaataattaa

SEQ ID NO: 382193 - DNA, 1516 bp, Cannabis indica
aattctctaatatttccaaaaaaatagcttttgagattaataagcatccatagtaatgtatctaaattcaagatacctttcctgaacttgaagcattagcaccattgactcacaagttttatccaatctaataagatattcatatatctccaaataatttcaaacaggacagccatgtaaattaccatgttcttcctatgctccttctcttcattcttgataagattccacaccacccccatcatgttatcactgtgcaactcgtcacactgcacctccatggccccccaaaccagagggctcttgccaaaggacatctaaagaaaatatggagtgggttctccccttccaggtcacacatagggcaacaagaatcagataaaaatacaatttatctctagttggaatggtgccaaaattagatctccaaagggccatacaactcattgggtgaagattgtagaaccaaatggccctccataacgggtgcacaaccttgaatcccccttgttgggcttgccaatatgctcctttcagtgaataacctccatcatttttagctttctaaattagtctatcttgaggcatctctaaaactatgggaatatcacaaaccttgttaacgaactcttccccgaacaagtataaaacaaattgcatgttccaaattcctctattcgtgaggaaatgatttgcaacaaatctcaagttccgagccttcgctcgaacaaactccataacttctctaataaactctgtcaacaaaagctatggaatccatagttggaacgaaacatcaatattctctccattaccaataatgatgtgcaagtaccgtgcttgatgatatctataacgccataattcataaggcgtcacattataaattattttataataataaactcacaatttaaggaaatttgtggatttatttaaaactttaacaatatttcttaaaatatataatttaaatccttttcaaaaatattaatgagttggagatccgcttattacaaatttttattaaaatgtactatattattttattacaaaccattcgtacataatcaaaatactagaaaacatgatcatgtcaactgagcataaaatacgatggggctaatatgtacattcatcgaaaaacttctgactcataaatgattcactttctcttttctcttacttgcaccacaaagctcctctgaatcacaaacactcagtataaagatagcaaataatcaataacggtcatgtattcaagcatatattctgacaaatctttttaatataatataatactaataattcaattatttgtctaataagacaaactattctcgatacttcataaagtatccactaactctcaaattctaatgaggcaactaatgtcactattgttgcctaatgaggcaaccaataagtaaaaaatctaacagtgatttttgaatagagttataactctttcgtactaacggtaattatcgtatcatatgttgaaaattattttacc

SEQ ID NO: 382194 - DNA, 862 bp, Cannabis indica
gaaggaacccaagtgagggattcagctctctcctctgtatcaagcttaattgaattaacccatttatcacttagagatgcatctcttacagacatctctctatcctacatatcatcattaacaaaactaacaaatctaagcatacacgacgctgtccttactagctcagggctgaactcgtatcaaacccccgcatcacttaaacttatggatgtcatggggtgttggctcttgactaaggatgatatcgtttcgttttgtaaaactcatcctcacattgaagtaagacacgaacatgttcatgtaattccgtcagaccaaagttgtttgaatcatcgtccatctccttcccgagcaacacaattgcgtcgggagaatattagacagatgcccatatctccttgttttgtaggtaagatattggcattaaagatgtcatctttttcatttgttagcattttttctttaacatttcaaatctaatcatttcctttcataatgctatgatatgaaacagatcaaaggttaaagtacacaagggaagagctacttgggttgcagcaatttgcatctttatcccctacaccgcctcctcgcgatggtgattagccgaattagcccaatgtcaaactcaaattagccaaattacttataaccattgttgtagtctaattgctaaaccacaagttgttttcttttcattatttttgagatttattcaatccaaaggaaaaatatgaaagagtgtgtcaaaatctgaattgtagtgttactttccttaaaccagtttgttttttatggtaccaatcagagaataaaaatgtgttaaaaaaaaaaaaaccaatgtatagtgagtgactaa

SEQ ID NO: 382195 - DNA, 2300 bp, Cannabis indica
ttctcattacccaataataggaagaatatagtatttatacaaaattgaatcagcccaaaacagacaaaatatgcttaacttaatacgtatttgaaaattataaatgcaaaaaataatccaataccggatatccaattataataaagaaaccaccactacccaagatcaaaggctataaatatgtctttacttatgagattatgagagcaaaagtaattctcacttaaagaataccctctctatatatattatatataaattacccctagttttttaaaagaatccaaaccacaacgctatggataatcatcagctaatatattatcagttgattaatatatctttttcttttttagtatcttatttgaaatgcttataataatgttgttaattcatgactatctaccttttttttttccactgtgcggtgaacatttatagagtccatactccatattagtattacacgagtttccaaatttttatatgctatcaccttgtaaaaccacaaggatcaaccactgaatttaaaattcatttcagggatactcttgatggaatttcaaggtattaaaactgtattaggttgcgttattctacctcaatttagtttcatcgaagcataagcaaaacaatgctcaaattactcttgttacttcaaacaatttgatgaaggaagataataaatgaaaaactccaaattcataatacttgtcaagaacaagaacagtctgacccatcaagcagaatacgattgaagaaaaaaaaaacacatcccattttaataaagcataccaaactaaaaatgtaaggaaaatttatcaagcagaaacagttggaggtggaggagaaggaggaggagtagccattaaatcatcaaacgccgcaacgcttctgagcacaagtttataggcttcataaaaagggaaaatcttgaaatttttgacgatgcgaccatatccattctttccccaaccactaccataactgtttttgaccttccaataaggcattttaaaatctctgtcgtatccgtatcctaccaataagagcatatgccattcccatgactgtgtataatctggttggaaaatgtcctggaaagcaaattattattaattaatcaaattttgtaaactctgaacaatcttagtacaacaaaaatacatacccaattgtccatcattctgtcacaaaagtccgagcctgcagcaataagaatcactagaggatttccagatgctagttcacttgcaatttcatcctcttctaatactccaagctttttatatgatgaaagtggatataaagttcgcgatatctgcattggaaaactcaaattgtaaatttttgagagcattaataatatgtaattaaatggaaacgggtagtacttacaggattgttgtgatttttaactatgaatctgataccctttaatttgacagcatcaaatatttctttgacattggtttcaccagggttatacacaatgaactcaaatccctcctcatctcctctagctacgtttctttgtttgacgctctcaacaacactcatgggtgagagctctatctgattgccatactctttcaaaataagtatttcgagcaaatcagttactgaatatgcccaacagagacctgtaaaaatatatatagaaaatgtgtaatatttttatatgcttaaacaactaagtgtttattacataacaatttagttattttggttgttcaaaataaactacaaccacacaatataagatatgttttgataaatatatactcaataccatttttatttggtgaacattgttcatacttaccatctacttggtctttggcttcggtcataaaatcccacccagcttcatcacatacgtccgcatgaaatggatcaacctcctgcaatgaatttttacaacgacaatcatttattttaatcttttagtttcaaatatatgtataaatatatatatatatatatatatccagtatttatcataagaaaagaaaaacataactttcagattacatcctttaaagataaacacatcattcttgtcaaataaataaatacatcattgaaggaagaaaataagacagaaactcacttcgtatgccatagatcgatgatgtggtttaagaactgtataagaaaaaaaaaacataattaaataactaaactaaattgtaataatatgtatataaaataaaaatcatagtcacaatacaagcataattaaataattcacagctttcaaacacatcggttttaaggattgatgcaaacacaaaact

SEQ ID NO: 382196 - DNA, 1796 bp, Cannabis indica
aaacaagaaagaaagaaggaagatagagtggtgagtgagtgagtgagtatgatgataatttgtgtggcaaaaaagacaactttttttttcttctttcttttgtggtttgattataaaaatgggaatggaagagaaaaagagaggaaaacgtgggaatgaataagaaaagagaagaattggaatgaagtatacggttactcatcaaatcattttttcagtactaaaaactactttagtagtagttgtagtagtgagtgagttgatagtatgaagagaaaaataaaagggtattgccaaaatgagaagtgatttgacttttggtcaaaagagggttggtggggtcaacatactagacaaggtacatctaaaatcggcgctgcagatatataaatatgtataatataggtatatatgtgagtgtgtaatctctatagaatagaatataagattaagaaagaaagaagacattgttgtttattgatttaataataaagagaaagagagattgagtgagtgtgttatgtgtcagtgaggcgtgagaatgtttccttactagaaatttggatgatgttgttattcatgactgggtgggtgggtgcacgccccacctctatttttttctttcttttaatattcatattagtactagattactagtattagaaatactaatatattatctatactagggactcactcaactcaacactctcatgtctcacccatttggactactcatacttgtctttcttaattaattaattggtatgaaaaatgatttctcttaaagagtacttttatattattgttggtgtaacttattgtcacattccacacattttgattaaataaataatacaagaaattattatttactttcacacgtcgtatcagtacagtattgaatacaacattaatactttaattctaaaactaattcatctttccttaaaaaaatcatcttttcaatttgttcaagaaaataatttatgttcatttatctttttcttattcctttattattacatttcacccaattcatatatctttgagtgataatatgttaacctagggtttaagatttaaccgattcaaacttaacatttcaatctaattcgcaaagtaataattttttatcgaaaagaaactcatatttgtaataatctccgccatgccccaattgcgctcctttccctagcaacaatactctataaataatttattccattaaacactctatagtctatagggtcaaatcccatcttgagtttctaattaagtcatgaccttgatctaaaaattttactttgacagtcacacacactaccctagctaactaggtggggtaattttaatattttatgtactaagcaagattaatattgtggaataaataaagtagtggttaattttgtttgtggggtcattaatttaattaattaagaaaaggcccacaaaagagaaaaatcatcaattacattttgtggttaatggcatgagaggtgatgatgagtccttttggtccctcactcactctctttagcttttatacattttttttatagtctctgctgaaaataaaactcgatttaatcaaaaacttgtttaaaatctctatgaagaattgttacaattcaactttatagctggtttttttggggaccattttcttaaaattaaaaaaataaaaaaatggtgtgtgtaatgtgtatattattgggtgagattctcttggatcgaccaaagatggtgttgttatattaggtgtcgtagattctcgacaaggatggagctgg

SEQ ID NO: 382197 - DNA, 1516 bp, Cannabis indica
aaaaaaaaaaaacaaaaacttcagggactaattcgctaaaactaaaatttaaagactaacttgttaaaacttatttattaagggaccaatttacgaaaaaaaaatagaaccaacttgcgagaacctataagagcatctccaatgataactcttttaatgttgcctaaaatcttcacattatctaaaaatataataatttatttcatctctcttacacataatttttgcaacattttctttaaaactacttcaatgttaaggatttttttaaatttgttattacggtctcacacattatttattttgattttgatactaagttttagcatcaatttcactctttagtttggctcctaaaatggttaatttttcttaagtatgtgccacatcaacaattaaaatctccaaaaatttcctctaatgttaccttatttaaatcaatcatgtgtactttttaacttccacaatttgattggttcccatttatataacttttaataataattattatttaagtttccaaaatgataacgtgtacaattccaaaacttattatcaaccaaggttgggcaaacttgggtctaatgattatgtcaagttgtggttacgatccggacataagcttaactcgctaacctgccaaggctagattaccctggcccagaaaaagccactcagcccagaagcgaagagtttatcaagaccaatctggataccttcaagaggtaatccgaaaacatgtaatcgaaagtcactcagatatattccaaatatcaaacaacacagaaccttccacacatggggccccatagtgtcagagtttgtctcctacattagactggcagaatacatgcgctaccaaaaagaaggccacatttttgtctaacaccatattctctgatattctcggtatggatacggctttgcacaatacctgacatcctcaaatggtgtctgcttgtatgcacaatcctcatctcgtgaattgggtctcactcaatcttcccaaagtcaataaacattgtattttaccccatcagaaggcctagttgattcctaaaaaccctagtcgggcctgagtacgtctgcagttctttcctataaatagaacatgatcccttcatgcaaagagtgacaaattaaattttcgagaggaattgagaattagggttcttcaactatattataaatacttgtatgaaatatttcgaaacttttctagcttaatactattaattcgtggactggagttcattcactcaaaccacgtaaaaatcatgatctcttcttctctaattgacttttttttaaaacttatttattttataattagttttcaaaaattaaaatgcaatactaacaaatttatataacataattttaatattattatatatgggtgactattcaatggttacatttttattgtaaccatatggttacatttttctttaacctgtaatagcaggttactaataggtagactttccttttttagatttaattaattataatt

SEQ ID NO: 382198 - DNA, 4413 bp, Cannabis indica
agagagagagagagtactttcgtgttattcttccttgactcttactttgtgatgagttattgttctttgacaaactattagtactcataggcgaaaaggctggttttggtgacctgagaaatctcaaacataaccttgtcttaaaaaccgtggttgtagaaataataaaattattataaggaacccagcaaaaaggaattattacaaggaaaacaaacaaaaaaaaagtagaatccatgcatcctgtctgatcaatccttcttcacaaccaataatgaagtaaaaattcataatactacaggatcctctacatatatgcataataagaacatagaagctatttaacaagtataaatcttgcaatattttagaatctcagtctaattggcactaccacctaaaatctattccatagagataagctgcatttaaaaagtaacaatagaaaaaggctcactcttcatttttgtcagcatcttcattgttgtcagtgctttcaaccacgttaggctgagattctttcagggtgatacatgaattgcaaagtagcgttgttcttttatcggtgtcattgggaattgaccctgaatataaaagatcaaagaagttacactccatgcagatactagtggtagagcaaattaaacaaagtagagataaaagcaacctttgcaattcatacagatgttacactttacaatagaagtgcaaccaatggttcttttgactgtttcttccaaatcaaccaatgaagaattttggcatgctctcatgacatctctaagggtgtttccattgtccaaatatatatactctggtgggcgtttatttgagctagctgcatgcagctcaaaaacagaaggtgtaacaacctacgaaaaacagaagtttagtcgaaatatggccagaaataatacacacatggacttgtacaaaccaaaacaaaatgacctgtgttcttacttcctttcctttgcaaatatcacaatgacatgctattccagaccctctgatcactccaagaagtccagaatcttgaggtccttttacctaagtatgaagaagtaaatgaagaataaatttgaaacaagtattcacaagcatgcaaatcttgaaactgcaatcatgaataaaactggagaaaatagtaccttttggcctctcatgtacctcacagattgtccctcgagaattcctgtatcaagaaggtcttttaatttggaaggaaacttcttcgttgtattgtatgtatcccgctttgctgtggatgttacaaccaagctagtcatattaacatccttctcacttgcatcttctttttctactgcaccttccatatccgactttggcttcaaggctgaccgagtaaaccgccttggtgttgtctcaagcacagccttgtttgccttatgttttctactaattgaaactgacggatgatcatcaaccaacttttttgtggtatcaacttgctttgcttcttctttcacggaattgtcttcacatgagatttgatccaatgaaagcaactgtaaatcagttttctccccatgctcctcaatggatgtatcacctaaagactttgggagatcaatattctctacttgcttttccaggggcatattttcatgtaagattccttccactgcaatcttttgagtatcaatctgctcttgtgtagagttatcactacacaaggctttatcttcacacatatgttcgtctcctgcagattttcgaggatcaaatttatctccttgctcatttgtgaactcatccacgcacataggttcagcacctaaagactttctgggctaggtttttccatttgttcctcaatggaattatcattgtgcaatgattcagcctcagctgctacttcctgaacaatttcctgctttagctttaacgcagatcgagtaaaccgtcttggtggtgttggctttccttttgcctttgcctttgcctttgcctttgccttctcaaccaccacttcctttgctgcttcatgtactagtaattttgggtgatcaaatccttctatttgatcctttaacggcttgacttcatgcacaaattcctcagtggatgtatctttacatattacaacttctaaagacttttttaaagtagttttctctgtgtcctcatccatgggctcctcatccttcataagtaagaccactccatcttccatttcatcacccatctttgtttcaaccaaacgacaacgtttagccttttgctcccctgccactaactcagattcatcaatcttaagctcctcatcactcacattatcaaccacatcactcttagcctcctcttcactcaatggttctgaaatcctcattttaactcctttgttgcttgcttttgaaactctttctgattctaaggatgtagagaccttcaaactattcacactcacatcatccaaacccacattgtgagctttcctcgaccgagttcgacccgaatactcacttgcattatctacaccctcattgtaaactttcctcgaacgagttcgacccgaagacccacctaaattatccaaaccctcattgtgagctttgctcgaccgggttcgccccatagacccagaaagctctgcttgggccttcaaagcaaaggcaaactctcgcttcaaaccggttcgaacttgagataaaaccatgaactcctctgaatctgtacctttcgccatggaaacctaaatacatgtatatgcatttatcatattgaaattcaaacaaagacaatcaataaatacaaaaagccaatgtgttgaatattaagacacgattaaaaaaatattataggggcttgtgagttcactgagttgagattagatagaaggagaaataagacatgtagctcagtttctatgaacaagactttgacaagaggtacaaagagaaaaagcccacacactggtttcttttccaattcctaaaaaactatagataccatcattgaaattctcataataaatttgctatcagctcttatgcatttatgtacttgaggactatacaaaaactatttcttcatacaaaaatgtaaactactagcacaagtttgtcaagaacgactaaactaaagaccatttcatgaagaataaaactaacacgaagcacaattgctttctggattcaacaatttaccattttcatgtaagaagacaagtatgtcatctaacatactatatcaaaacaaacatgaatgaatgtatgatgttttgtttatttcatatttttttatatatatctacacaaaaatgggtagtttattcttctccttctacgctctaaaatcagttacacaaattttcctactcaacactattattattatcttcttttggcaagattccaagtcaacccaatatccatacccataccaatgcttacacataaactcttcaaaaacacaattacataaataaatactcaaatcaaaccgctcagattgaaaaatcaatggaattgaaaacaacaaacacatcaaatcaaaaagagaatttagatttgtaataccttgcggagaaattggataatgaaatccctaacttataacgaggcttacatgcccaagcctgattctggtacgtaaagaaaataaaaaataaaaaaacctttctgaatcgcgtaaacgagttgacaccctacaatggcggattagggcaaagaacatgaaaagattagaaacagggagagaagaagaagatatggaaaagtgttgaagagaaagacgaaaagggtttgggtttcccactttttattcatttcataataataataataaaattgggaaggaaaattcatatttttttagggtttgttattatgatttgatttaattacagaaagtaaaaaaatcattctttttattattattattattattattcaaattaggggcaaaaattaggaaagttttaattttagacattttttatgaaaattttatcctaacaaatttaacacacaaagcttcttttctttttattgttggaaaactttttttatacatataaattatttagggtaaaaagtgttgtaattaatttggatcaaattcctacttaacaattaattattaattttaagtatttaataccaacaaccaacaacactattgttgccaacttctaggtatgaggagaaggatttggacttttcaaggtaagaatgactaattaaaaatatgttgaacttaaattaaataacacaaattaatttagagtagtttgggcccaaaaaatagaaattaacctatctttactccctatattttgaacaaatccacatggcactaacaattatatatttaacaaattaggtgtagaaaattttagcactttttctcacatttttaaataaaattttacacttcaaacaaaaaaag

SEQ ID NO: 382199 - DNA, 901 bp, Cannabis indica
tctctctctctctctctttgaacagttggatctctaacattttttttctatttcttttgttgtagaaaatctataatgagctttgtcaagataacataatatcagaatttgattctgagaatcttccatcaaaaaatttttgcttcagtgaacttcttaaagctctgcaggaaccaaagttcaaggttcttgagtcagaatatcagttatcaaagcagttgtcattggtatgtatcttccattcatttaacaaaaaaccatgacatacaatttttttgttaaggtgcatatgttgcttatacactgctaggaattccgtactatgataaatcgttgagactaggattttttaacttttgttgtattttttggcaatcaaattcatatgtatatcattgtaagctgttaccgaaggttttgaaactttcatatgtatatcagatccatcaaatttatgctcagcttggttagtgtttgcatttgcaaacaaccattcttaatgttactgcttctttatattttagtttaaacagctatttttattcaatcaactttaacgtcgaccttttgtatggtctatcataatttttggccatgattatttgatggattgtaattacttggcttgaatatgacatacttatcattaactagtcctaaggtaattatgccaaagccctcttagcttaaccaactttttattgcaacccataccttttatcgtgtttgcctttattactatttccttttttttggcaattaaagatatcttctatggtacttttttttgttcttgttcacgttgacagactttggtataagattctgccaattgtaatttttgtaaaacccaagattctattaaagggaaagataaaaaaaacaaccacaaaattagttc

SEQ ID NO: 382200 - DNA, 2329 bp, Cannabis indica
attataaatagtcaatacttggcagaaatttcaaatgttccccaatttcaagacaggagcataattggtaatgaaggctgcagtaataacatactcaatagctccaccatgcacaccaactgaatatagttcctctggcactcgtccttctaatgagttatcattcagtagcctggtaaaaaggaaaaacacaagttatgtatattccactaaaccaaatgggctgtatatcttcttcttcttttctggaatattagagtaaattttggaatctaaacgagctgaagcaatttgaacatgatactaataattcacctaattaagcaattttttcaatccaaaacgaaacaaaatctgtcattctcaactagtatttcacaagaaaccggtttctgcacaatgttatagccacgtaagtagaattcgcccccaaaagactagcctataagaggagaatgcccacatagttataaaccaccaaccaacccaatgtgagatcctaacaatacacaaccttagagatgacgtccacaagaaccaattatggcagcccactcagagcttctcctcaagtcactccttccaatacatatccaacataaaggtgttggctctaataccatttgttataatcatttagatagcacacactcccgaaagactagcctatgagaggaagttcttgtttgtcaagtattagaatggtgatgatgactaatgataactaattttcaaattgataaacttaagtttcatactgcaaggaaaacaatgattaatatggaaacgtcacttacacaagttgcagagatgaagaagttaaggtctctgggattgacccagtgaactgattgtttgacaaatccctatgaagcataagattcagggaaaaataaataaatagatatttacataatgacagccaaatcagtaccttgtgaaacattgaacaagaaataaaccttctacatttcaaaaaataaggaatagtccaataaaatcaaattattcagagtttccaatactattattttgttcaccacagaaggtttaaaaatgagtttaataaagatcgttaaacatgtaatatatacaatgtctttcagcgtagagtagaaatctaagaaggaaatgtcaaaacatatgcaagaaacattttgtgtcaaatccacatgctagataaactggtttggtaaaaaactgaaaattatgtaagctgaaaagctacttggagtcctggatacagcaagaatgtattagaaaacttatacttacagccgactaagagatttttgacctaatccatctggtaaagtagccccccaaagaattagagctcaagttcctacattgcagaaatgtaaataattacattaactgatcagaaaaaaaaaaaaactacaaaattcaaagatgcaaatacgcaaaagttgaagaacatgcatacattgagtaatttttgctgtgcgcagacaaaaaggtacagtgagaaaagacaatgatggagcctaaagtagcatataattatatcggggaattttatgccttcatcaataggagcgttatattgtagttattagactttcactggtgtatgaaaagctcagaataatttatggtgctaaaaatagactttaaaacaactttcagatctcaaaagaacttgttttgttttctagcactataaattattcaaaaaatttcaaaaatttgtatatcgtcattaataaaaaaaaaatggagctgtagcatatctgtactccgaaaacatggaaaaaggttgttttgaatactatttcatacagaatgtacaatgtgcattgtagttatggtgggaggcctactataactacaatgtatattatcatataaaacaatttgctacgtgccaaaacacctaaccggtgggagcaagagtcttgcccttaacaaataaatgtttctatatatatatatatatatatatatatatattattataaataatatgtatatatgtttaattagttacttacggggtaagaaacagcatctcgggctgttaaggcaacaatatcagcacatgaaatttgagcatcagggcattcagttgtaagcttttctttaatttcatcaattacttcatatcctttcaccgatcgattctgaatggcattcttctctgtcgtattgtcatcactgtttaatggatcaatcaagattgatgcatcacatccctgcacacacacgtacacatattcatcaacatatgtatattatactctatagatatatatatatacatacatttctacacgtaacgtacgtacccggacgaaacaatcgtggt

SEQ ID NO: 382201 - DNA, 1981 bp, Cannabis indica
aaaaaaaaaaataattaatatagaaaaaagcctttcacaaacaaaaccaagtaaaacaaattattaaataataaacaattcttcacaatccaagttccattccttttgatgagtactttcaatgattgattaattaatagaataatgaacttagttaactaaataattaaaaattacttacatgattattattattatcttgtaagtcaggtacagtctgaggtgaatctccttggatataaagtgagcctttatcagaccaagccttcaaaatctcctgataatcaagctttaacgccaaattcttattattagtactcctactactgtaattactattatacccctgtttagatgatgacgacgtcgtttcgatcaacttcttcttctccaaaatctcagtactacagctcgagctagttacttcctcaacgacctccgagtacgaaacccacttctcctcgctcaaatccctctctctgttcctcatcgccgtccgtacaagcgaatcgttactactattattccctctccgatcgcgaccgtccacgtggaagaacttgtggtgatgatgattatgatgatcttcgtcttcgcttaagtaattgtactcgcgatcgaaacgccgtcgttccgccgcttgggaactagaatcttcctcctcctccgacattgcaggagtcgccgtcgggagaaggccgttgagggagccggcgccgccgtcggagtcgaaaagcaaggcaacgttgtcgtcagcggctgcgtcgttgaccagattctccggatgtaaggggaagaggttgagctggtggtggtggtagtggtgcgacgaggtcatttctgtaatttcactggagggtgagggtgtcaataatactacgtcgttttcgttttggttttctttcgagagttggagacggagagaaaggtatttgggtcttctggtctttgttctggatcgtctagcgggtactgatgatttaagtggccggcgctgaacgacgtcgttctggagatgagaccgggttcttctagttcgggttcggatccgggttcgtggaggttttagaggactgctcttgttgcacatgatcttttttattttttatttttttctgttttgtgaagtgaagagagaaagtatatgagaaaagtgttgacccaattgcacactgttttgtgtttttagtcataaagtctcagaaggattatgacagtgatggatcactttggttgacacgtggagaccatggattggttatagtggtagattgtgttgttatctagatttcgttggattgggtttttttcatatacataattagttttaattttgggcgttctattttttttttttcaaagtacaatataatagtgttatttatttgtttaacgacgccatctgatcagtttgctgttactatttggtagtagaattgtacataaatttttgtaaatcttgtgaataaattgagataattccaccaaaaatataatttgaaaattcaacaaaaaaaaaatatataatccgcctaatttttatattaggcaagttgaatataatactaacccgccaatcaatttaaactaacccgaccaacttaattaagagattttattttatatatttacatatttttattatctatatttatacatcatataatttatatgactatttaaaaaaatataaaatttaaactaatatattctttttttatagttgttgatttgaattttgaattcaatctatatatatttatcttattattacagttaattaaaatataataattaaatataaaaattttaaaaaaatattagtagtcgatttagacgggctaactcaaaactgaccaatttcattagacgttaaataaatatagtacaaactgaccaaactaactgttaaggttataattaacctatatttcgggtcttcaaagttagcattatgtcgtctattggtgtcttttggagc

SEQ ID NO: 382202 - DNA, 1459 bp, Cannabis indica
cttgctttataaattcttcctactacagagttaggagaaaggaaaagccgccaatcttatttactaagtagagctaaattcaaatcatgccgccgctgaaagcccaatatgtagttgtaaatgtactggtgtggaacagaaaactacactctagtaattatgaaaataaaatagatgaaatctgatattaaattacacttgcttaatttttgaccagacatgcatgggaacaccgcgcgtgtgtttgacaagtgaacacttttctaacgctattactcgaccattgatgtacgtatggatcagctcaactgtaaggccccacaaacattaattaattatacacgaccagacattcccaatttcatagaaagatctagtagctagcgttgtattattgttaatttttcaaacaaaggaagacacttattattgttatttaaaaaaacaaggaagactttctttttttgaacagcaacagcaagtcttccttataattaattagtcacacactagtactactgtgaagtttccttactatactttttctgttttcattcacacatctccatatatataaaatcggcctcacccaagtgttttctccttaacaatctttttctttcccccattatatatataatcattatcccattttgaattaataagagagccacaagatgaaggtttatacttaaattaattatttgttaataaaattattatatatctgctatctttaattatgtgtatggtttaaatataattttgaatttattgcagcaaaagattgtgatgaaggtgcaaatgaattgtaagaaatgccagaccaaggcactcaaggctgcggctacccaagaaggtaataataattagtatactaattatgaccattatatatatagagagagtttattctgtatgatgtaaaatataattgaaaagaaatttattattaataataataattaaaaatattgcgcaggtgtaaacttcgtgggattagaaggaggagatgcgaaagacaaagttgtggtgattggggatggcgttgatgcaattgacttggccaagaccttgaagaagaagttgggggaagcccacatcattagtgtagcagctataaataaataataaatcgatagcagataatagtcgatcacagatacatatacatatattctatataaaaagctcctatcccatcattcttagtgtaaagtgtacactaatgagtacttagtacggtatcacgtacgtctttctcttttttggcttgtggatatacgtagagatacatttaggcttcgttttgtacgcagtattgtaatatattgtattggattgtgttggattgtgttgtattgtgttgtgttgtattgtattagtattatttaataaaatacaatgtttggtattgacttgtttattaattgtgtaaagttataatatatttttaata

SEQ ID NO: 382203 - DNA, 3025 bp, Cannabis indica
tttttttttcttctaaaaaaattaagacttacaagtcttatcacacaacatgcatttagagaagtcaataccaagatcctctcctgttggtataccacaatatttgcatacacaatagggacatgaccattctccaaaaggaactccctgcaatcccaaaaaattttaaaaaataaataaaaaaaacccttcacatatttcttcattataatttgaaaaaaaaaatcaaaattaaaaatcttgacctccatttccaaacaagaaggatgaaaagttgaagggcatttctcacagcaaattaagtcacctccatcagcacaaaccatacaagcatcatcatttttgtcaccatcattatttttaggcacaacattattaaccacatccatatctcctctttccaatcttgtataccaaacagaaacttggtattgcaacaatgaatgaccactcctttccaacacaatattttgatatggctttccaagaataccactcttattacaattactactaatcctataggaatgttcttcaaatttcccaactgtaaccattttttcacaacaaccacaatgtatcccagctctagtaactttcccactattgattttcttaagatccatgtccaaataatgcacttcttcattatctttgatttccttcatatcaatcaacattgccaagattgtgtttttctccatcccatcttccaccacataccctttttccaaacccgaataagaagaagaagaagatgcaacagcagctcgacgcttctgactccttttctttgtcaccaaagggccttgaatttgcgaaagagcacaaacactattactagccgacgccttagccttaggtggtcggccaggttttcttttcattggagaataaccagcaattttggccacaagaactatttctctgacaacatcattgttggttgagctgatgagattgcgctgagggcgccttttcacataatcggtatctgattcgccaccatgatcagaatcatctgatgaagaacttgtatcatcaatgtataatacttgcttctgctttctgtcccttaattcataggccataatggttttttttctcttgtagaatagtagccctgtaccaaaaaattagactagtatatgttattgaaatttgttttttctttggtcactataataagtgccaaaaccaattcttagacatgttttttcttgttgtgttttcattttaattcatatttatcagtggggttttggctggagagaaaaaacagctagctttgtaattgtatattgataaatgagaaccgttttggtcacaaaaatggtaatgcttattgtatttttacagttaaaatgttcaattctgaagtaaatgaaaatactaacaattcagaaggtataacatacacatattacatattaactctctgtgatttgattttaaaggtgctacttaaaacagttttttttaaaaaaaaaaactttcatattctatgaatgactcttttgtaaaataatatagggtgaaaaagacatcttaaaattaattggttataggagaagtaatctatttattttatatatggtaatttatttttatacatgagtaatgtgaggctaactctaatacaccctcctaacgtttgggcttagaaatatgggtataacgaataacttttaagagaccacaaggtcaaatgtaacatttgaaagaatcacaaggtcaaatattgaaaaattttgtgggtgtccacattagaaaatttgtggatattgaaataggttaaagacctcaacactaaaaactggcacacattggacgaaagatctcaaatgaaggttaaaggggagatggaagtttttaagtttggctcgtctctttggaccagcaacactcacaatagatcacaaatggatcttttatggcttatctttttggattgacgacactttgggctcacaacggatcacaagtggctctgataccatgttacaagatataagatgtgattaaatgtgcatgaggtcctatctcaaaactaattgataatgagaggagtagttcattcatcttatatatggtaatttattctcacacattagtactgtgagactaactctaaaaaatccattcctaataaaaggtgcactgatacatctcttacagttttgacatctagaaaaaagaattagtctatttttttaaggttgtctacattataattattaaagacatcctgtaaaattttgagaaatttaaaataatttacagtataaaaaatagtgttcaaacagtccattttatacgcgtataaaataaaagaatcacccgagcaacatactatttaaattttgtttttaacatgttaaattttgtctaaatttttcaaaattttataaaatatcataattaattacacggataaaaagttggtgcaccatagaattttatgtataataatatattgaagattagtatggtagtgctagttgactataggacaacataagatcctagttgaattttttttcaagtaaaataacatccaaaagagatatgtttggattttattttttaatgacaccaaactttgtttgtaacgtttattttcattggttatgaaaacttaaaaaggttttcattaaatccaaaaaaaaaaatacatcaaagcgtgctgtaggaaagtaacaatattgaattttaaaaaatttgtataaaataaataaattggtttcaagttctattactactttctcaaatattatatataatttaattttcactcatatatatttatattggtattaatatatacatccataatatataacatgaaaagttgaagataaaatgcacaagaaaaaactttgtttaaatcacgtaaaacaggatcagggccggccctaggcataggcgggctaggcccgtgcctagggcccacactttccgggggcccgaaataaaaaataaaaaaaaatattaggcttttgtttaagtaacatttaagtgtatt

SEQ ID NO: 382204 - DNA, 1963 bp, Cannabis indica
atttgttttggcatttaaaataaggaaaataaatattataaaaggtaggtagtgattaagtgcattacgtatattaaaagattcagttagagcagcatcaattcaataaactacctctgcaagaaaacaggtaacttgggagtgggttaaggaataggatgtagacacgtgtaaaagaatgagtgagagtcggttcatgggtgtgttgtggtgggggcatttaggctgagctgttatttgttgtggaaattcaattaatagagtgagatgagttgagttgagttgaggagagagaagagatgattaggactccatacctgttcccgcgtgaattcaattacgtgcttcctgcttgggtataatacaagcgcgtttagtgcaagtggagatattcactcatacactcagatatcccttgttaattacagtacaggattctttctaatacaagtggagataaagatgtaacataacaaaataataaactaacttcatatgcaatgcatgatctatttgtatttgagcctccaattgtaaaaccataataaatacttttttattttaatgaacctttttattacacgaaaaggactacaaaggggctggcaaatctgcaattacagtagcacatatgcacgtaaaggtaactcccccaaccggataggaacacatggatttctctcttaatattaaagttttattgtttagttttttgggagtatttttttcttatgtgagtagcaatattagtaagcccttaggataaatagaaaaataaaattatagaaggaatttcttcattttcatatgtttgacattttttttctcacctataacagttacttaaaaaaaaagtaattaagtaattataagagaaataaaataaatttatagtagttcattttttatatcacaataataatgaacttgcgtccacttcgaatttttatttgtcacgagatagtaattatagagttgtagttaaatgttcatagctttcaagtaatgaatttagcaataacaaaactttatcttcatcactaatattaacatttaaattttgcaaatctaccaaaattttgttaaaattatctaaatgttcaatcataggggtacctttcttgaagtggtaacagaaaagtttcttcttcaagtagagttgattctctgcattctgtacttgtcctctagctttttctaagtagagttgattctccttcttgacaaattacttctaatcttttctcaaacacagtgagattgtgccacaagcttgagattgacaaaattccaatcttcattagaataatcttttagtatagactccaaggaaatattagatccttctcgaaatatcgatctgatactttacattgccacatgccaaaatcgatactgtcaaatttctccacctcaaactttgtatttgataacatggttctctttatagattctcttgactcgctagaactttttacgccaacttgtgcatctttttcagtttctctgttgtcaaccataagtgcaaacagataatacaatttttgagcttatgacttaaaataatgtttttcaaaattttaataccttattttaaaaaaacaatgttgcagttgaatttggaatggttcggttagttagaaataggtccgactcagttgaaaacgtgtgaaaaaagggctgactcagtccaaaaatcattgtttgactgagttaacttggttgctggcagtaacactcttacagctagtgacggtgcatcaaacctcggattgaggaaattcttgcggcattggatttgtctcgccgagagcttcaatttgatatataatattgctatatttgactctgataccaatttattgtgtgtagaagcaataaatagtgaaaattagcgatatatatcaaagcagtaaaataataaacacatagagatactgtaacaccctaactatcttaggcg

SEQ ID NO: 382205 - DNA, 1993 bp, Cannabis indica
attatttatggttttttctattagcatgggaacacttttatattgttttacatttaattgtaattttgagtttttgagttgtaacacctttctaccctttctttatttgtattatgttattgctgccctaaatgagaattgtaattcttccattgccacacacaaaagtctttagactgatttcaattcaaagtaattgtgcctaccgacaaaaataccaatgaggtcaaggcacaaagaaagaaaagggtaaataacaatcttctatgtagagggcacatccttaactcgctctgaaataagctttatgacttatataacgacaccaaagatgtcaaagaaatttagatcaccttgaaaagaaattcaagaacgaatagaggaaggtcgtaccaagaaatttttaatttttcaatactttgatttaaaattttttgatggtaaacctatcttttacttcaaattcatgagttgcaagtaattattgataaattgaaagtgctcaaaattaaactctctcagacattccaagttgttgtaatagtggcaaaactgccacactcttggaataattataggaagagaatccttgagataaattagaaaatatctattttttatatctattaatcaaaaataccttattttattttattaaaatatacccacttttatgagtgggttgcccaatatacccctactctacttaagtatagcatataatttacattaacttaaatggtgtaatggggacatcatctataaaaatgagtatagcttaaagaatatagaaatagaggtaaaaattaaaacaagtaaaataaagtgggtatattatgtaatttactcagaatccttcataaaaataaggactactctttggaagaaaaatctaaaaacatatccaaatcaaggaggaatcaatatgtatggataagcttgtggaggggtctaatggagagacttccaaagaaaatacaacttccaaagttcctaatatataagaacaagggtaaaaccaaaaagagtaacaattaatgtgggtccaaagtctaattctaaccaattcaaagtgaaaaatatccatgttttgggtgtgataaaattagacactatgctaaggattgtaattgcatagaaaagactttaaaggaggtaatgctatcgaagaggatatcattactactcttagtgaggtgaattccatgcaagagaaagtaaagggatggtggtatgatacatgtgtcaccgtctatgtcacacatgataaatcattgtttaaaacctttaaagagataaagggtacgtagccatgagatctaaatgggtaatgaaatcaaatcaaaggtactatgggaaacattgatgtaattttacctccagtaagaaagacacattgatgaatgtgttttatgtgcccaacatgattagaaacttgattagtggtaacttatttgaaaaacccgatatcaaggccgtttatgagtctggtaagctcatacgtactaagtttgatgtatttttgggcaaggggtactcttgtgggggaatggtaaaattgtgcatcaataatgtaacttttaatgtatgattgaatatgattctctattttagtggcatcttagataattagctcacattaatttttctactataaaagaattaaataatgtggcatgattgattgtgatataaaatattataataaatatgaaatttgtgtaaaagtaaaaaatattaaaatatctttttcaagtgttgttagaaatttaaatttggtaaatttaatgtataataatttatgtaagttaaatgaaattttaactaaagacggtaaaatgtattttattatatacttatctatttattactctcttatatatatttcatcactcttatatatatagtattacatatatattatatatctcaactatatatatatataatattttatatatatatcactttctctatatatatacacacatta

SEQ ID NO: 382206 - DNA, 3611 bp, Cannabis indica
tttttgatatacacataacccaatttaatttaacggagatatttgcggtaaaattcgtttaatatttgtaattgttatacatatgaccataaaaaaatagtaacaaaattactttattttacgattttgtttgtagtcatactttttttggttgttaagtgccaattaaaaacacgacatatttatttagtttatttaatacatgattcaataaaatatttttaagttaacacttaatgattaaaattataagataaaatatttttgctgcaatttttttaaattagagttatatgtgtaagtataacactcgtaaatgttaagaaaatttcgtcacaaatatctcaatttaatatgatataatagaacttaatacgatgttaattacaatggaacctttaaaatttatactaacgaaactccacgaaaataataattttattatttcgatactcatgatgaaactcgaaattttattttaaaaattaatttcaaaaatttattatgaaaattacaccttttttaacaaaataaaataaaataaaataaaaaataataataataaaataaaataaaaaaattacttgtctgtaaaaccctaaatcagagaagaagaagaagaagagaacgaaaatggcggacgaaaccatatcagagcgagaaagacgacaaattgatcagattatggagctcgataacgaagaattactcgtcgaagaggtcgacgaagacgacgaagacgaagaagaagacgaagatcatcgtcgcaatattggtagcagtagtaatagtaacaacaacagtggattcaccttcaatacagatttagcttcattacatacatacctcggcaatgtagaagacacacaccacagagttaaggttggatttttggaaggcggcgatatcttcaaccttccgattttctatctcgaaggtgttgttttgtttcccgaagctacacttcctctaagagtaatcgaacctaattacataattgcaatcgagagagttttaacacgagctgctgataatgatgtatcgtcttccacaatcggtgttgttcgagcttatcgtgatgatgatgatcgaagaagaagaacaagaacaacagcgagcttttcgagtgttggaacaactgctgagattcgacagtatcggagattggaagatggttcgttgaatattgttactcgtggaaagaacagatttcgtttgaaacgtcggtatattgattcggaaggagttccttgtggtgaaattcaaatcattgaagaagatttgccactgaagacgccgattgatgctttgggagatcggctgttgcctttgaataggatgatttagtttcagatgaaagctttgaaagttcattgtcgttggaagaaggagagttcaccgatctgcaattgcttcttgttcggaattaacagagaatgattctgattttggattgggaaagagttcaagaagagattcagagcataatattaatcagttgaggagaattccaagaacattttggccattctgggtttatcgaatgtatgattcttattgtcttgctcaaaaggcttcaggtatttctgatttctgagtttaaattttgttatatgaattatattcaaaactgattgtttgtaaactaacaacaccaaaatcttaacaaagaaacaattttgaactaaggttagatcagtttaaacaatcaaaccagaaaagtaaggttgttggatcagtactcttactctgcttttagtttaattatgtgataatatcatttgagtcataataccttgatttacaagaaatcaacttcaactatagagtaataaattgtttactttgtattagaattttatataggaaagaaagtgaatttacaattttggaggaaaaaatgagtggaatgattttagatcttaaaatccttttgtcttttaatggatcaagttcagtttttttagatgacattttgaagattccagttagtcttttagtgagtttatggtatcaatggaaaattagttttttgtactttgtttaaaattaaccccagaggaatagctctcaaatgatgttttgcttccacaagatctaatattcaagtctctcctaggcaattacataataactttgatagttttctgataaagttatgttaggccccatgagattagttgaagagggtatggtgtctttgtattggggttggattgagtgggaacatatggtatatatagaagggtagggagagagagatagggttatgctgagattagtgaaatgattcatagcatcatggagagtctcaagctctcgaattcctgtggaacttgtgactcttgacattttctgccattcaataatatctcagctcttcttctacaacaaatttcaatacttctgttactgctctatagctattattctataattctgttactgttctattgggtttacttagctaccaggttcgggtcttttcaaattaggcggggagcttagtttcaataatatactttttatgagtttatgggcattttagttttcatctctgaatgatactatctgctctttacgacagatatgtggaaacagatagttggagcaccgagtatggaaggtctggtgaagaagcctgatcttttgtcattctacattgcgagtaaaattcctgtttccgaatctacaagacaagagcttcttgagatcgacggcatatcctataggttgcgtcgggaaattgagctactcgagagtcttaatctccttaaatgtagaaactgcgaggctgtaattgcaaggcgaagtgatatgctggtaatgtcaagcgatggtcctctcggtgcttatgtgaactcgtacggttttgtgcatgaggtcattactctgtacagagcacatgacttaactctcatcgggacaccagagagtgaatacagttggtttcccgggtatgtgattgattcttgaataagctccaacatatgaggagtgacttgaaaaatgatttctaatttattcgatccattttcttcgttcttcttccaggtatgcatggacaatagcagactgtgctgcttgtggaacccaaatgggatggctctttacagccacaaagaagaatttgaagcctcggctgttttggggtattcggagttctcaagtttccatctgattacttcaatctctgttgtgagtgttattttactcaaatatatatatatatatatatatatatatgtatatattgtgaatatgacaatagagttctaaacagtaatcatatagcagacttacttaaaatcgatttttagccatgttatttgaagcagaagccatttggttaagaatatatcattcatatcagcaatggtgtattttttttcttaagcattattagttcaaaatggtgaactattgctcatcatcagcttgtggcaattctgaattgaatggttttggttgaaagggctctcgatgttgaactcgagaccatttttcggtacctgctgatggaaaatgttctctgttaattgtaaagaaaaattgcagtgtaagaaagatgaactatttttttgagatgaaatatcaatttcattgaataa

SEQ ID NO: 382207 - DNA, 1008 bp, Cannabis indica
attctattttttttaattatttgtttgcttagattaataaaattatgtcatatgtacatagataaaattactagcgaagtaaaagtacttagaattatcctgcaatttacgcttaagtttatcattgatgataaatagaaacactgtaattaaaataattgtatttattgtatgttaaatttatcataataatatattttatgctaaatttgacactttgatgtaaattttagtatgcgttaaatttaatataagatttagtacaatattagaaagttaattttcttaaaagtattagaatatagcattacactagcactccattaaagatgttgctgggtggagtggtagtttatgaaagatgtgatgttaaatttgggttatacttatagggaggaatgtgtggcaaaaattatggcatgtgtgaggactgagattttcttttctcattaatggggaatatttactcccacgagtttccaataaaaaataattttaaacttatttgacataaattattgttgttgaccctgttaaatcattaattgagcatcaaacaacataatcaacattaacaataacaattatgttcaataatcactactaaacattatcttatttaaagcattaaatgtaatataaaataaaaattttactttgtaataatcataatgattactaaatttctctttgtgatcatttcattccttcaatctatatatcaaaagaaaagaaaacaaaatgtgcaaaagatttctatagacactactcttttcactctcaacacacatatagccacactcattctataataatcaccaataaagactacattccttttataagtaattataggtcaattgagtctacatgcctattgtgagagaattagagcatgttaaccacttgaggctagctcaagtggccatagggggtgcgtgtgtattggaggtcctgagttcgagtcccgggttatgctgatgtaatatataaacgcttaaatcaaaa

SEQ ID NO: 382208 - DNA, 2280 bp, Cannabis indica
taacagttttttgtagtgataataccatattataattaatattaaggtgtgtattttggataccatctcaaaacaaatttacaatgaaaagagtagtacattcatcttatatattgtacaattttttcacattaacaatatagaactatttctaatagaaattaaggtttataaatcaatcaaacattcatgttaatagcgcatgaattaggtaaggttacttgattttatttcttttaatttttttctctaccaaaaagaaaacatttttaatatactttatgtcttatgtaatattcaaattaatacttatatagtgaaacatactagtgagattttttttcctaactaatttttcttgtgcagatttacaatttgaaagagtatatatttttttgctcatttagaacagtatatataccttgattctacatatatgtacacatacatataaatatatactagaggtacctatgtgcgatgcacattttattttattgttcttttctatttttatttacaccaattatgtataaaatttttgttttaagaataaccacttacaatcaaatataattctacaatcataaataactaaattaagcataagaacacattttaagaaaaaaataaaaatagttggtcatagcaaaaacagtcatacaatcatagagattcaaatatcattccgaaactctgtttttcttgggaaaatatctaaataaattcgaattaatttcgtaattaggtaagtttaattgtaaacagtctttttcaagttaatagtagaatttggaatgttgatgttgtgcgagatttcttctctcctgaagatatgctgccgtaatcgttggaattcctttaaactcctctggtggtgctgattcgtggtattgggttgcagagaaaaatggcttctattcagtccgaagtgcttataatttgcttgaaagtttgaagcactcctaagatttttgaggatctaatgagatatggaagaaactgtggtcccttaaagtgcttcccaaagcaaaacatcttgtttggagtgcggtttcaaactgtcttgtttctaaagaaaatttgtgtattaagaaggtattgattgagaatacttgtcctttgtgtggtgtgtttgctgagacggaaaggcatatcttggtgtcttgcaattttgcttggtcttgttgggagtatgctggattggctgctgttaacagagacgcttcttctcttgggttgtggctggctgatatgttcaggctgttgaatggcgagtcccagggaagagttgtgatgttgtgttgggccatctagtctgctagaaacaacttcatttggaagcagcggtctcgaagtgtgaaggatgtggttacatttgctagttcgagtcttgatcattggttgaaagctcaaggaaagggtaacattcccttgttgtctcctctcaaagatggagatggatcggagctttggataaagtcgagtgtaggtatcaagctcaacgtagatgcagccatctacgacctctcttccaagcatggcttcgggtgtgttgtccgaaacgcaaacggagatttggttgctgcttttgctagggttaaacatggcaaagtgtcccctgatctggctgaaataatgagaataagggagcctttgagctggctaaaaaatcacgcctacaccgaggccattgtcgagacagacagccttgtatgtgctgaagccattcgtaatgcagaggtctttgtttcatcgttcggtttagtggtggaagattgcaagaagatccttgatagtttgattaatgtttcgttattgtttgttaagcgttctgcgaattgtgctgtgcactttgttgcccggcattctatttctttagctgaacgtatgttttctattaatagtgttcctatggagttgatgtctattcttacgagcgattgctcgagttaataaagaacacttctttcaaaaaaaaagtaagtttaattgaggtctaagtgcttaataatttccgaaaagaaagattggcaaagcttatgtattaaattatttatttatattatattattaaaatttatataaggtccttcaataatacacctcattaaaatagatgtactactaatgtaactcctaactgtttcggtatctataaaaattttttagtctaaatttttttatagtcgtgtatacgtagttatttaagacatcatgtaaaattttgaaaaattcggaataattacaatataaaaattaatgtttaaaccgcctatt

SEQ ID NO: 382209 - DNA, 3115 bp, Cannabis indica
ttataaaaaattactaaccatttaccatgaatagttgagaccactattaattttaccttaaactatcacttatatattattatgtttttaatattatcaaccattaaatatcagaattattaaaagtcatattgtaccatagatttttcttaagatttgtcttattaaactaacaaaatgataatgtgattcttttctttattttttttttaaactgaaaatgtacatagataaaataaaattagacgtcgcggtcattattgtggacattatctcacataaaataaatggtaaagtattgaaacatatataagaacatgagctactctacttatcatcaattaattttaagatagaacctcatgattctcaacatggtataagagctatatctatatagatagcgaccatgtttattctgatactgttcaaaattggtgagcaaaaaatagccaccataaaaatatgagctactccacttatcactaattagttttaagatgaaaccccataattctcaacatttactataaataatgttcttgaatatggaggacacatccaacataccataatagttgtgggttaaagcacacttaaccacattatgagcaacaaaattacaatatcttataattttttaaaacaaacaaccaaatagacatatattctcccccgaccctgatgtcacagttgagcttgatccaaatccaaaggaggaggggaccacctagatgccaacgcagaagtaggttagggaagaatggaggctctgtaatctgtagaacagtaataaatagaattaatataatgttttatgctacccaaattattattgtgtaccttgtcgttttgagctcgtcagacggtacagtgtccaccacaattaaagcaaatacgaaaacttgatcaatgttgattccttgtctacttaaaccttaagtgaatttaacccaatcccacaaccgagttccaacattcgagatggggtaaattccccatgggaaagagcgccagagacggtaggccaaattacaatgaagaaacaaatgttccattgtttcattatctccaccacaaattgggcaagttgtctcttcaatgttcatttgctgctttagaatagatagaatggggagtgtgttagagaggatgctctaccaaaggatcttacatggcgttccaaaattttgctaatccaaagcttgttccacatagtaggggaaacaacgcaaggaggtgctctttggaaagcttgaattaaatacgctgaattacaagagaaaggaccatttgtctccttagtccagatccaataatcttgaccccttccagaacgtctaccccctttcagaattgcccccacagtcttctagtcgaaaaggtagaccaacttttgaaaatcccactcaccattctccattaaaagatctgctaccttttgcaagtcaagatcgggcaccccattagattttgggtagaagctattttcatgagccacccaatggtcatcccaaatattagtgtttttgccatcaatcaccattttacaagccccttttcgaagaatatcagtagcttcgacaatatcttttcaaaactaagaatatgagcttttgtattgatactcaagaaatctcatacctctcaaatatttcagtttcagcaccttgattgcaacaaagagattgattgttgtttaaaaggttccaaccccatttagcaagaaaaacttgatttatctgtcgggttactcatgtgtcattaccacagttagatatgtaatttaaattaaaaaataacataatttattttcttttcttattaaaaattagtattaaatggaatatataactatttctcgattaaaataattgttttaactataaaattaattttcacattaatgtctagcaaagttcctttatgatagtgttaactaatattctagattataatgatgccataatcaagaaaaacactttgaatgaaatttcaactcacaaattatgaccaaaaaaatcaactcacaaatgcacaagttcatcgacgtagagctatataagcatggacacattaagggaaactagacaaataaggacaaaacaactcacatggctcctaaaaaatttagagctttatatataaatattatgtaatatcaaagtcctaatcttagaggtgcataggcgatgtccatgtccatttcaactttaatcaaatgggagggaaaaagtacccaaatcaaagcaagcaacccatcataaattagggacaaacaagtcacatggctttaatttcacaaattattaagaccaatattatgtagtatgtatgtgctagttcatgtgctccatgctatatttagtatatgtgcttcactatctttatgtttagggttttgggattattgctcattgatattggagctactcaaacacaatgtatgaaaaatcaaagatgatcaaccaagtattgtgccttcttccagaatttttgataaaccaagccaaatggttagtttaacctttttttttttctaattaattaatataaatagtctactgttttttttaaatttaaaataattaataaattatgacgttacaaattttaggtatccatccacatgactttatgctgaaaagttagctgagatcaacggacaagggtgatcaccaaaaataaactttgaaattaagtgtaactgttgattaaaatccacttataaccagtccttttacaacatatatccacatcagcaaatacaaacagaaacaaacaagttgactcgatcctagggtggctttgcctctagtggatcaagacttagtagttagttacaactgaaattgtaactaacttctaagaccttgatcaaccgactctacaattgtataaatacatagatcaaagcaaataaacctagatctacttcagaacatagaacagagagaaagagagaagtgatataccctagcctcgagctcccacatccaagatccagagagaactggtccagatctgagagtaaaactctcgtggtgaggattatttgagcaaggagaagtacatgcacaagaagaacacaaagttagattcagattacaaagaa

SEQ ID NO: 382210 - DNA, 1031 bp, Cannabis indica
ttgcagccaaacgaggagaagctaaggcaatatttgattggagagtagacgatgcttgtgggaagaaagagtctgtagcagtgtttatctgagcagcaacaggagtagaattattaacaatccctgatctatgttgacccctcaaaccagaagcattcgaaacatttgtatttgttgaagaacctgagaggttatcataattatgcagataagccattgcttttgagtaaattttagtcgagttctgagcttttttcccataaattacattgttcctatcattgcaaatggaccacataatacaaatgagcaattcaaattcaattttggtatagacttgggatagatggaacaaaaaatcagttgtcttagaagcagcaacaaatcaaaaatcaatatgaaaatttgaagtgaaaccaaatggatttagcaagtttgcagctaataaagcatgtccactgattcccaagcattttgacataagctacaggcagcaaatgtgatggttttccgtttgaataatgctacaacaacaggaatggagttttgaatcactctccaaccaaatattttgactttggagggaaggtctaagccccaatatgatctccacaattgttcttgagaaagtgataaagattcattgaactccgaagcaattgaacaagcaaaatggtatcctgacttgactgagatttcaccagcagtgtgatgccaaaaccaatcatcttgagaagcatttagtgaaagtgggattgaaaaaattcgatctacatctattagagagaagtttgcttgaaatttaggtagattctattatctttcactagttatgtaatcaacaactttatttgtagaaggacctgagtaaaaaatagggacaaaacactaatggggcaaaaagaccattttgcccctccaccataaaatcactaaaatcatgctaaaggggtatttttgggacattctaaattcccggccattcccgacattcccaatgtctaaaacccgtccccaaatactaacatact

SEQ ID NO: 382211 - DNA, 3223 bp, Cannabis indica
ctgacccgatccgttttaaaaatttgttatgataatcatcctgttaatctaatttaatattatgcattattttaatttaataattatttagaaaaattattaagaacttgttgaatgagcattgttatgaaatatttgttgtccaacactatttgatgtgaaagatttgttttttttttttttttacaatattgaattacttttattcatgtacaaaacaattaaaaattgaatttgatttcacccaaaaaagctctgaatgccatcaatgtgagaagccactatgtgggctaaactataagcaaagttattagatttttagaaaggaaagaaggcaatagagacagaatattacaagactatcatcatatcaatctttctttcttaaagagatgaatacaatccaactctatgtgggaaagtctacttgatgcagaagatttatattatttaatattgagtaaataaaatacatgagattaaatagtaattgcgtcttagtattttaaaatttttattagaattctaataaatattgttgaatatttgacagagtttatattctatttgaagattaaattctattttcaaaaaataaaataaagattaatcactaaaatcacaccctaaaatagtagggtatataaaaaggctcaagtttgaagatacaatacaaagataaatgtcaaaatctcattgtctgctcatctgagtaggaaaatagaaaacttgatcattcatataatatttgtacaaaattgttacattttcttttactatttcttagtaaacttgctacagaaccaagttggaactaagttggcactacatttaatatcccatgaagatctaagacactgttgactctaatttttaagctttaatcttgttgactaaccagatatgagaggaggagaaggaatataatgatggagatccttttagcaatacttctatcgggaaaatttagagttaagttcctcctacaaatatcttcttgtactccatgtgctcatatttattggtttacagtagaaagaatctgaggacaaagaatcacaaaaattgcttcattgtcaatcataaaaatttaactaattataaagaaaatcaatgaagatggggctattagcctattaccttgtcagtaaaggcacaaaacatctctgattccatagctttatcaagttcctaaaagaaagtaaagatgttattagcatatttttttatcctaatgacaagaagtattccataattgtaatacatattactcaccttttcaggatctgaagagttatcaatatcacatatgagtttctgaatgttctcatctttcaaaacattgcaaatttcacttgatgaaactgcaaaacacgatgcaccaaaattttgttgacagttcttagcaaagcgtgctttagatatatgtacatacatattatgactctgtgaatgagtgaagctagttatgaaaccacacctaaagcctccagttgtaacctctccagcactttggttggctcagtaagtactaatggcctttctacacgcgattgaattagagggccagcagctgatcatgtttatagaatgttataaaacccaatagttcgatacaaaacatattaaatccaacagaacagttgatcatgtttcttactttcctttagattttgctgagaagccactggcatagaacacgggatttctgccattgatatcagctcagtttagttattattatggaagttagatcagaaaccacaaattttgataaggtgtctgattacaggacataataaagatacttcaatacgtgaaaattaaaatccaaaaagaacagttgatcatgattcttactttccttttggttttgctgagaagccgctggcttagaacacggaatttctgccatcgttatcaactcagtttagttatgattatggatatgataataccaaaaagacaattacaagacttttattaataatcttatcagtggtaagtcctggatcagaaagctttctcttaattgatatttgacagacattaatatagaaacgatggaggttaatcagttagtcaacataatacacattattttatagctgctaacaagaacaatattctggttttcccaactaaggggattcaatgatttatcatcaatctacttatagaactatattaatttattttactatttgaaaattccatttagtccaactggtcaattttacaggctaagaaagagttatcaattaggattacagagtgagctgttaattagtattaaaaacaaataatgaaaatttacaatcttttctctctacccagcttggaatgacaaggttattttaagtttatcaatgagagaaattatcaaatcaattaacttgatgattaaattacatgaccaccctatcaaattgtgtaatcataattttctctaatgcagcattccaaatatgaaatcagagtcaaatgcaaaaaccagaatcaaatgtcaaagcatcaaacctttgtgtttcttgaagcagataagtgaacaactgcaacaatgaatattacaaaaacaatgttaacaaaacaaaaattgggaccaaagattaaagacttcaaaggtttctggtttagaggttagcttactatggggtcaaacaagagggacacttgtacttggaaactgcttcattgcaaacttggcattgcttagggccagccattgaattctttctgctttataatccctcaaaaaagttctaattataaaacaaacaaacaaacacacccaaattatcaattgaaataaaaagattatgataatacagttcaataatatcccagaaaattttgataatagataatcttattactctttaggaaaccaactctacctaaaattgatttcattatcattacatttctaaagtttctgaccatgacatgggttgtagaagtgaaacttttataataaggagctaaggatacctgatagcgccgaagggcagagaaccagcaacgtgggttgggcggcagagactgagagtttagggtttaaccggaggaagcactgccctggaccgacgaggaattggaaagcgtgagaagaagaagaagaagaaaattggattttatttttatttatttaaatgcattttccacgtttttaataataataataagaataagaataagtgttaattaaattatcaagtgcttt

SEQ ID NO: 382212 - DNA, 3271 bp, Cannabis indica
tatttaattttagtaaagaaagttttaacattaatcaaaatttaaggaacataatttaatatatgttaaagtttaaaaaacttgatttaacatatattaaagtctgaatagtataatttagtacataaacaatcactaaattaataaaattaaataaaaataagtaaaatttttaaatttaataatcttaataatttaagagaatttttaatgaaaaaaatttaagaatataatttaatatatataaaaattcaaaacaaaattttaattaactaataattttataaataaatatgaaaaaataaaaataaaataataataataaagaaaaaataagagtttttttttcctcaattttttccaaaatgttaggtctagggactaggggtcctctccttctgacaatttgcacattgttgacacgtgagttggcccgataaatatgacacaataggcttatattttattattattattattattaataatgcttgttctttaaaccaaaaaaaaaaaaaaaatacatatgcataaatagttggtgagatgcaaatttaaataaaatcatttattaagtagtaaaaaaatgctcattaatttcaagtaaaatcgatcgcactacaaatttttatttataattttttcttttttaaaagaatagttaattccactacaactattgataatttgatatatatataaaagttcatgcatgcatgattttcttaatatggtttatgtgattatggtatttttatgacttccataaataaattaagatggtatatgtgatgaaaataatgtttaattttttaatgtcaatagttatttttgttataatttttagaaaattaatatacatataaatatattattatatatagtagtgcatcattagcttttatgttgcaagataattttcaatgattaattcaaataaataaatggtcaaatttaaaaattgaaaaaaaaaatgtgcttactctaatttacattaattctctaaataaagtgtcataagaatataaaaaaattagtttcgatacaatagtgatatgtggaataaattaagcgtttacttttacaaaaaaaaggaaaaaaaaacttataaattataagttttttattataataataagtgcgttttattcttaattttaaaattcataacattatcattgtttagtatgctaatttaattttttatatctatttactttgtaagtagttttggtctaattggttgcttacatcaaatgcctcttgaggctgtggtctcaagttatttggtctaaatttttaagataatttggtcttagatatgttgctttgtttttatagtgactcataatttgacttagtatatatttggctaaacaattaacttttattggaagttctattttacataagagaattgctaaaaaatattacatgtgcttagtacttttctcgatgtcatactgttattagtgtaattaagtatcaggtgatcttatataacttaataaaataatttttaagaaatattagcaataattatgtatcataaaaagtattggacaccattagttagctaataataaagctcttcgcataatatagggtgattatcctcacttggtggtgagtatggagcacaagcataatggccgccgattgctatgctcgtagaataaaaagccttaattaacgtgttaatgacttgctttagaattagaatctctactttttattttttcaagaataaaagaaaacaaaacaaaaataaaattaaaagaaaagtatacatcctttattttttaggattcttttctttcttttatatatatttctttaaaagaaatacttaaaggtattagtggtatttggtactctctaatatttatataatttaatgtaataatttttaaagagtatcattagtcaatcgcaaaagacacttttaaaaaatattaaatactactaatacctaatagtaatactctaatttaatgtaatgacttttagaaagtatcgctaaccaatgatcgtaagacgacatgtctaaaaagtgttagacaattactaatctctaataacaatatttgtatctttacattaaggataaataccattttagactctgtgttttgtaaaaattaccaattgaccctctagtttgttaaatgacaaaatgaaccctgtaatttctaaaattgtacaaataggatcttgaactgattttttgtcaatataaaacttaataataatctgatctaaagatattatgataaaactgattatattttttgtatttgttcgtgttaaaaattgtcttaaaattaataatattaaaaaataaaattattaaaaattgagttcaaagtcttatttttactattatagaaaatataagatttattttgtcatttaacaaaatttaataacttttacaaaatacagtgtccaaaaataattggatcaaagattgggcccacccacgtttttgtaaaaaaggcacaattttattaattttcttcaaaaatgactctctctcccataatgccattattccctactcctccatacattgctccctttctaacctacaaaccccaatacataccgacatggcttatgcttctcttcctttatttcctatatattctcttaattcatttttataaaattaaattatcattaatcttaaaataacactattaattaattcttctaacataaaattaattatataacatatatctataaaaactatatccttttggtttgcacgcattttcataataacgataacttatatataatacattcctttttgttttagctaaattacgtacataatacattttagtttctttttaatatataaataaagattcattattagtttaattataaatatatattattaatttacatattttttgtattccactttaaattaaattttaattgtaaaggccgtcatgatatcgtgtgtatgcatcatgtttatataattggaagaaaattaacatcaaagtatattagttattaaatatgatattattgtatattgttgtctaagtatattaataataagaataatttggttagactaattattaaaaattataataatatgcatgcttatttaaagaattctttacgtatccttattaccaaaaaaatatatatatatatatatatatatatattctttacgtatgtgacaactattaagaaagaatattaattttatttattatcagttgcatttcatatatat

SEQ ID NO: 382213 - DNA, 2402 bp, Cannabis indica
tttttttaggttgattttgaataaataaaatagagataaatatggagaaacaaatacaattctgtttttagttataattttcagattttttttatatatatatttttaatttataataattcttttctaaaaaataatataataatctatcccgtacgtataaacaatataaataaatatcccaacaaacttcaggggaaaaaaactagaaaaataaaactcatactcctgcagagtgcaggcacaaatataactcataccacctttgactccaacaataattttttattttttcataccacctttgactccaacaataattttttattttttagttcgttggttggagttgtcatcgtctgcattcaaaatggtttttttttaatggacaaaaaggaagaggggggttacagtgtggctccacacctctacgtacaccgtacacgttactaaagagctacaactcggttaagagttaaggaatgatcctcaaaatcctactcgacaggtcaactcgagattagaaactaccccaatgctaatacataacatccaaattctggattagtatattgagcaacttttgtaacttccactaatccatttgtctagcttgctttctttttctcttgcttttcttttttaaataagacattgtacgaaaattctaagtaatcatatgaattcacatctatcaaaattagtgtgaacaataatatgtatgtacatttcaattacaaggactgaaaaatgcagaatcccccatcccacccacctctcatccatgtttcccgagtagactacatccaaacaatcgtagttctaagttatgttctttgcatagagcattatttaaatccaattgaacagcatgattcttctaaatctaatttgattttattaccttagtagtcagcaagagcatctatgacgtcatattcttgagcattagttccctgcaggcacaaccaaccgagttccttgcgttgctcttcatctggttgcaagcttccagggattgcaccaaatatcttccgagatgcttcaaacccggaaacaaaatgatgcacttgggccgataaatcctcaatgttccactgcagattcattgatgttgacatatagttattggaaggagatcctgattgattttttgtcaacgaatggtccagctctgcagcctttagaaatcgctctgtggcagcttcccaggagagctcatgtctctgtgcatcagtcagttgtgcaggctcatcggctagtgccttgcgtgtgaccgtaacaaaatcattgctcttatcaaatgttcggcaatttgggaaccgcttgaagaagtcattagacgaatgattagcacaaacaacaatctttcccatagccaacgcttcagccgttgtcgtgcaaaccacatcagtggtgcttggattcaagaacactttgtatctacaaagcagataaaaaatgattagcatagaaatgtcatttcgaaaaatgaaaattcattaattggtagttttttaattcattcagaaagattagcctttcaaacttaaaaaatccattcaacggcgagagtatataggaagtgcttgaagatctcagaacacaggagacagtgaaaacatataaaagtaaaattacagagacaaaaacatccagaggcaaaaactagtcaacaaaatgaagtaggtaaagaataacttgacaagagaaaataagcattaggtataactgctaccaggccatatttcctcaggttttcacacctctccaaacaactctgacagattttaaaagggcccgactaaaattaacagctattatttctttaatttaaacatttttatatatacactatctggataagttacaagccaaccaaaacaaatagaaaagaaaaaaaaacatgtactcccaataacatgaggaactagattacatcctcgaaattattgacatggctatataattctgcccattttcccactttttcttttaagtgagggtttcaattcaagctctgtcatgtgtatgattggaagataatgtatctacaacaaattcaacttcatgaacaaataaccaaaataagaagaatctgcttccactttattccatgaatcaaaagtcaaaatgagaaaaaagccaaaattagcatttcttctgtgattatgaaatcagtgatcagatgaaccatgatattgaatactttggttgttaaagacaatctataagaaatagtgattggatggagcgattccaaaattaagtatttggagttgatattacgagcaattacaggcatagttggtgcaaataagtcctgaatacttgacaatcattatttttctttaagaagtactaatttattagagaggaaaaataggaaatttaacaaaata

SEQ ID NO: 382214 - DNA, 1525 bp, Cannabis indica
agtattgatttataatgaaagaatcgacaacctaaattcctaattgcacagtgttcaaagtttgaatatgcttgtcaatagttaaaaaaaaaaaatctaaaacggaaaaacagaaactatggtgtacttaaggaaaagattacttacttggtcagaagaacacatgttttccagactacacacagcacgtgctccaaggtccagtaacactggaaatgctcccattaattgaaaaactctctgtagagccagcatctaaataaacaatcgaaccatctacgtgctctgctatctatatttgaaaaaacaaaggagtataaatagcctagcaatttttttttatatgaatttatgtgagacataatctctattggttcccagaagtagagatgttaaccaacgaagcagttgtgctcgaactattatgtggtattcaatcgtaaagacaaaaaataatgcaaagaaaacaaaagagaatcacactaggaccataaacctttaatgggacgataaaatttgaatgagaaatgcttaggaaactcacttttgcaatctcttttttcgcactttactgtgatagtgcacaatatgtgaatgttaactaaatatatattttaaaagtacatataaattattagtaacgtctacatgtcaaacactgaagtagaagagtttaaatgagtgtaagaaactagaaagagtgcacttagcatttctcattaaaaaaaatgcagaggacacaggatgtcacctacttttatggttttcagtttaattttaccctaaattgcatttgaatttgaaaatccgacaatcattgtttgtatagtaactgtgtaaactgtattcaaagacttctaccaataaacaacaatcttatccattcacaaacatcatcatacattgaaaagcatacgatgacgatgatgatgatgacaaaattatcctacacaaaaaacgaaaatttaattcactccaaacattcacatataaatgaactaaaagtatatatataaatacctgacgaatggagtcgacgcaagttttggtgacatcaactaaagccatttttggagctaagaatcttcaattggaaattggaatgccaagataaattctgtaaaaatagatcaagaatctccaaatgtattgtttacaagctctacaaagtgataatttcggaacttcaattcaaaattatcattgaaatgagagagagtgttttggatctctgcaacttctccacaaagaaagagacacaatttcaacaacaaaatgctttagggatgaacagaagattaccgcaagaatgggatgtaaagaaccaaatagaacgaagaaatgaaatgttcagtcgatcgtcaaatcggaaaaaagagttgtttgttggattttcagacaactgagtcccgaatcttttcggggtaagttgaaaaatgcctcttttattaatcatttaatcaaatttacctctaattttatatttatttgaaacatacctctttttatatgtattgtacccaaa

SEQ ID NO: 382215 - DNA, 1737 bp, Cannabis indica
ttatttttcaccttctccgtaaaagcaacgatatttcttttcttgaataactcagatctagcagtgggagaggttccagaaaaatcattccggcaacggcaacccacttgcggtcatcatccacgatagcctactaccagaaactgacggactttcgttaagctatttactacaggaatcatcattatcaccattatttcaccaagacccacactaagctctcgcttccatttattttccgaccaattctcaacattatctcctttccagccgtattcccaacttgtaaatggctaaggatcacatctcagctctcgataaccccttattctctaagccgtaattacataatgaaattaagaggagtaagttcgagggctagttgcttttctcgtcctctactactcaaaatacacatatatatatatatatatataccatatatattaatattaactctaaaaaattaggcatctttgtgctttttcaaaaaaaaaaaatataataacctcaaataatcatgcgtatcacactacaccaaccaccaataaataagtgcgacatatttaatttggggtcttttctcaagcccccatagaagaaagttccaataaatataatatataatatagcaatcacctcagcttccaatccatggaaagtgtttccgaagacccaatcagctttttccaagttagagaactgacttagcttcatggccaggtaaacagggtaactctccggcagcctaagaaagctgggaaggtcacggaactcaagtggaggcccgccggggatgcagagcggcatgttcttgggttccaatggtagtgaaaacaggccatgatgtatgcggcagaaaatggaggagacggtagctgaattggtaaaaaatgcagccccgtatatggaatgttggtgagccacatcaagggcccaaggaagaaacgaatcatatactacacagttcacaggatggtctgtgttttggtatttgaggatgagttgggatagagttgaggagccattggctttaaatgacttgagaaaaacttcttctgatttagcctgagaaaaccctccgtcgtcgaagccgtcagagatcgattcaacacctatgttgggagcgcaaatgaacttgaccgtgtaatgagttgttgcgattgtggccttcacgcctttgaaggctaaacgtttggcgaactgaaggagagggttgatatggccttggctagggtaaggtaccactagaacgtgacctctgtactcattgtttttcattctctactcttctttccttttctattgtcttatctatttgatgaaactacaccctctctattagtctatttatacaaataatgtttgcatcacacaaacattaacatcatctctctcatctgatgtgtcaatacaaggaacttctgaattacaaaaggtcacccaaaagtgtagacgtgacaaaaagttctatatatggcgaaacactgtaaaattctttcaactatctctatttattttctataatttttcatttttctaattttttttatacatcattaattattttttattacatcattaattttctttttattctctataattatttaatctcctttttttttctattttaatttggctaattaggatttttgcccctaaactttgatatgtaccaaatcatgccccctgaacttttaaggtcattagaaataccccctgaactattgaaat

SEQ ID NO: 382216 - DNA, 1899 bp, Cannabis indica
atcttcctagtctttcatgactttatctgtattcgtttattgggcctttcctatgtttttaacactatgggcctttcattgacccaatgatttttctcctaaacactactctcccaatttcctataaaagtatttataagaaactattaagagtatttgtttgtctgaacactagataatgtactcaagtggtaaggatgttgttatgccttacctgacctgattcaaagggtttaaccaatgtaggttgtataatgtctgagtttgattgatgaattcgtttgattcatagagtttgctttgtcttatacatgtattttagaatttcacaagtaccctaatctggtttgatcctttgggttttagttggccataccaatatgtgaactatctcggcttgattgacccaagatacttaatatctcgatttgaccagtaaactgtttctcaggtaggacctttagctatttattacagattccaacatactttttttttttttttttatgtatgcaactttaggcatttttgatgaagaatctgtatatttgttttaattcgctttggatgtgactgatgtgtctttaagaagggtctgatatgtcattttaatctttcatttaagcaattcatatgtcttttaaggtcttttggtatgtcgatttaattttctttgaaggcgactcgttgtgtcttgaagaaggtcttttgttatgttgtcttaatctattatggagtaactcactgtgctttttaagaaggtcttttgatatgtcggcttaacccactatgaatgagacttattgtacatatataaaggacttttgttatgtcagcatagtccattagaaatgcgactcattgtacctttaagaaggcatttcggtatgtcagcttaatttgctgtggaggtgactcatttctttgtacccttaataagttgtctttgagtatgttgtcttacttcgctatggaggcgactcgttttttatgcctctaagaatgtcgtcttactctactatggaggcgactcattgcattatgcctctatgaaggtctttcggtatgtcgtcttactccgttatggaggcaactcattttgtggtagcagtagaactagtgaaattatgtgataataatagcataaatgtacgaatttatattttttagattatatatcatgtgtatagaaattaataacaagcatataatatgaaatgaaagagcaaaggtaaataagaatgtatatataagacttgaaagtatctttgatgtaagaacgatttctgtaaattatgatagcgagagataaaaacaaataaaatagatttttcaaaattcatgaatagctaattttctcaaccatgcggtagccacacaactaatgattatatttatcaatttaaatgaagtaaaatgcaagagtatcataagtaaatataagatccataataaacacgtataataataaaaactcaattttggacaaaacttcaattaaaattattgataaacaatatatatcatacatatttatatgtacgtatgttatgataaaggtaatttgaaattatatatagtgaataaagatctttctttatgatcaagccaattagagattatatatataagggtaagtgattaactttatctcattctctcccttatagtatcttcctaccaacatacatagtgagtgaataaaaataataaaattaaaacaacatgtatgtatatatgtatattcatatatgtaacacttcttaatgggtattacccctaaactggttactaaataaatttaggaaaacttaacaaaataactgaaatttgggttaacttttactaaaaataactgtcacatggaaatttttctaaaaataactgtgttttattaaa

SEQ ID NO: 382217 - DNA, 2040 bp, Cannabis indica
ttaagggcattgcaggaagaaatggaagcagttgtgaaaagaagagtttcctctgcaaacaacaaatgtgaaattgaaggcacaatgcgagcaatagaaatgcccctaaaaatacccaacctttcttgaagcctaagagcagcagtgagaccctcagaacagagtagaaaaggtaaggggaaagagggtcatcttgcctaatgccacgggtagggtgactttcgtctgaaatctagccattaatattgaaacgaatggagacataggatacacattgatgtattaaattgacaaacttgctaagaaagtggaagtgatgcagaaggataatgagaaagtcccactcaacgcgatcaaaagctttttccatatcgagtttaagaccaacccacccaagtttaccctgctttctgtgatttataacatgaacaatttcttgagctataaaaatgttatcaaagatgatacgctcaaagaggaaagcaccctgattaggagaaataatgcttccaagcacaactttaagtctattagcaatggtcttggccacaattttataaagggtagaacataggctaataggcctaaaatctttaagggaagaggcatgtgatttctttagtataagagcaatgagagtattgtttatgggtgagaggtcagtattaccattaagaatatcaagaatagctaaagtaaggtcctgaccaatgacattccaattcttttgataaaaaaacggattgaggccatctagaccaggagctttgtctctcgaaagttggaagagagcctgttgaacctcaatttcagagtagggagcatcaagaaagctaatttgctcagtgctcaacgttttgtcaataacagataaaatatggtgagtagcatccctatttgaaacctgggatctgaagaggttggtaaaagaaccgcaaacctcctggaaaatgtcagagaaagaagaaactcctctcccgtcatcacatttgaggcttctatataattcccctttttccttgaagaggctttgctatggaagtacctagtattcttgtcactagcctgaagccaatgaattttgcacctttgcttccaaaaaacttcttgtttttgtagaaggcaatccaattgagattgaagatgagaggccctcctaatttcctcttcagatataggcagattagaattaacatcattgatggatttttcaagggcatttatactataagagagactattggaggttgaattccacttttgaatagctttgatgcaagactgttacttcgagaggatttgatcaaggtagttagcactaggaaaaggcttagtctgaagccaggaaaccctaacactatcaaaaaaagaggcatcagtgagccaattgatttcaaacatgaatctcttaacccgagacacatgcatactctcatcatctaggacaattttaaggactatgatcagatccgtaaaagccaagatgataaatagcagctttaggatagagacactgccaactattgctaactccccaatccaaacgctcgaataaggaaccatgtttccaagtaaagttatcaccaataggatgcaaaggacaaagagaaaacttatttacaaaattttggaaatgaaccatagcataagaaggaggagaactattacaagatctatgactaatagagaggtaatcattaaaatcaccaaaaataagccaagggagtgagggagcattatcatacagtctttcaagtagtttccaagtatgaaccttatcattaatatagggggacccataaaagcaagaaatatgagtagttatattatcattaaaattcacagtgcagtcaatatgattagagaagaaattcaatatatttacattaacatcaggattctaaaataacaaaagtcctcttcttaagccttttctgggcacttcaaaaacataatcaaaagataaccttaacctaagattatcaccacggccagcaagaagtttagactccatcataaaaaagaaaagtaggcctattc

SEQ ID NO: 382218 - DNA, 1058 bp, Cannabis indica
ctctcaattctttctcgcaataggatcttagacctttgagagagtgaaatttttctttaggttctggacctttgagagttgaagaggtctctttgggatttcataggaggtgtggatatgagcctcttggccgagatgctcttggagacatggccaccatggtgctcaaggcctcttggacgagacggtgctcaaggtttttttgtcgagatgctcatacctcctatgtactccgtctgtattttaagcataactttttcaatcttactctgatttggatgattcaaaatgttttgaaaatctaagaaaaagatccacagagccaatatatgtttatggagacatggccaagatgatgctcaaggcctcttggtcgagatggtgctcaaggtcttctggccaagaatatgctttatgcctttttgctgagattatcatacctaccatgtactctgtccatatttcaagcataacttcttcaatcttactctgatttatatgattcataatgttttggaaagctaagaaaaatatttacagtttttgtgctcattatgcaatccgaataggaggtggcaatgtccaaatatacccacaaatcttgatcatttattatttggtctctccgaaaccttgattttttatgtttgttggcatgatacttgtgttcggagttgtggtatgttttttgttgtatgagggagtatttgttgatttttatagtctaaatcagattagaaagcagacatgagttatataaaaaatattttagataaatctaatctgaaccgtaattctaagatctcaatagaattacataaaataaatctaaacaatgagtaaataaattttacctcttgatgtctatcaaggtaagaatcaagatcccctatccaaatattgtatcccatattatgtctaaccaatataatgatgacacatcatttaattatttttgtaaactttactcactaaaactaacggagcaattccattaattacaaagttttttattttttaatagtttttttttttttggctgtttttggctgaacagt

SEQ ID NO: 382219 - DNA, 3003 bp, Cannabis indica
ttaaaaaaaaataaaagtaaataacatccatatctttctcttattatttcaaaggaaaaaaagcatcatcataccaatttattaaaaccaatattgaaaatacgttaaaatgatctatcaatcatagtgtgaaatgtgaattaattaattgacaagaccccatctagaaactatagtcaaaaccataaaagatagagagaaagagataataaaggttttataatttagtaaaagcagctttttatttactttaatttactatatatattattaatcattaattactatatagtacgtccaaagcattaattttttacactaatatcatagggtaataacaaagttgaaaagactcttaaaaaaagtacatcaagaaaaagaaaaaacaacaaaacttttcgatcaaaatttacattattaaaattttctaattattattattataaaccctagcttgaagccgaatttgcttattgaacctctgaatgaactcctcaactcttttattcaattcttcatctgacaaagttgaataaaactcattatcattatcaacatgaacatgatcatgatgataataatttatttcattatggttcatattttcagtctccgatctcttcaaaacatgactcttctttttcatattattattatcatcgtccaatttcattactactcttttcgctttttctgacttacttcgtttgtaatgatgactagttcttctaccttcttgttgtttcttatcttcaatatcatgacaacaacaatcgatttctcttgaatatcttcttcttcttttcgagtagtgtcattgaaaattatgtcattttttgctagtaccatttgaagattcttcttctcttctttctttcctcgcgttattaggtcatgatgatgatgatgatgagttactcggtcatcatcatcatcatcatgttgtttctctactaaaaacggcgatccttgccttgttgttttgttgtagtagtagtactcatcgtgtggatgttgtgtgttgtcgttcaatgatgaggaggaggagaacgcgccgtaatcaacagctatgatgatgatgagagtgttggaaatgagaaaccaaaactttgaattatgaaagagagtggaaatagagagattgaaagtgtaataaaatattgaagtgtaaataaacactgacaaaatagatgcaaaaaaagacaccatgcctttattacccaacttattgtaattataataattataataataatattctttattattgggtttgtagaatttcatgggattttccatattagatcatatgatagggttttgagataatatgaaagagaagatgaaaaagagagagaagggtatactttgattgatgattattttgctttgtttggtaaggtgtcacaaatgaaatcaataaggtttttataggggtgtttggtggtacacaggtgcctaaataattgaattgatctaattacaattatatccttttgttttctttttatttactctagctagggttatggtgtgattaatagaacaaaatttataatttaattattaataataatgtgtatgattttgaatggagaagaatccaaaagagtcactgcttagattcattagggctggtttgattgatatatagttaaaccgggattaagctgaaattatggcatttatctatgacaactcaacaagcatatatatttatataaattatatattataaagtcaagtcaaataacatatataatatgacatgtcagcataagatgacaatgccatgacaaatggcacatagttgagtgttcaataatcattatatgttatggtagctagctaagagtataaatatatattatagtatatgaattggttcaagtaaattgataatattggaccacctatgtatacatgttctcatcttgtttcatcaagtatatccttatgtaacacctcatactgatcatttggggctcaatatatatgtatttatgtaagtagcagcttctatatatgattattaattatatatatgaccacacataataataatactctcaaatgacttatttgcatgtgtacgtaggtggttatatcacagtttctagttcaattaatgcattatgtttctctcccaaattctagtgcatgcaatgatttggttttggaatttggaggtttgagagaagggatatagcttattagctagtgcaatttaattatatatatttatatataatatataatacctaattaagatgtattcaataaccttatatatatcatcattagatgttaagttaactgacctactctatttaaaatcccctgttatatacataacttatcatttatcaattataatttttcttatcaataatatatttatttttatatataattaaattggtgtaatctgattcccaagagtaaaataaaatctatttttttttaattacctcgggtggtataggtacccgaaacccaagtattatccggacccacccgtgattattataattgggtaacacccgcacccgaccctttttattattgttcaattttttcgggtacaagagaggttagtccggtttcatgggttcgagtagaaatgtgcagccttactaaattcaatctatacataaattttgtgtataatgctaattaaaaagtattaataatgtttaatattctagaaattgtacgttgaatatcgttggtgcaactaaatattatatcaatcttatatattttaatttaataattattaaaaaatattattaacaagacagcacctcatacttaattaataacaatattcatatccttatcatttttatttggttcttacctttagcaaagtaaagaaattaagatgaaaaaaaagagaattttggtagacactacaaaaaattactatttttagtgccaattttttagtcacaacataattttttttgtaactaaatgtgacttttagtcactacaaaa

SEQ ID NO: 382220 - DNA, 1164 bp, Cannabis indica
gtttcatggtataatcttaaaatttaaagctatggatgagagagagacacacccatgagactatgagagtattaaatttaagcttatgtgttgaatcatataaactccattatcattatcattatcatgatattattcaaagagcataatcaattaataaacaaattataccctttttaataattagaatgaaaaacttatcacattcaactaaaaaaactaataagtcgccaataaaatttaaataaaaaaatgaaaaaaaatactaaatttcatatccaaataaaaatgtatttttttttaaaaaaaaaaaaaggattattttttttaagtaaaaaggagtattttcaatatgtggtggtggaaataataaatgaaaatatatacacgtggatggatgtatgtatctaatcacaagatcacatggatgagaattgaatagatatatattacttgtacatatatatttcattatttcttcaactacctttctttatagtatctctatttacttcttccatttttagatttatatgttgtggccctatcttaaccattcattctcattcaatttctctatttataaaaatatgaattaagttgtgctcattcatattgattgagaattttttgtttgagatgtatagtaatatcacattcacaattcacacacttataatttttttttaggaaattaagtaaataaaaacattgacttttagaatattacaatttcttagtcttttatttggataattattctaaattctttgtaaattaaaaggtaaaaaaaaaacgttttaaaattcactaatttttatacatataagagtttaattaccaaactcatcataatatgagtatatacttttttaatgtttttgttaggatttgattctctacccacacaaaaatatagacaataataatattttagtttaactttagagttagtatcgaattacgataaaaataattttatttatttaaaatatttaaaaatgaaaataagaaaaataaaaataaaattaacattagcaacttaattattacagccaaaattattattatcatatattaatttgaaattatatttaattcaacaaagatgttaacttatatattttatctccttttaataacaagtattttcactcaaaaaaa

SEQ ID NO: 382221 - DNA, 757 bp, Cannabis indica
ttttttttttttttgtcttgggtgcatgtggctgtgatagcttgaagtgaggtgttagaggtgttgtaaaaggttcaacctctatcatgttgaacttgttcagtatctttttcaaggtaattattctaaggtaagaccaagtgctttggtcttgatcttataatgtccattcccagaattctcttagcaacacctaggtctttcatctcaaattctgaccccaactacctcttaagtctgtcaatctctaatctgtccttgcttatgatcagaatgtcatctacatataacaataagtatagggagctattatagtagacacatggataaaagatgctccttgtatgtgagtctgaactcgttaaatcttagattccactgtcacggtgcctacttaaggccatacaaagatttatgcagtaggcatacctgattaggatggctacttttgaacacttctagttcaaccatatagattttctccttaagtctttcatgcaagaagatggtcttgacatccatttaatccatttctagattttactttcccactttggccattatcactcatcaatgtctgcctcacaactggtgagaaaacatttaaaaaatctacaccctctctctttggttgaattcctgggcaaccaatctggcctaatatcttattggttcacttgataagcttttcttgtgcaataattgttggaatttattttaccaggatcttagatccactcacaagtatgttgtttaa

SEQ ID NO: 382222 - DNA, 1130 bp, Cannabis indica
tttgttaatgtaaatcagatcatatccttcctttataattcaattatgttataacatagactgaaaatctatcgtacattaggaaatcacaaccatacacacacaaaacatttgataaagccacatgtagtcaaggggtaacgttcttggcaaagtggggattaggttagctagcaggtggtggatcgaaccaaattccaaaaacaaaacaaaggggaatgatgatcacatggggtcagctaaatatttgactcatattgccccgtggcaaccaagctgcagccaaattgttgagattgatagtatgaaagaaggtgcgattactaatgggcccctcaatctttattatctgagatatgtaccctgtagttacatcaacctttttccttttatttttcttttatttattttttatttcagtatttgacgaccgatgttaatgttataatcaaacaacaacaacaatattaaaagtagaattttgcaaaaaagatgaaaaaaaataatatgtatgtagtgcggtgcacatcagcttcccctattagaactaggatagagccccctcgattggaagtgggttccacggcatcactactaattttttctttcttacttcctttgttgacataaagttaacttggaaaaggacaaggactcaatactcatactcttcgccgcgtctatcttccacatgctaggtcaccatatattacttacattttttgagaggaaggcactagaggccatttagggatttaccatatcgagagctagtgttgtaaatacaggtcggattttttaacatgacacaaaattagtacgagcctgaaaagcacaaccacgaccagacataaaaaaatatgtttggagacgacacgacacgacacgtgctataaattggcatgacattgcacgagaagcacaaaaggtacgaccataagcatgaataaattagctcgaaaggcacgacatgtgacaagcccaaaaaaaatatgaaacgaaacattaaaaaccctataatttattattaataataatatatgtatttgtcaattataaataagttaaaataataataaaacttaaatataatattgaatattataattttataattaaaactattaaaa

SEQ ID NO: 382223 - DNA, 2180 bp, Cannabis indica
tagtaaaaataaaatgagataataaaaaataggtatagagtgtatgtaattcttgtatatttaacccattaactagagatcacaaactatataactatttattaattcatatttttataaaacatttagaacattaattaatataaattcaaataaaagtctaacatatatagaattatacgttttattattattatagcttgagtttaatttaatatacaattagttggatttttctccacgaaaattaacttaccaaacaaccagaatatataaaaaaaaaaaaaaaaagaatgtaattttaaaagagaaagattgtccaaatatggagtggctaaatcaaaatattgttcaaaaatagtatagaaaaaataatataaaaataactaaaactaacatatatatgttgtatatgggatcaagaaccaacctgagtaaaaaatatatattaattcgttctttatacaagatataattatcattttggttaaattaatctaaaatataatgtcatattttttaatattaaaatcatatattttctttacaatattacttttcatttcttactttgtgcttaaaaaaaaaaatttcccttggtgttgatccaaatccccccaacccttcaatcttaaacttgtaccattattacaccatgcaaaaataaatggtagtaaattgtatcgaagtgattatcaaaataatttttaccgatacatgtaaattattgacaaacaaaacttttgctaagaaatattcattcaaaaacactaacaaaagagttatttattggcgtgacatgctgaaaatatcgacaaatatatttttccaccttgtcataaaatggataaaatatggtgaaaaaataatctttgctagcaaattcatgctaaaatggtttttctatatattgttacattatttaaagttgccctataggcctttcattaccttgtagtagtttttatagcatttttgtaaataattctctctaataggctttagctataaatggggtttgagttagagatgagaaatgttaaaaagacattagtataatactagtgctttagtacttttattattgatattatatcgttattaatgtaattaagtatcgaatttcatataatttaaaattatccttgtaagacaatacctataaattgtgtgctaagcactgatatctaataaaaatacttgaaataataatagatatataataagtgtgtgattcaaattttagttcaccgactatatagctaataattaattagaaaaaaaaaagataatttagcaaaaaaatgcaatatctaaattctaagttaataaattaaatgtatttaagtttaaattaataaattatagaagtggtattaaattaataatttattatatatacatgaaagtctgtctaacagaaatttaaattaatcaaatattacatcattatttataattcataatatctaagatttttttttttctacatttttgtcttgatgatgatataacttatatatttatatattaagttggtctgtctcataaaaagtatgcatctaccaatttttctgtatatatcattgtttttaacttaaacagtcttgtaaatcatgtattaagatttttatcgttttaaatatttcttttaaaatcataaaaatcttaatacatgatttgtgtttcattatgtacgtatatatatattttctacatgcatgatgacttaataatattaaattttatttataaatattttactataaatttgttgactaattgattaaatttatgtatatctttcttccataaaaactggttttaagttgcaattattaattacacattactaatttgaatacacaacttatagattattcgggtaattataatatttgtatataaacacatatttattactctaattaaattatttgatcacattatatacatattgctttatagagtagtagctgtgctgtgagaaaaagcagctgtggcagaattgtagaaaaaagttgacctgagtgtttagtaaattataatttttaaagtgctgcgagttgttaagattctattataataatgataatattttaatctagttcattataatcacaaatatatataataaaaaaatatgttatattaaaatttttatttttatattattttta

SEQ ID NO: 382224 - DNA, 818 bp, Cannabis indica
agtattgagtatcttaaaatccaatacttggtgataaaaacaagtgtcaaaataatggtgcatgcatttgggatgggaataagagaaatgaattgaaaagatgctgtacgcaattgggggcccatttcagatggttccaaatcctttactgggtgaggaagtaaaagggtccaccaatgaatagcccattccctatagttgggggcccagttgtagtccacgtgccatccaaatctacctttatttattttatttttttattgtaagaggaggattaggctctcaaatcaaatccaacaatgtaagttgtacaaggattagactacatttactgttcactcactacaacaaaaaaaatatataaaaaactttaaataaatattaataaattattctcatcttcttcttggaaaacaagcagacatcccatcctcttgaaaattatctgactaaactctttattttattttatttaacataataattttccacattatttaagtagttgtataatttcttcaatacaataataataataataataactctattatggcattttcttcgactactttattaaaatgggtccatcatcatttttcaagagaaagagtataaagtaagaattttgagtgtcccacaagtcctcgtagcttaaatgatgcaagtatgtaaaaaggctactttgaccttggtgtataaatggtgtgcacattaaaatttcaaggacaactaggacattttagctatctaaataataataataataataataggagttttttaaatatatatttattataattttacggtctaaa

SEQ ID NO: 382225 - DNA, 1434 bp, Cannabis indica
aagataaaagtgaggagctagagtaattttcgaacgcctatgtctttggctatgtttaaatacacgaagacgtacgttggcctcgacgtggaagattaccaaaattatcttaaataattatactaagaaatttaaatagtacctaattgtagtacgttttgctaataactaattgaaaatatgcacaaattttggtagtaaaattattttgataccaaaacttataagcaaaagggacacccaaaatgggttcataaaaaaagagcacacccaccaaaacatatagaataatgtatatatatacaaaagacctaataattattaagtaaatatagattaatgtaaatacaaaagatttaatttaaaataaacaatgttcgtaattgctaaagtaaaagtgaaataagctttattaataagaaatggaggcatacataattagttattgctctctataatattatatagaaaaaatctatagtgtataatcttcttaattataggatgtttaaatagacactctctgacagtttttttcgtttttttttcttcataatcatgtacgttgtagtcactcagaacaatctataaattttcagaatatttagaataatttacaatatcaaaaataaaattcaaaaatttacttaccacacgtataaaaaaacctttacacgtgcaataaaatatatgaatcatatttttgggtattgtaaactatttgaaattttctgaaaattttcaagtgaatcataaataacgttaacgtctaatttgaaaaaataaagtaaaacggataagaggtctaccgaaacatcctttgtggaaggtatactatagatctatcctattataaattagcacactttccgaaaatacacgcacacatatttgggcaaacctcccccaaataaataggaatgcaccatcccggacattctttattaagattattttggctttgccttagcattataaatgaatgagaataatcaataacactagtaatgccctttccatcttgatgacggtgattcgattctgattctgattccgattctaattctgacgagtaaagttgaatattgtcgttgttattgttcatgagagctcctctacctgcaaaactagtacatggaaataacacaagaagaagaacaactacatagctcatcatcattgtcatcacatcaaaaaatgaatatgacttattttttattattataaatagtactcttgatctatatatattgtatgcattgcaatacctagagagaacattgacattgtatttatagcactagataatatgcttaccctagcttgctaggagtgggtatttttttaattaataaataaaaacacgttattgatatttatatatatactaggtaaatgtacgtgtcgagctacgtattgctagttttatttaaa

SEQ ID NO: 382226 - DNA, 4288 bp, Cannabis indica
tgtagtagtagtagtgatcaagtattaggaatttgatgcaaatatgatgatgcacaactgagtttaatcacgagtatgaatgcgagaatgagtttaaagatttcattaaataataacttctcaatgaaactacacacctcactaaaatccttgaatttaattgtgaaaatttcaaggatgtgtttgagttaagatagagcttattgatagtttattgagtacatttgtgagattaaagaataattgttatatatttgatctgtttatgaatattgatcatcatgtgagatttgacaattgtaaaattgatcgaatgtaaattaggattatatcaaatgatattgttatcattgctttgttgaataaattaattaaattactttatttaatgaggaaattttagtaaccttaatttaatgtaatataattgatgttgagatttttactatctccaaaaatttaattggtttatgtttaaagatgaaaatctatagccttagttaaatttgacacaattgatgagaattgtattgtaaccttaatttataattatacatttaatgaggaatgcatatatactttcaatgagaaatgtacaaatatattgaatgaggaatgtataaatacattcaatgggaagtgtataaaatacattcaatgaggaatgtacatatatgttgactcaattttttaagtctctttattttgatgattaaaaaatatttaattattatttattattgatgatttgttaatttttgtaacacaattagagatacaataaatattttcctaaggcaatattaattccaaaggcaaatggtaatattactaaaattctcgaagtgacccgaagtgaattccaagactcaaagaactcaagacaagacttcataaagatttatttacaacaaaatttatataccaacaacccacaacaacctatagcaaagtaaaaaaatcattataactttaaaataaaaaagattttagcaaaattaatatagatatagcataatcttttagtaatttacttctaattttttaaaaaaaaaaaaaaaaaaaatattaattttttatgtagcaaaagacaatataaataataaatattgtaaaaaaaatcatttctctataaattttaaaataaaaatatttacttatatagtggtataatttaaggtcatttgcaacaatttttctataaaatattagacgccactcatattattacataggaatgatttttgtcactcatttctacaaagtttaaatctctttgcagttgacttgatattggttggtaggacaacgataacagaagcaaaggaattctaatagtgtttagagaaattttgtgattggttaggccaaagaattattgaaaacatcgatatttttcagcaagaactccagctcgggtatgaaaagtggtatcatgcgggagttgggactcaataatgccatgggtaacatcaattatttggggcttctattgtttaggtctccccagaaagatgcagacttcaacttcatcttggacaacctggtctctaaactccatggatggaaattaaaaaagttgtccaaagcgggggcgagctactttgattaaatcgatggggcttgctctgccggtgtacacgatgtagacaacaaagctgtcaaaaaaactcgcatctaagattgatagcatggtaagagatttttggtggggatgtgaacaagggaatcatgctatccgtttgaaggcttgggatgacctgtgtcttccaaaatctcagggcggccttggatttcataagtctttggagatgaatcaggcattattggccaaatggggctgggatctccttaatgaggagcaatctctgtgatgtcgggtgttgagggccaagtatcttagaggttgccagttcttggattgtgattttaaaactcaaatttgtgattttggaagaatgttgtgtgatcaaaagatataattaaaaaaggggcttgcaaactgatttcaaacataaaagagacaaagatttgggatgacccgtggattattcatggtagggatttctaccctaaacccaattctcatttctaggagggtttgaggaaagtggcggacctactcttatccaatggagaccgggacatttctaagcttcatagcctttttgaccaggaaattatcaataacatcatcaaaggtggcaagctttgtggccagagaaaagataaatgggtctagacaaaggagtcaattggtttgttttctactaaatctgtctaccttgtccaagcccttgaacgggctcctttttgcaatgtggcaccagtactttggaataagctttggaattctaaagtgctagagcaatacaaagttctttggtggagcatcctttcaaatgtgttgcctatccaagcagatctcgctaaaagaatgcatattgaggagatctcttgccctctctgtggggagggggaggagacgatggaacatcttttttttctattgtaatttttcttttcatctgtggcggtcttccccttggggggtcatgccaattttggaatcaggtgctcatgtttgggaatgggttaacttttgtggaacctacatcataaaggggtagatggtgataagctattcttctacgctccgattgtgattgatatgatttgtcgggcgcgttcataataattttctgagtgacattaagcattgtattgactctatatcattttgttacgtagattatgagtcctgtctattttcttcttcagaggctgttttgacccctgtttggtccctaccgccactcgattgggtcaagatcaactgtgatcttaaagttggaggcgacaccatgtgcactgtggctttagctagggaccacaacgaagctgttttgtgggtggctacaaacaaactcaatttctctaatcctctcattggtgaagctgggagttgtctattagccgtggagatgaccgtctttttgcatcatccttttgttcttgtagagagcgattttaaggcagttatcaatactctgaagggcattttgttccagctgggggattgacaactatgtgcggcattgtaataacctccctactaatttgttatgttgtaatttttcttttatttcttattatgtaattttgttgcctataatgtggttaagtgggcttttactaatgaagtaattggtatggttgagctatcttctataccaaacaatatcttttgtaacaaccacgaagtctgttggttttaatccttcttcaacaaaaaaaaaaagtttttagaagatctcctgggggtgtaaatatattcggcacatgggtgtacttgtaacttacaaaaccgacgcgtcgtatccatttcggcggagtccatcctggcagcacaaaaacggcagttggcacttggcgggcgcacccaggaaaccacagtttccgggcgcacccagtaaaccgaaaaatgtaataagactccactctcttctcttcttttctctttgtacgttggccaactttttcttctactaaattccactcgacagtgaactaaagagagatagggagatggtgacgctgctagtagcgacgagtcttgatccggcttcaatcaacccggctaatgcgcttctcgccatgcccggatggcaacctcttccttctttacaggtattccttgttcaatttcatatcccaagtattcctttttacaaacgcatgtatcgatttcatatctgggtttctcgtttgaatgccataattatttggaacttttggaaccataggatatgaagagtttttcgaatcaaggagtgagaatgcttgtacacgggaacagtataatccgagaggatcacttggagaaacggtgggaggatgccacaggcgaagttgtcgatgaagttatcttctttagtaaacacactgctgtctctaatagacccgccctcactgtgcaccctattggtatttttcaactttaattcctctcatataatttattacgacccagatgattgaatggatgaattaagttctgtgaaagttttgtgtttgggggtaatgggatatggtgatttggtacaggggtccctcatttgcgcgaaggggatgttgctcctcaaggtggcaagcctggatgggctgcgccacccaatcctcgaattggaccatggctcaggctcttgaaaaggattgcagagtctcataacttagttcctgagtttgaggtacttttgttttacttttaccttgatttttttttttt

SEQ ID NO: 382227 - DNA, 2097 bp, Cannabis indica
aaataatataaatatttatttaagttaatattaactaaaaaaacatcataaatataccggaaatagagcctcttttaagggtagtttacgtagaaccccttttggtattggtgaagaatgccaacacgcattgtatactgtgggatgtgttgtagtggagacccccaccttattctttttaacgttatgatttggggttttttgtacatttctatttctcctaatttcttcgggcgatttctttgagaataaatttgccctatttttgattgatcccttctgtttgtggacgtcaaagatggcgccagcgacaccgacgagtcgtctttttgtctcgtcttcttccgctaaaggagatctcattgaagaaccatctcgttgttctttgttgttgtatatcttatgtaattgggtaagaattgtttgggtgttttttatttattttttatattttacatatttggtttttaatgctattttgaaacttaaaatttggtatttcatgtattgggaacttttttatctgtgtaaattacagtaattaagatattgatgaaggtagaatggtaacttctgaagcataaaagatttgtacaaaaatgtgaggtttctttggtactaggctgacctctactctactaccctggtaggatttgatcatactggtcgtggcagagtctataagagaaaggtacagaataatgacttttactttttaccttaattgagctcattttcaatctcagtttatgagatagtgaatttttatgctttgagtttgttatttcatttgggtattaacatccaacaaagaattaattttaaatacaaccactctcacaccaaatatttgaaaacttatgtatgaaagtaatgaccatttaaatttaacaaagaatgttatatactattagatgtagtcccatattgctcatatatggaaataaattgtgatttataatatgaatgggctactgctcccattatcgattagttttgagatgaaagctcatttttcttattccaaattctaacatatacaacttacaattttgatttgtggctactataatagaaattgtgttttttttttcttttcaacatttaagactaggactttgatactagtaaatttggtttgtggtaggtccaaatgctattatttttttgtctgttcatttatctttcagtatgaagtgtctaagatgatggacaatattggtttgaaacaccttgaggcaggcgaggcatatatgaagcatattccagatatttgatgaaaatgttgattcagtgaacaacgaagttgatatattgttggaggcattaattgcgaacgtagtttcatgtttcatcaaaagtgtgcatctcgaacttgaataaggaacaaaagaattacgtgaaaagagatgcttttggccgtaaaaattgaatgttggaggatggaaactgtttggttgaaccgttttgttgaaaaaaattagaattggttggccaattttctaaattgctcatgagatagtgctgacttttctatttgaattctagtttgttttggccactgttcatttctatcagtataggttagaattcttttgtatagtttcttcatttacaaactttggtgagataaggattcattctacttccttttgaatatatatgtgattatgtatttttgaatttaagctggattagttgattgtattggctttttcttttgtttcaatcatatgatcatgttgttaattaattaaggttgtgtttggtaacatttttgtttttaaatttttaatcacaaaaataaaagtaaaatttttgtttttaaaatttttatttagaaaaagaacaatgtgttctgtaacaacttttgtttttcaattttaaaaacagaaaatagaagtctgttttgtaaaaattttcttttcatttttatttgttaaatttatttaagttgggttcgggtttgaagttgggatcgagggttgggtccacggtcggggttaggatctatccgagttccaaggtcttggttgaagtcagaatccaaaatattgattaagaaaaaaaattatttaaaaaatttagaaagtgatt

SEQ ID NO: 382228 - DNA, 10016 bp, Cannabis indica
tatagctcccgttgacataatttctcctattttggatgtttgtaaagtaattgaattgattatggaggccattggtcacaaatgccacctcaccagttggacggtgttgactctcagtttccatacttgactttgaatgaactattaggtgtgtattagcatcgatattgtcaatgatgatcccatgaatgatctcccaaattctccttatcccgccactcctcagatcctgccttaacaacttcatcattattttgtacttctaacggaccacttccttcagagccatcctgatcttcacccaacacggcaatcatctccagttttcacccagtcactaccatatagcggaaccaatctccaagataaattcttaaacagcatcttatctttcacacatagcttttgatcttgattaacgatggctattgtagaagaagcggaacaagggtttatccctcagaagaagaaatcaccctctgatgaagataagaggtgtttatttcatttactcgaattacttttaagtttttttatttgaaattgaatgtatatgtatgaatgtgtgtttttattttttgggtatgaaaaggaagaagaagattgttccaggaagtttgatgaaagctttaatgcggcctggttggggtgattcaagaccatctgacggagatcaggttaagtactaaatagattttattctcagcttaaaccctcttgggtggagaataatatgaaatgaaaatgtgtgattgttgaaattgagcttatgtttttcaggtcatttatcactgcaccatccgaacattggacggagtagtcgttgaatcaacaaatgcaaacaatggaggtcagttgtttttcggctactttcagtagtttaaactatacacatgctacctactagaatcagtggcatgaaaattccacacacattactgtttatagcttttgtattgttggtattatgaatgcatcgtcgcaatatttgtaccaccccttcaattaatgatgttctttttcgccatactttagaagttggcattcttttcccttaaattattatatgaaacagttcactttatcttctgatttaatctttgtgtgcaataattccatttggttgcacaagaactactttagactccaatgaacctttaactgaatgttgtggattcatagctgattttttctttcttttcctattctattcaattattggaatgaatatatttataggcaagggaatgccaataagaaatgtcctggggaaaagcaagatgttattaggattgcttgaagggattccaactatgttgaagggtgaaatagcgatggtaacaccttcttagtttccatacttcttatttttatgtatgctcaatttatagtagttgatacaatagagggggaaaacagacacaaaatggaaccataaatcttgagttttctatgttatctatccttagcatttttttttagattgggtctttccaaactttaacaatctttggagctacaatctctacaaattactagataggttcctatgagcttgaccacgagacctagagagcatacatattcattaaaagtgtgtgtgtgtgtttttaccctctaagaagcattatttctttttctttaaggtattgtatcctagcctatatattggagaatgcattattctctctgaggtgtataagaacaagttgaataaagaataaaaaaagaaaaaggaagaaagaagacaagaaaattccagtgataattagatatttatgttagaagtggtttatttttgtactgatttttttttcctttgttattttttggtttcagtttaagatgaagcctcaattgcactatggagaggatgattgtccaattactgctcccactggatttcctaaggaagatgaacttcattttgagattgagatgatagatttctttaaagccaaggcaagaatgttatgctgcaactcttactttctacacacatgtctatcttctaaaatgtggtgtcgttgagggatcatgtttgcacctaatctttacttcttttctcttttttaatattactgtctttctgtttatttcaggtcattagtgatgacttgggtgtcataaagaaggtactaaaatgatgatattttttgtgctaatatagtgctattacatctaaatattttttaagttgtcaatcgaacaagacacgtattgaagaagtaatgcacatgtctaggatataggtctcttgtacattttttctttgcatagaaaagaatgttcaattgccagctagcacaagcactgaatcagttgtcttgaaatcatattctatattctttttgaaagagtattcaattaaccacaaccacaagcacataactaagttaaaaaaatgtttggcataaacctcatctttatttaaaaactaggaataggcattataaggggacagtaaattcaaatcattctctgtgatacagtcttcatgtttgacaggtcataactgagggaaagggttgggaatcaccaagggaaccttatgaagtgaaagcatggtaggatgctctgtttgcaccccttgctgctgattttcaataattatctattatttcattaaaattgtcaattatttgtatgttactgatcaggatttctgcaaaaacttttgatggaaaagagattatttcacgtactcaaagagaaccgttcttctttacctttggaaagtctgaggtttgtgctacattgttttttcttgctaacactcttgattgttatgaatattgctcttaatgtgtatgcatgttggttccaagttgttcttaagtgtactggataatcttaatttaataagttgaagtgacacattatttatgttgcggtcatgatttgaattcttctgtataggtacctaaaggtcttgaaatgggaattggcacaatggctagagaagagaaggcagtgatatatgtcacaagccaatacttaactcagtctccatttatcccagaagtagaaggttatgaagaagtatactttgatgtggggcttgcccattttgttcaggtaagcatagctgttcctgctgcaaattgtggtttgcttgaatatctatttgtaatccatttttccatcacattttttttcattggagttcgaacttcttaagttgaaaatctattcagttgacaaatgtttaattccatagttgatgtgttatgctggttttaattgcaacatgaatgtgatacatatttgactaaaatgggttataaatatatagtcatgtaatcaagtctttttgaagtcacactttatttagcttagatattttatggtgtctgtaaggtttcctaaatgggttttttaaaagttttattagcctacgaaacgatagataattggtatttcaatcagttatttgtgaatataaagattatcgaaacacctggttgcacattgttggtcattctctaagtttatcattcttaaccgtcaagctactagttaattgctcgttcaatgtttgtattagcaaaccaacctacttgataatgcataattgttgcttaagttttatcattttcttattatgtttttatatctggttgtagtacttaaaaaagtgtgcaagttgttttagtttttctttttcttctgtaacgcaaggaaactgctgatagagcagtcttaagagtaaatagggaaatatgaatatgatatgtgtgtattgaatcaaaatgaagaaacaaactggtacacggtatttgagagacccatattcaaactcaatataagatcactgttaggatcgcacatttaagtatgtgattggttggtggtatatgactaactacttggacactttcctctcttacttaggatagcttttgagagtgagttctacccaagtgggtatcaagtggtttcaaagccatgctctctcaagtgagactaacgttgtggaaagggtgacctgagtaagcccagagtgtgccaaggcagagtaggccaccataaagtaggtgccgtggacgtcgaatcttaaaggggttgtatttttagtatcctatattgaccaagtatggaattgattggtggtatataactactttggcaccctcctcttttagactagcttttggatgtatcgagatccatgccctcttctaacactcttgccccttttaatactcttaaagccttccataacaaacaacctttcgcagcaagaaatccattagactactgtcgaaaccttctagctaatattctaacacgttacacattagctttattacaatgagtttaggtaatatgaaatatggatatgggatcttccaattgcagtgtgtcaacctactgtgtacagggtatattgtatatttctttttacaaatttcctggtcccttgctgagaatatgataagaatgacaaacctcccctaaggttcaggtatggaaggaggaagtttagaaacaaagaaattagcacttcttaaaaaagacagggtagaagtattgaaagaattgaatggcaagtgattccagaagctttcgcaaggcacctagagaggtcgtttgatgaagatgaagttaaggaggtagtattcagctgtgaaggaagtaaggtcccggggccaaatggatttagtttggccttttttcagtctcagtgggaggtaattaaggaagatctaatggaagtcgttaaatcgtttgaaagagagggcactattcaaagtagcatcaatgaaacattcatctgcctaattccaaaaaaacttaacagttgtagagtcaaagattatagaccaatcaaccttataactattgtctataggaaattgcaaatatgctttctatcagaattaggagagtgttggagaatactattcttgaaactcaatcaacctttgttgaaggtcgacaaattctggactcggttctcattgctaatgagacagtagaagatcttaaaagtagaggctagagcagtttggtcttcaaaattgactttgaaaaagcctatgatcgagtagagtggatttcttggatctggttttgtgcaacaagggttttggagatatttggaggaaatggattaaaggatgcatatcatctacttcattctcggtattcattaatggcagaccgagggggaaattcaacggttcttggggccttagacaaggtgatccactaccaccctttttgtttactctggttgtggatgttcttgggaggatggtggataaggtagtaagttcaggaaatttctttgtatttgtggtaggaaaagagaaagttcatgttagccatctctaatttgcaaatgataccttattttgttaatgatgagactagggctgtgcatgggttgggttggccgggttgaagctattttagtgggccaacccaatgagatcggcctgttaaattctaacccattcacattaattttttgcataacccaacccaacccaacccaacccaacccaacatatcatgggttgggttgggttaaaaccgttatttttaccaataaaaatttagagtttaaacatagaaactaataacatttaaaataagacaaaaatataaaaaaaaaattcaaacataaggcaattacatcaaaataattaatacaatcactacccaaagtccaaactattagatagttattacaacttaacaaaaaaaatccatgttttcattatcttctctgatgctttggaccctaattccattctaatataagtcagtaacacattcacaagacaaataatgtaaaagatttatatatgatatctatttagtagtgagagaaggttgagagtattttcctcaagaatctcaactataacatcacaatcagatacccattcgccatcaaacttcaccacaccttccttttggggttcacttgtggaaacctacagatcatcaaagaaaaataaaaacccatgtctcaaaaatcctaatttcgtttaacccaaaactactttgatgatctagtaatacacttctggattattaggattttgatataccattgggatttttcattgagattgacgaggtgctctggtaagaaaaagagcccattggctaaatggatctgaagaaatcaatttttctcaatcaaacataacaacaacaaaaaaatcaaaacaaatgtacaaaactaaaaaaatatgaaagaaggaatttaacagaggagatgcttacctatgccatcgatgtcttcgatctagaatggacaaatccgcatgtgtgtgcgtatatgcgctttcttggctcaagttggaagttgaagagacgagagaggggattgagggaattgatagaagagatgagagatggaatacacttctggtatggctagtgtcgatgatagaaaggaacaaaggcgaagtgagtgtgagacatcgatctagtttggctggggtccaagaattttgaatcgaccttagagagggaaggaggcagatgaagattatggtagggttgttgcttagggttagggttttgagtttgtaagatttccttatatataaaaaatattttttttattaatagaaacacaggggttgggtgggttcgttggaccttaaaaagcccagcccgattccgacccattctatgctggttgataagttttccacccaatgaaatttcggcccataaaaaaacaagctgatcggcccattttcgggttgggttggctgggttggtcggcccagcacaacccatgcacagccctagatgagaccagttaatatgagcaaaagtcaattgctggggatttgcttggatgagaggaaggtgtcaaggctggcatctcagataggatgtgaagttggaagttggccaatgcaatacttaggcatgctcttcgggagttcacctagaaagtggagcttttgggaaccaatactgaacaagtgtggtaaaaggctagatggatggaaatgttcatttttatgtaaaaggggtaggttgactctcattcagtcaattctatcttctctccccatctatttcctatccttatttaaagggccaagttcaataactaaagcactggagaatatgatgagagacttcttttgggaaagtgatagggattttcctatcaagattaatcaattgtagaaaatagagaaagaacaatagtttttttggataaaatggcagaatgcctttcattaaaacccaggatttcgagagcctgattctctcccaaagttacaaactaaaaccaaattcttcacaccctttctctcactattgcttcctatatataatacccctatcccattacaattacacttataccctttttgtttatcttaaggcctaacaataccggccgcccgaaattcaccttgtcctcaaggtgaagaacatgaagcttcaactgccaaccttgctcgtcctcggtcaaagcaccaagccagcaatgcgtattgttcacactatgaggaaaaatgccaagtttcagcaactcgcttcccccgcccgatctcgtgttcccaaaccaattatcacgtcgacccctatcgaagaaccagtctagtaaatgtaatttgtgcaacactttcttatcatgcccctgtatgttgaagatcgtgcttgttggagtaagtgggttgttgtagcttcctcccaaatagaattcatcaagttgtgttctacttttctccctcactaaaaatgctaacaattcttttgggttcattgtgaattcgtttttgacaatagtaaatgtctccctgcctcttgcaagataatcttcatactccaaattaagcttaccccattgctgaaaaagagaatcaacagcctcattgaccctccagttgagaactatgaaacgactgtgtacatatgcaatcattatgcctgattctacagaaaaattcttgaagccaaactggttatacttgccatcaaatccttttaaccccatcactgtagtaatagcactcgtgatagaaattaattgcataatttgtatgatcagtataaccattgtcattaaaggataatgcccactgtcactaattagccaaattgaagatagaaaattattagtaggtggccctattccataagaaatacctggcagtcccaactgatatgtctcatccttgctcttggtgatatttctgccattgtctaagaatccagcaataaccaatagcgggacaccggaattatcaacaaccatccaagaaataaatgccaaaggtctcttaggagttggaattacaaaatcaggtgcacatttcgtcaaaactaaatttgaaggtgagccaattcttgaatattggtcatcaggagactccaacaaaattttcagccattcctttccaataaattgcaaacgtgaatggttaaggttaccttgttcttttggaagagtgattattttccctctatcgaaaatccctgtaattgccgacactattttaactttaccatcacactggagtaggttctctggtgtacacatagatacatttcttttaccatcgtgagagtaaatcatatgtggtggtgttctaccaaatctgtaggcagcaatttcaatggagactcttttatcccttgcccaacttactcttccaaattcgacttgagacgaccaactcacaacaaggaaatatatcaagttagattgcagaaccttgagcgaacatggtagaaccttgtttgtgccataaacaagcagcttgtcctcaaggtgagagaagaagttgctcttaaatagtgcacactttctaaaggtggttcttctctctctgtcgaagacccaactattattcggtgaagttacatcctctatgtacccgaatcgctgacctccgtccgtcctcacggtgcccgccgcccttcgttccgtcatcgtgtgattagaaggagatgaagttataccaggatcccaactcttttctaatatgtgacttaacttggccattgggcctttggtaatgactttagggcccagaacatggactggccccaagcggatgaggaagataatgagcccatatccatcaatagagaccacgacccctccatcgcgaatagtatcgcattcgtacaaatctgttggttccccttgtttgcccgccggcgatcggcggcgctgccaccatgctcgttcatgctcttctctctccggctccggtgcacatcggctatgctccgatgacgtttcttgtcgtgcctcattgtggtgtaaggctgggaaaatactcattactctgctggaatcttttatatttttttctccacccctaatgattatgtccatcataggcctcatttgctgaaagcatgacacacttccaagtcgtgtatacccaggtcgaaatcgttccctccccgtctgatctcccaccatgaatttcggtggtggttctccaccgagtcgcaccttctccccaagacgtctacaagcttgctggggttcgttcttcgcgtgctcacatcgtaattttagcttagcatgttggtgctggaatggatgcattcgtggatcaatctccttcttctccagctccgatgcaccacggttgggctccggagacgactcgtgacacaccaattcgtggtgtttggctgggactgcacttgagaccaaatttagatctgaacttaccattgttttaatcttagcatcatcatctagatgttcgtccttggctgccactaaggtgttgttggtgtttcgtgcctctttggatttctgtctctgctcgatcatcaagtccaaccgtttcacgatgggatcaatcatagcctcgagagctaatttcaacagttccaattgattaggagcttgctgaaactccaaccgactttccatcacagcttaccccaaaaaatcgacgtgctctgataccatttgatagggattttcctatcaagattaatcaattgtagaaaatagagaaagaacaatagttttttttggataaaatggcagaatg

SEQ ID NO: 382229 - DNA, 1284 bp, Cannabis indica
attagaaataattgatctttatagtctatatatataattgcttcaacctataggattagttttacaaagtgcatgacactccaatataaatatatgtaaatatatttgtatacatgtattatctatatcaacaactttcattgtttccagatttagtaagctaaaaaattgtggtagttaggctagctatgttgaataagagacgcttatgtttgacaaaaaagacatacaattattgtgtatcatgtatataatgccttataaggaaaactttaaaacgtatagtaaaattccatatactattcaaaaagggtagaatatataatatatatatatatatgtgacgaagagaaaaaggatgaacaggaaggaaattcacatggccccatttcatgtctactcagtaggcccatgatttgatctcagcttcctccactgatccatcgttcccccacttcatcctattcctttcacctctgtccatatttttcttttctagttttattactatattaatttaaaattataataataatcatatcatattccatagagaagagaagaaaagaaaaaaaaaatcaattgaggcaatgtcatcaagtgatagaggaaaagggtttgcagaaggaggatcgtcaaggttcgagatgatggatcaacatcatcatcatcatcatcatgaacagccggctcccgcagcgactactccgagccggtatgaatctcagaagaggcgtgactggaacacattcgggcagtacctgaaaaatcaaaggcctccggtggccctgtctcagtgcaattgtaaccatgtgttggattttcttaggtacttagatcagttcgggaagaccaaggtccaccaccaaggctgcatgttctatggccaacccgagcccccagccccttgcacttgcccgctcaggcaagcgtgggggagtctggatgctctcataggccgcctcagagcagcctatgaagagaatggagggttcccagagacaaacccttttgcgagcggtgcaataagagtttatctgagggaggtgagggagtgccaagctaaggctagagggattccttataagaagaagaagaataagaaagcagatcaggataaagggatgagtgatgaagcaactaattcttctactggaatgcagttttagtagatcttcttcactcttcttaatccttttgtccttttctgatatggtaaatctaaatatataattacttctcttttattgattattattactatatatatatataccgatctga

SEQ ID NO: 382230 - DNA, 3131 bp, Cannabis indica
ctttccgtctcatttgtcgatactgtagtaagcagagataagaaagactagagataaggaatttatatttaatagaatattcatacaaaccaaagtatctaaataataaaaatattagaggaaacaatatttggaaaattaaagctttctcaaactagaacagaaaataatcatttatgaaaagttcacagaagttaaacatgttatactgcaactattaaggattcaaatttctcaaagacataaccctaataaaataacataggtttgtaatgtgctattataatttggtgaaaaaaggctacccaaatttgagaagaaacttttggtttaggaaagcaatatatattagcaatataactcttagagataattgcctaacggctacatatcaatttgaagattgatgcatagcacacccagcaattatagcgcaatttttttccatgaataagcaaccttgaatggcagcaaattcattgttaacacaactttgtgagtaccatacttctcttttggtctcgtcggccaacatcaattatttgcaagctggtgacacatgccattcctaggttgcaagaccaagaagaaacataacagcaagcgccaaaggcctttatataacagaaaaaactactaaaatccttatatgattgtgtatcaatagtgtaaaacacatttacttttcttcaatagctttatccaaactaacccaaaacggatagctcgaatggtgaaacatgcggtttggtccattgagcacttgctatagttttttggttccaaattatggtgagacagggtagggatagagaattgggaacaaaagattattttttttttcagagcctagtctcaaaaaagaaacagagtctcattcaaactactgaactacggccaatgagtttgacttgagataacacccatcaaatacaccaacaagaataccaaacctaccactagctctcctatcctcaagttgactcagaaaagtatcttcatagatgtgatccaacataagttttctcagcatataatcaaccttatttcattgtggaatggctttcccttctaattttgatagggactgtaaagactacaagtaaacaaatatattccaacgttgtaaggtaagcccttctgcagtccttgtcataaaatgccattcccatctgaggagtcggattaaaactccaaagatcaaatgaagaaatatgttatctgtctaataagacagtgagtacattctgagtccaagttaagacctgaggacctatggacctatctgagtccaaggagtacattctgagtactcctttgccaacctggtattttcccactcgatagtggatttacagaaagaaaaaagccccttaaatgataatcaaacatcactaatgaacccaatcataattgcaaccatgacaactctgaaagtgttagagagatgtgtgggaaaatgcctcccaattacaaaactatatccaagcaccacaacaagtaatgtattcccaaatcaccataccaaaaaccctacatgtactaaacgcatacaaattaaacaaggctgatcaatccacggtttcggaacagtagaaatgaaatttcagaaatcagtacctgatgaaagtcgccagagccagaaccagctgagctaccggaggtgttgctgacgcgaacaggaacattatcgatgattcgacggagcttaatctctatatcttcttcctcttccttgaacactggaggagtatactcgacaatggccgatgatgtagacgatgagggtggcttcggaggaagcataagagatctcttctccggcgccgccatgagctgcaagtccctatctttaggtccacccgtcgtcgacatatggatctttcaaaaccctaaaaattttgaattggatttgagttcagaatattatattttgattctttgaatcgaattgtggtcaatcagtgttcgaaggagatgaatttagcggcacacataaattggaacaagccttttgcttcgacggacccttatttgctgtcttttctataaaaattcaaacgtgtaagagtaaaaaaagtccataaacaagtaaaaaaaaataattaggaactaaatactctcgattataaataaatacttaagtttaatttttggttgtagaattatgtttttaaaattttataaagatttctcagttatatgtcaaaatataatctacgtgtcattttttttaactggtatgttaaaattaaattttttgaacaaaaaataaaaattcatgatatgtaccaatcaaagattatcacgtggcaatttacttaacacacgaagacacactacatttcctggatcatttcctagatgtcaagtgaagatattctaactcattaaagataacatttttagcaatcacaatctttggtctatcctttttggaaatgtagattttatagctcttggttcctaaggaataacttaagaaagttcccttcacggatctaggttctaacttgtcaatagattagtgtatatatgatgtacacctaaatattattaagtgtgttagattgggagttctgctgtaccacatatcataaggtatttttaggtctatcactctattcgggctcctatttataaagtaggttgcagttgctaaggcttccccccaaaatagtttttctaatccgaaactgaacaataaacatctaaatttgttcaatagggttcagttcattcttttagcaacaccattttgctctgggatcttcactacggttttatgcctagtgattccactctcttgacataacttgtcaaacttggagttaacaaactccaaaccattatctgtcctaaggttcttaattttaagatctgtttggttttccacctgagttttccaatttctaaactattccaagcactcatccttagcggttaacaagtaggtccaaacacataatcatcaactatggaaagaaaatattgcttaccagagtgagtagacaccttttatggtccataaaggtcagcatgcacgtattcaagtatcttcttagttgtatgtcttgtcggagtaaactttagcttatgttgttttcctaaaacacaagcttcacaaaatg

SEQ ID NO: 382231 - DNA, 2260 bp, Cannabis indica
ttgcttgtgttggttttttatcgtgccaaaaaaattcgcgcaaatataaatgtagatttatccataaaatattattataaggcccttacaccctaagacgtggtgtataatcatttgtacaaattatcgtagcaggctttacaattttatttttagtttattttaaattcaaatatgagattcaatattcatttgaactatggaagaattgggtagtatccatgattatctttgagttgtttaatttagttgaccataaaaatgtcaaatattataagttgcaaaaatagtggctagcactatgctaaatgagctggatttagcctaaatttttatgaggatgtagttgtgccacacacacaatgccaactataagaaaccgttctattacaacaaccttattagctatagagtttaactaccttttatataaatatatttatatatatatatatatatatttatatagttctataagataatgtatccaaccatttagacgggaagccaattatttcatagatgagaactgagggatgctaactaactatcataattatttattaatccatttatgtatctatattagttttttaaaaaagttaatgaattactagaaccttcatagttatcaaaatattctcaaaatagcaattgtcaatgtcttattagctttacaatactaatacaatatataacttaaagtgaaaaaacccacaatagagaaacgacaaaacctatttcttttgtgattattaaaaaagtatttgatcttctattcaggataatttatacaaaggaactcaacccaaaaacattattttctcacttatcctataattcaccacttcattttgttttttccttttgaagaaaaaataattgtggtcaacccaaaaacatatgtaattgatccactaatggtataccaatgtgtggcctctaactcaataatgcataacaatgtcaacggccatttcctggccagtactggccaccaatttgaaagaatgattaatattaaaaacaaataattatattattattattattagtttattatgttgaccccataattgtcaactttaagtaacgataatggccatgaatgagtgaccctttaaaataaattgatgcatccaatggatgaaatgtggaacaaacaaaggcatatgatgacatgtgagagcctatagctaggtatatatatatattactatgaatttatgatacttacataaacatgaagtataggtatatctctaatattgggtattaccataataaaaggataatggcacctaattaagaaaaaaaatatataaaatccttagttagtgctccccactatctcttcttcttactacattgtgtagctatcgaaacttaatccaataattataatataataattattattagttccctaatatttgcatgcaaattaaatggtgtcgattatattcaactgatcattcatacctttattaggttctttcaatcaaattgtaaattaataggcacatatcctaactaaagactaactaaatatgaaatactagccattattacctatgatgaatctaatcaaaatcaatcactctacaatttagttataaaaagaagtgtccttaattactattgttacccacaaattgaatcaagatagaagttaagttgcgtttggttggaggcattggcgaaactatattgggttatgggttggtcatggccctatgttttgtttttgggtgattattgttttcatatataatttatattatatatattaatttaattttattaacaaaaaaaattgatgtttcttacactaagaagcacatgatgaaataaaaaaatatatatataatattgaattgagagctcatttatgtggtattttatatgttgtatagttttattttattttttattttattttaagggtaatgatatgtgcaattataatttggggataattatataatacactattttttataaattttttatattttttttacgttcaaagatttttttttatatatatatttttactgcattgtataaaaacaatacgaaaactacataaaagtaatatgaaaataacattttgaataacaaaaaataacatacaaataacaaacaatcttaaacaaattaataagagtacaacatcaaaataccgtattttctataaataaaattataaaaatcgtaaaaatatttaaaattctcaacaactgtatttttataattt

SEQ ID NO: 382232 - DNA, 1261 bp, Cannabis indica
aactaagtatacgtgcaatacacgtaacaataacctagtttataaaagaggtgtgttagttataacttattaatgcaaatagtttcttgagcaaaagtattattataattaaaaaaaaaaaaaaactaactttcagagataatactgtagtcataacataaaatttttgtaattaaatgtgaattctattcacaacatttgtgattaaatataatatttaaaatttgtaactaaacatttagatataagttgtcattataatttagttttaatcccaataagtattttgactaaaaatacaattagtcacatgaagttatgatttttgtgactaatacctttaagcacagaccttttagtgatgagcattgctattgggcaccactggtgcctagcacctctagagatgtcgctttgtgattgactagagatactccctaaaagttattaatgcattaaactatatgagacctgatacttagttggactaatagcgatattaacacataggagggtgctagacacaactggtgccttttaacatttatctttagtgttaacatgatacaaatgataatttataattagttacaattttttcattttagacctaaattttattgtgattaaaatttattatacaaacattatagtattgtcatttagtatatggttggtagtaattattgtgttctttatttatgtttaaagactagaatgatattactcctagctagctaacttagaaaaacaaaaattgattgatcggaaaataaagatatacactactaactcacgagttttatttaatccatgataaattttagtaattgaataaatgttatatttgatgtgattaaatctaagccaacacatttgggtctaaaacctgacccatctgtacccgaaaaaaataaccaaaaaaatcgggttcaaatagtgtcactcgaataatatttcgggtggtatgggattgacattttttgcatatcgagtttcggataaaattgaaacctagtatatatatatttgttttaaaaaatatctaacctaaacctaacattcactcaccttatcacgaggctccaccaattttcttcttcttctcttctcctctttttcttttctgttccttcttcttacaatacatatatatatatgaggaagagagaggaggttaataatttctttttcatgataatgaaagtgagagctgagaaggctagatagatttataattaactcttttttttaaaaaaaa

SEQ ID NO: 382233 - DNA, 971 bp, Cannabis indica
cacactgatagcgcagaccatgtggtgtttgagacaattatacgtaaggaacaatataagctcctcatttggctataaatcattatttaaacttaaactaccactaaataaaatgaggcaacctcaactttctactattcacactttttttttttcttttttcacttggatgattatcatctttcatttgtaaacaatttccttgctgttatttttgttaccccttatataattataattattattattattaataatatttagataaatggatagcttaaggtgctaaatattataagacgttacatgttgtactttttttagaaatacttaattttcaaattaaggacttatacggacatatttataataatccttttatccatatttttagtagaaaatatattttcagtataatataaaaagaagttattccaatacatttgtgaaggaaaaaagaaaagaaaagaaaaagaagtaaatataagcagtagtactgaatcgtattctttctattaatattatattcctttaaataatttttcaaaaggaaaatacaagcaataagtagtgatggatggaataatgagtagtattattctctcctttattgcttctcattttgaaaacgaaaatacaaacaatgacaaattttatttttctcccttctcatcaattaaattctttgtaattagataaggtgaacattacattagatgcccatattttttttttttcactattcataacaacaaagaaaaaacaagaaatgaagaatgcatatgaaacccacttgtgatatatatttatattaactcccactatctcgatctactttggaattttgaaaccactaatatacataaattatacatattatatatgatccttgataattatcacctttctcaccaccaccatggcaccaccaccaagaataccaaagcaattgagcaccacagccaaccaat

SEQ ID NO: 382234 - DNA, 2759 bp, Cannabis indica
aggtaaataacagaaaaaagaataaacgtgccattaggcacagctgtacaagggtatttctcaacaaataaaaacaatcaggattaacaatagaaaaaacagggttaacagagtaaattgcagattatagtttcttaacaccacccctcaagcgagaggggggagatgtaaccccgagcttgtcaactaagtactgaaaccgagagtgagacagtccctttgtaaaacagtctgctatttgatcgcatgaaggtacataccgaatatctgttttcttttgcaatactctgtcacgattgaagtgaatatccagttctatatgttttgtacgagcgtgataaaccggattggatgcgagtgcactagcactggtgttatcacaccaaattactggtattgcagaaggagtgaactgtatctcctgaagaagggattcgagccaaatgatttcagcagagacttgagcaagtgctctatattcagactctgtactcgatcgggacacaacagactgtttctttgattgccaagacacaagagtctctccaaaataaacacagtaaccccctatggattttcgatcgtctgggcaacaggcccagtcagcattagaataaccaacaaggctcaaattgtcactctgttttatgtgcagaccatggtgaagggtgccttttagatacctgagaacacgtttagcagcattccagtgacttgttgtggggcatttgaggaactgacttagcttattcactgcaaaagctatgtcgggtctagtatgtgtgagatactacatagctcctattagacttctataagctgttggcttgtccaagacttgaccgtatgtgatagatagaggctttccagcagtcataggtgtgggacaaggtttcaagttcagcatgttcatcttctcaagcagctctgtgatgtattttccttggctaagatacattccagtggagtccctatatacctcaattccaagaaagtaattaagatttccaagatctttcaatgagaaagtgttgttcagttttcctatgaagttctcaagttcaatcaagttgttgccagtcactataatatcgtccacgtatataagtgccatgatcacaaaccgagaagttttcaacatgaaaaacgaggtatctgcctttgagttctcaaagttccaactgattagagtgtttttaagctgttcaaaccaagcccttggtgcttgttttagcacgtaaagagatttcttcagtttacacacataatcaagtttgtccttgtccacgaacccttgtggttgagccatgtacaccgcctcttcaagttcttcgtttaagaaagcgttgttgatatcaatttgtcttactatccacccctttgaaactgctacggataagacaactctgattgtagaaggcttaattacaggactgaaagtttcaccaaagtcaagtccaggccttcggtgaaacccctttgcaacaagcctcgccttgagtctttgaagagatccatcagcattgtatttctctttaaagacccacttgtttccaaccacattgtattctggtgaaggtttcactaagatccatgtcttgtttttaatgagagcatagaattcttcactcattgctctattccagccactgtgacgaagagcttcaaggacagatgtgggttcaccattcttgaaattccactgagcttgaccaacatagactctaggcttatgaactccagctttcgaccgagttaccattggatgaacattttgaacttgtacatgttcttggttttgagttgctgaagtctcctgtgagagtgtaagagtatcttgctgttttggctgattctgtgctgagaaatcgtgttcagtgaaattaagatcaacaaaaggattatgagtgagatctacctgatttttgtctacagcaatatctggtgatgcagcaggttcacttgcatcatgatttgtatcagtatgtgtgtaaatttcaggtgagtgagtttcggattgggtaatgtgttcacactgagcagtaatatttgtgttgacatgtgactcactttctggttgaataacaggtaaataagtccaggtatggggagattgaacttcgactgttgtctctttttggtgagtatttaagaaacctgttttacaagggaactcctcttcattgaaaacaacatctcttgagatatacaacctccctgttgaactaaggcatttatagcctttgtgactctcactataaccaaggttaacacacttggtagagtgaaattgaaacttatgattttggtatggccttagacatggaaaacaagctactccaaagacttttaaaaatttataatctggttgtttcgaatgaacaatttcaaagggtgttttgccactcaacacaggtgtaggaagtctgttaataagataaactgcagtttgaaaagcatccacccaatatttgagaggtaagcttgcttgtgcaagaagagttagacccatctcaactatatgtctgtgctttctctcagcacgcccattttgttcagatgtgtgagggcaaggatgagtgaatagaataccactttcttgaaccaactcactaaaggattggtattcaccaccccagtcagtgtgcagtctcttcgtattttgcttgtgctaaatattttccgattatactcgaaatcttctaattattaagaacttaattggatttattgttttatcaatggtcttggatcaaaat

SEQ ID NO: 382235 - DNA, 3138 bp, Cannabis indica
acagccataaaattgtgcatctatgttattattattattattattattattattattattattattattatttcaatattttttttatttggatgaatttccaatactttgttagtaacgaaacgatggtcctgttcctattgcaatagctagtctcactacactacaccagctagctagaatatggaatatggtatgatttgctttgaaaaagtgactgtaaaatattatcacacattttttatttattaccaaaagttaaatgaaaaataataaattgggagaaaaatcttctgtcttttatacttggagaaaaatcttctttgtcttttatgcttttttttttaatgtcttttatactttataattaccttcttaaagttttttttaccttaatagcagttttaaaaattacctaagagttaattgggatttatacattgtactcaaaataattgtcgagatccttctatgcaaagataccatagccagggacggaggcagaaattaagaataagggggccaaaaaaaaaaaaaaaaaaaagggggccaaatacataattttttgaaaaatataatttttaatattaaattgctttataattttttttttggtccaaagttttgggaggggccatggccccttttgagttaaagtagctccgtccctgactatagcctaactgttattctacaaaggagcaccatttttaaggcttattaaaataaatattactacaaaatttagcgtaaaatcatacaaccaactataccaaacactcggtattatttatttgataaagttacttctcaaacatttaggaagaaaaaaagaagtgatgaaatgtatggaatgaagcgtatttgagtagacaataataggtgtgaatgttgagtggagtattgactaaagtacattcaccacttaaaacgatatcgtttagagaatattttattttatattacaagatggtgtgcggcattgaaacatgactaaaatgaaaggtatgcagtgcaccaccatatgaatgtgttggaatgtgttcccattaattttgttaggtaaagatattactttattaatcaagtaataataataagtgtggcaatttatctaataccaaaacaagttatatatataaaaaaaatatttaatatttatttatattaggcacgagtaataaatatgacaaatttcattgtaagatgaaacttacacgtaaaaacttaagctgccatataggacatagtactcaaattattaacacccctctttcttaaggtattaaaacacattttggatgagataaaaaattaacacatgattttgtgtttcacattatggaatatagagaaggaaagaaattaagaaagacatttgtacccaaaattacatgtgattgggaaaataaactctttgtaatattggattagagtataatttaatgtaagtacttaatttaacatatttatttgagaatgtaattataaagtaattatgtaagtgaagataattgatagattataattacattttgtagttctcaaaatctttgtaagaattaagtgtaattatgaaatattactattttaaaataattaattattatataatattctatgcaatttaacaacttatttcaaaactatacaaataagaatttatatgtaatatttacttgatatttaaatacaccttgtatttcaaaataagaaagtaattttttttttatttaagtatttatatattacacaatgtataagttgagactcgaactcaggacttccaacacatacgcacctttctatggtcacttgaattagccttaagtagttaaaataaaaaagtaattactaccctattgattatactatcctgattacacaattacaataaaaaggtgcttgttttcaataaaaaattacaattagtgtcatgtgaattttttgaattcaaaatatacaaagtgaatccaatgaggtatgagtggaaataagttcactaggaagtgatcgtgtgtaacccgacaaatggcatcaagagacctcgaaggagtattatccaaatatacacacaagtaaatgtacaacaaattagcaagacatgtaaaaaatattccatattttttatcttatatatgatttaaatttgagtcttaaaattaagtatgttttatgatttaaatacgagtttcaaatttatatatatatatatatattttttttacctttcgtcaattaaatttgaattttaaatttttgtatttttcaaaaatataaagtaaaggtacattattattattattattattctcactcaaatttatcatatgaatatatatatttgtctttggtcaatttggtaaagacatttgctataatgtgtatttggatatcaacaggccgaccttgagttgaaattggttataggcaaaaaaaaatttttgggcccttactataaagataaatagtatttttaaaaattatttaaaaaatatgtatattttttaaaagacaattttttttatttgggcccataaaatgagtgggccgtagacacgggccttacccgcctatgaccagaagcggctctggagatcaatggtaattacattttaattactattatcattgtttcatacacgttagtagtagagtagatatattaatatagtcatttttaaaaattaatagtatttagtaatcatagttaattctcacgagagtcatgataattggagagtgtttttatgaaactttaacaacctttatttatttagttaccatgtacataatttgattaaacaaacccactaaagctaataattatccgaaagtcatataattaaatgtaatttagataatcattaggtttatacctcgtatcataattggatttaaaaacattgaattctaatacaacattatatttcaatgtgtggttattactaacacttttctccaacattaaaataaaaattcatataaaactaccaattatactactttatattgcacaatggaatttatatttagtaaattgtgtaattatatatatatatactagtaaaaagctacgtgcgaggcacgtatactaaattttatgttagtttttttaatgttatttgaaagtgatac

SEQ ID NO: 382236 - DNA, 2851 bp, Cannabis indica
ttatctctccctctctctttctggtgaggtatatatacgcgttaatatctgttaaagctggctgtcagagctctaatcaaatattgttgtaagaagagaaaggcaaaagggtttttttactttcacgtggtgctaaaataaaaaatggaagtggtgacagtataactaaccagttagtcggatctggttgagacatagaaatctgaaaattacttattatacttttatcttcttttttttttcctctcttttttcttttcaacttttctaggtattaaaatgacaaaacaagttgctatgcaataatgcataataagcagtgtggagtggacctgtggttatatgtacttaattatatacacgagaatgaaaccaaagtatattatttaattattattattattattattattattattaaaatatgaaaataaaattgtattttgtctgtaatatatatatatatattgatactgaaaatatatataatattacacagggagtggtggcatcagggattgccttcgctgtacagatatggtgcattgacagaggtggccctgtgttcgtcgctgtgtatcaacctgttcagactcttgttgtcgctatcatggcctccattgccttaggcgagcaattttacttaggagggtaagtgggtccttatccccacctcttatatatatcaatctttttattctaatctttatatttctcatacaataatctttttattatattttgggccaattattaacaaacaaatccaaccccaaccgtacgatcttgtaaatgaacggaatatatatacctccaaatctttaacatcaaagtccaagatagtgatcaattaattaattaagtggatttcatgcataattcctatgtcaaataacgaccgtgtgacagattattgagtttaattaattatataaggtacagaattattaataattaatatgtacatgaagtcatcattaataatagtgaagagaagaagtacttaacataaatatacaacagaatgttttggcttctcattattttattgtcttttattatggtatatatatatatctatgtatgtacatggaatgtgaatataaaattggtgcatggtaacaggatcattggagcggtgctgatcatagtgggactatacttggtgctgtggggtaaaagtgaagaaaggaagttcattgcactagaaaaggctgcaatccaagccagtactaatccagaccacacggccagcagcagaacaccagcccacatcaagacctctctcactcagccacttcttccttcttcaaccgaaaatgtttaaatcatcatcatcttcatcgatatattgacctagcttgtttttattaattaactagctactactacagcaagaagtactttggcttggctttttttttaaaaaaaaaatagagaagcccctactagctcctacgtagtactgatctatatatcagaaagcttttgtgtgtcatgtattgagcttctgttttcttttgtttttaccaatatggctttcttataattattagtaggtaaggtttggaacaaaaaaaaaggtgaaatcctcaaggggatgaatatgatcattaatgtcacttctgtgggccacaaagcatgaaatatccccaaagcttttatatgttaatttaaggtttgatttactagaaaatgagtgatttcccacattttaaattgcctcaatttcactttttatcatatcataaaacagtgatccctagctgtgatcactatgccaatttgagttggccaagcgcatggactcttttatatcactgatcacaattattcggtcggtagaaaagtaaaagttacacttacacaaccatgcatatatattatgatttatcaaggatattaaatataactacttaattatgcctatttttattaaataatatttctatattttatcaaataatattaatatcatcatgaacaacatcatattttagtatggtggctaaagtataattttttcttcatgaaaaaaataataacaattgtttttataaatattttgtggtatctcacacccaactatacttttgctccactcacctttttataatcaaaaaaccaatactaagccatgctacaagaaatgttatttttgcctgcacaacaaaagttggtaaaatagaatgtatttgtgatgtgttggcaaaaaagagttggcaaatcaatgttggtattaaaacttttgccagcataacatgaaaagcactagtaaaagttagattttaaccactgcaaatgtacgatggtaaaactttgacttctttgccagtgcagtttacgaaatacgctggtaaaagttacttttaccagcacagtagcaaactgtgctggtaaaaagtgacatttctttgcatgcagtcagttgattataagcaagtaattagttgatgatgttgctactagccatataccttacaacttttagtattttttttattattggaaaataatttgcatttcttttttatgtttaaagaaatcataatttactatttatatattaaggattaatatataatatctcttatgttatgatcagttaaatttaattagcaatttcactattatacctaatttttgtttaaaaatttaaatatgtaatttttaaaaaaaatattaaaaaatataaatgtacaagcttttctcagcgtgaaaaaataatatgtattcttttatggtcatatttacttaaaagaattagaatacaattcttagtttactaaattttcgtaaaaagagaaagtagtagggcccacataaattagggaaaaaataaaataaaagg

SEQ ID NO: 382237 - DNA, 1791 bp, Cannabis indica
tttttcactttttcttaacatttgtctttttcacttcttaccatcattgagctttacacattgaacatttggagtaatgtggtcatgatgttgactcaagcaatttcagtggatcgaatcgaataaactcgtcttctttgttgaaattatgactgaaatccttatatgataatcgtcttgaacttgaagcatttgttgtctgcagggtcctcttgctttttacaagggtttcttgccaaattttggacggctgggaacctggaatgtcgttatgttcctaactctagaacaggtatgagtaagatgtggttctgcccatcatattgcattttaattaattagaccaggcaatgaaaatttgcatcagtcatcatcatatgactatgctgaacttaaatgtggaaccagttggtatggaacaccgaaaaatgaaatgacaatcttttattttcttatagatatttattcttatgtttatgtttttgttttgatgacaggccaagaagtttttcaaaaaagaatagagtcatcttgattgagttctttgaagataatctaagcctacagtttggaacaagcctacatcaaatggaaattttctaaattgattaataaagctttaagccatcgtctttctctcattttgttaagagggaaggaagagtttttcaagggaaactctcaatactaaactcataagatcaaataactgtaattcatcattgcaaaaaaactaaaataactgtaattcatatttggaattatcattttttccccttcttaatattggataagagggtcacttaattatactcaaagcagtgaaaataagataaatttttgaatatttttgagaaatagaataaagccttgctatggtttgttttgttttgttttttcctttacagtattgtttccatttattattatttccataacagagtgaaggccttattattattatcaacctccttcactgactgatcggtgatcggagaggaagatttataatggactgaaaaattcaaaagcataataatgcacagatcatagttcatgggaccaaatttctaaatagtaatttatttactataaataataaattgaccaaattactatgtgctgtatgtagtggtagtgttgtggacaatgtcccacataaaataaatggtagagaattgagccatatataaaaacatgggctgctctactgtcaattggttttgagatgacaccccatgattcccaacatggtatcagagccatattctttgcgggcaagtgatagctatcatcttgaggggtaatattgtggacaatgttccacatgaaataaatggtagagaattgaaccatatataactctactcattgccaattagttttgagatggaaccccatgattctcaacagaggaatgtctttactgacaattttctttgcttagattaagagttctgatctcatcactctttataagagagattatgtttggccctttaagaagctagtttggtgtggcggtgttatccttaatggaatgagaacgctcgaggtgtataccgataatctaagttaagggagaatgaggtataagatccttataattgacacgtgttctactaaatttgtaaaaattagcgaagagatggagatgcaccatgtttttatataaaaaatgaaaattgatcaaatttaaatttgtaggtttttttttttttttgaattacctcatataatggttttttaatttttttttttgaaatttacggattgggtttctaaaataat

SEQ ID NO: 382238 - DNA, 1203 bp, Cannabis indica
tttgaaaggagaaatgctaaaagacacctgtggtgcctagcaccttcctatgtgtcaatattgctattggtccaactaagtatcgggtcccatataatttaatataatagcttttagggagtatcgttagccaattgtaacgtaacatgtcgagaaactgctaggcaccactagtgtctaatagcaatattcttttgaaaggtatatgaaaagaaattctaaatttattgtgtttacttaagtgcgtgaaaagaagaaaaaaaagttgtatagagaaagcaccttaaggttatttatttgaaaaaaaaatagatgatttttgcatgatcatataatggattgtgcattaatgcattaattttttaaaacaactatggaaagtatgctataaagtatagacagtgtagatagataatggttttgtggtaagagaaagagaggttagtggtcaaagtaggattgatgaagaatggtgctgaaaagccattagcatcaccacaccatattataatgaaagtacaccaaattagttgttacacttgcaatatgtatataatgactataatatatgtaaatttatagataaatgagccaaattccattgaattacatttccaccaccaaatattgtctccataccccttatagtagctagggtctttgctttaccctcatcatcatcatttcaacttttaattcaaaccttggtccacatccctttcccttctattatcttttcaaatttagtttattttattttactttcataaaatgaatgatattttaatttatatacttggaatttataaattagcttgatgttgacccaaagacttcaaaaatcggttattattcctccaagctcatttatagttttattttagaaaggcatgtatatttaatggtttgcatccaaacctattgggactagagtaaattaatttgggaaatttaggtcgtatattgacttatatataatatactattaatattaagtattaataacatgcaatgcatatttacttaatgttattacttaattattaaattaaataataataataataattaaaattaaatttaatataatttaattatatttttaaaatatatcaaatttaatctaattttagatttatatatataaaaatatatctaattaattttattaaacaataaaataagtaaataaatttagatatt

SEQ ID NO: 382239 - DNA, 1538 bp, Cannabis indica
aacaacccaaatagactacactcccaaaacccattcacgggtttattgaaaaaaaataaaaataaataaataaattatttttcacctcaacaaaattaaagtaaaaatatttattttttattttaattttgtcattattattattattaatatttacctgcacaaaaattcggttagggagctgtgaaacggttttgagcaagtaatctgaagcccatcgaatagccaccatagaattcctcaactcagctggcggcattgagtccccaaactcaatcacactccaagccaacattgttgttgtgaaagacattgggaatccaaacttgatgttgtcaccggcatcgtagtaaccgcccgtcaaatcgacgttgtaagtccaaccgtcgctcagacccgagttgtcccgccacttcattcgttggtattggggcagaacgcccgaccgctgcccctcaaaaaacaagacggctttggatagcgcgtcttggtagtcgtgggcattggctgcaggtggctcgaaactcgagaatgatatgatgagaatgaaaagtatttgagtgatcatattgtatttctgactgaagtttgcggtttgtttgtgagaattggaaatgggggtgtggttttttttaaatttggttttgttgggtttatattttgggtggaattggagagagagagaggcttcacggggaatagaagtgaaggattggatttggagggaagttttttgggtttgctattgctgtttttttaggtatatagatatatagatatagagagagagactcagagagtagaaagtgtcagtgagaatcacatgggttttgctaagttaaagtgtagagagtgcaaaaggaactataagagagagagaggcttgggtgggttgaagttgaataccctttttgtggggtccttttatgggctttatatttatataagttaggtgagttgaaatgggtgtttgattgaggtaaacagaaagaaagaaaaacattgaaaataaagtattatatagacattaaattgaggttaaaagtttaaggatgatacgttttttgtgggtgaaaaaattggtgttatgtggtaaaaggatgaaagtgaaaatgcagtaatgcaaattgagttttaagtttaaggatgtgatgtgattattttactaccatgtataatgttggtgatttttgtgttatttaatttccaactattttcttttaggttgtatatggaaaaattaatgttgtttttattgctcttttgtgttttattattatatttttatggatatagatgacaatgtattgtgccagataattttgaacaagtatttggctaagctagcttgcaccttgaatatagtaagctagctttttgtacaagtgtattcaaattttaccaactcgtttgaattgtgtcaattcatatattatatatcattatatataaaatatatttatttaaaaataataaaattaattttataaaaataattaggatttttgctccttgaattttgaaatataccaaattat

SEQ ID NO: 382240 - DNA, 3347 bp, Cannabis indica
aaaaggggtggctaccaggcctgtttttgggatttcttctcccttggagggctttcggtctgggtccaagagaaagaagggccctgggtttgagttcataggagagtcgacttcgggaggggggtcattcggcccaattggggggaaacccggtcttggctggtgatgtcttttgcaaggtcagtgagaactcccctggaaagggccgggtgcaacggggcaagtctgtgaacaatatcaatggggaagatggacttgcatttgtcaaggttgggaggcgccggagtgatgatggcagttcagatcagtttcgtgaagttagaagatggagaaaaaccattgaggaggctactaaaccggccagtctcattgcccttgagaaggacgatggcgtgcccgatgatgctcgtgactgttccacttgcaatcctggtgcgaaaaatggtgccgacaagagtttggtaattttctctgattctacttctcttttatctgatgctaatgtgatacatacccaaagtgtggatggtactatatatctggaaattcaggattttactgtggccgaggaagcgggccttaccatgccccccacagctccatgattttcttgtcgtggaattgccggggcttggggcaagctcgggcaagacaggctctgcggagtctggtggcggaggtgaatcctgatgtcctatttcttatggaaactaaaatttctagtaacagtatgcgaagtttatggagaaggcttgggttctctagggcttcggtggtggatgcccagggctctgctggtggattatgtctttgttggaaattgggtgtcgagatagaaatccttggggcggatgaccatgtgatatgtgctaaattctctaatgttctcaataagcccccgtgggttgctttttttgtctatggccctccctatcggggagctcgtgctgatttctgggaaaactttggtcttcaggtggtgtctcttaatgatccttgggttgtaatgggagatttaaatctggtttttgaatcaggctgaaaagtttggtggtaattcggtttctgatgttgaaagtgctctccttaatgacttcttgttagtttcgggtggcattgatcttgggagtgtgggtaattttttcacctggtctaataagcggcagttctcggagcttatcaagaaggattgatcgagtgatcgggtctcttgattggattctgagttttcagcaagcgggggttaaatctcttactattaagtcctctgatcatgctcccatcttgcttgatctgatgcttgatcgggataatttccagaaacctttcagatttcttgatgcgtggacgcgtgaccctgcttgttttgaggttgttaaagaggcttggcagattaatgttcgaggggttcgaagctttcagcttatggcaaagttggcttctacccgtaagcatctgagtaaatggaacaaggagtgttttggcttttgcaatgagaaactgaggctcttggacaggttactgttggagatccaatagagaccacctagtgatgataatatgaagttagaggctgatgttttgctggaaatggaggaagtgtctaaccgcctcaatgatatttggcgtcaaaagtcccgggaactttggttaaaagatggagatcgcaatacccggttctttcatacgtccactgtgattcgacggaagcggaatttcatctctgctatttcggaggatgatgtccattggattagtggtaggcgggatattggggattatttcaccgagaattttcagcaggtgtttacctcggtcaatcccccggtggatgaggagttgattggcattatcccacctatggtgtcttcggttatgaatgatagccttactagtattccgtcgcgggatgagattagacgggctgtgtggtccatggggccgctgaaagcgccgggtcctgatggaatgcatggtcgcttctaccgttcccattgggagattgtggcggatgatgtgattggtacggtctctgagtttttccaattcggtagattcgtcaaaagtttgaatcgaactttcattgttctcatccccaaaaaggagggggctaagaaatttgatgacttccgccccatctcgctatgtaactttacttacaaaatcatctcgaagatcttgtctaatcagcttcggggcattctcccaaatctcatttcgccgctacaagctgcttttgttccgggtcggtggattgctgagaatggtctaattgctcaagagattatgcattctttcaacaggaaatgctctggggtgggatatgttgggatgaaactcgatatgtctaaggcatacgaccgtatggaatggggtttcttggaccgggttatagatgcttttggattttgtgtgaagtttcaccagttgattgcttggtgtgtatcctcggttagcttttctgtcttgctcaatggcggaccgcttaaacaattctttccttctcggggtttaaggcagggcgatcccctttcgccctacctttttattctgggagtgaagtcctatcacggttattgtttcgtgaggaggtcaatggagctatccatgggtgtaaggtttgtccccaaagtcctgccatttctcatttaatgtatgcggatgacacttttgttttctgtagggctaatagtggggaagtggctcgggttcaggattgcctcaataaatattgtctttggtcgggccaagtaattaatgtggctaaatcggcggtggttttttctaagaatgtccaggctgttactatcggtgagatttctgatagctgggttttacgcctctttcctctgaggataaattcctggggaaccccctattgttctctcgcagtaaaaggaatcacttccagtttgtggttgatcgtgtaaagaatcgccttgaaggttggcgtagtaaactattgtctcaggcgggtcggacaaccttgatcaattcggttatcgctagtaccccgatctacactatgtccactttcttgcttcctaagactatttgttctacgttggacaagttggctcgtaaattttggtgggtcggggccacgggtaaaaatagattcttggcgctaacaagttgggattctatttgtttgcctaaatcttatggtggcctgggtatcaagaagttctttgacttaaatatggccctcatctctaaactggcgtggggcctggttagtggcagtattgccctctggtgtagtgtgttccatgcgaaatattgtaagaggggagatactttttggaattgtccgaacccttcccctgcctccttctcggctttgg

SEQ ID NO: 382241 - DNA, 5071 bp, Cannabis indica
attattattattattgcattatttcacggactcccacacctttgacccctttgaaactatgcacgtgttgttctaagtttttttcaaacacctcagtcgactcacacacacacacacactctatatacgaataaattgtgatattgtagtggtcagcttgtgttaactaatctctttttttaacgaaatgtcatcacaggctccaccactgagtgtagtagtagtgtcgccgcagcagcagagagtgagccatggttcatcttctgttggtcctgttgttggtgtcttagttgctattctcatcttaggagcaatggcagtaatggtgggtcggttgtgctcaggtaagagaatcatgggctatggaaattttgacttggagacatgggctgaaaccaagtgctcttcctgtattgatggtagaatccaagttaatacccctttgcccaaacccaacgattctgctgttgctgctgctgctgcctcccaatgaagatgaaactacttatttgattgagaatattttatggggtttggcttgtatttctggatattattttggttgtggatcttttgtgttttttactcttttcagtagccaaaaatgtgatatgggtttacttttgtcttttttggatgatgaaatttcattcctttttgtttacattattagttcaaggttttagtattttgtctattgagttcattttaatcaaagcctccactttctggttgttgatatactttgaccttaatatatattaacaaacaaaataaaactaagcatactttaattcagggtaaaattttgataactctatcacacatttaataagattagatttagaagagataagtttattctcatacctttctgattctttgacaacttttttagtctctattattttatttttctttttcattttaatgtgctaattaataaaggatatatactccactttataattttttttgttaaaacccattgagtagttgaacctctcttatgaattttcaggttcaataaattacatatgtgaaactacacgcaattatgacactagcaaaaaataaaagataaaacatttatgaccatccaagtaaagaaaaagaaaacagataaccattattatgacaatttaaaatttataacttaacatgcaatgaatgatgatgttgcctttgaatgaaataaaaagcctaagccttttcgggtcgactagtcttactcatatcattctcattcattcactcaacaaactctttaaactttaagataaaaggggtgacaatttgtgttcctatcatgacaagatttaagcattacaagtaaatagtaaactcaactttgatccatttagtatcgaaaactaaactcaaacctaacccatttataaatgaattgacctgacccaactcgtttaattatctatttatataaaaaaaaccatacttaattttagttaacatatcaacttattcttcgataatattatcccacatgccacatgaattaaatgtaaaaaattgagtcttatataaaatatggactcaatattaacatatttatgttttctttaactaaaatatataatttattaacatatatttatagtaaatttaacatgtttactatctttttataatactttaaagattaatttagcatgtttatgtcatgtttaactaaaatatataatttatatgtaatgaattttaatagatttaagagtgtatacttttatacaatttatttttgtagttaggcgtgttaagcccgcaaactcaggaaatcgaaattgtaaagaaaaatattaatatataaataaaatattaaataataaaaaaatataacaaaataatatttagtgtaatggtagagagtgtaattttaagcaaaaagagattaatcctcaatctctacttttacaattttttaaaaatatttaatatgtaaaactttggagctcatataaagttttaaatttttttacatttacaccaaaatacgagaactattattttaataataattaatatatttatataagggacttaaaatttaattttgtctttaactccatatattttagggacgactctatcgaaaatgacccgtttaataaatgggtcaattatgtcaacccaaaatgacccgtacccatttaaaataaactcaaactcatttatttcgtgcgggtttcgagttgtattattgtatctaacccgaattgccacctctaaactctaccaaataatttatgtctttttctctctccttattttcttcttcctctttcactaataatattaaagatttgtcctttgtatttgtattgtagctctatgtcatcatgtatagactagtgaataatgcaatagctcatttatataaagctgtgactatcatttatcaagacacagaagaagaaattagtctaaatgcatgatggaattgcaatgcatgttcaccatcattacttgctctatctcacagactcaactcagtgctttgaaaaatataattaaatctctctctctatatatatttatatatatatatggccatatatatatatatcagagaatagaataatacttcattccattccttgggctttgggcattaatcctgctcaactaattcaacttcaccatgtgattcaattgaaattgttggctccacatgacacagtcattagtatcaaaataaatcaagataatcatgttttgaaaatattagactctagctcatgcctttaattatcatacatagttgagttgaatataagttcttgtggtatgagtatattattaatttgcacaagcactattttttttcttaattaagactgatcatttattttttatttgttaattttcttgcttattgttagagataacaatacaatagaattagaatatagtagataagttacatgttatcgagtgcaggcaaatgctagctgtgtcctcttcaggattattattattaaagctttattaattagttttgactttaaagtattattgtcactggttccagttccagttccagttccagcatcaaagtggaaaaaggtttaatttttcttcttcacatgtctttgttttgtagtgaaaattaatagaaatgcaagtaaatgctagctgtgtgctagatattattttataaaaataataaagtttatacaatcgatatcaattgcggaataatataaacatatcaaatatatatgcaaattacaaaagagatcgaagaaatacttccaatcattgatcttttgagctttaatctcacacgaacttcgaatctacaaaagaaaagaaaatgcgttagtatgagtaattgagcttctaagatctctctactctctttagatggaattgactgtttacacaaaatgagtgaggagctcagcaccctatttatacgtgagatactttattagtatttgtgccacattaattaattcgaaaaatcaaatcgagaaataaattaaattgacctaatattagaatatttatgtttatcaaaaaattgatttagaatcaattataatgaatatttcatattcatacaagtgtaatcaattgatcttcgaaaactaataaaatagagcttaagaaaagaataaaataataaataataaataagtaattttttacgtggttcgagcgttgacaattcttaatccacgagttcgctgtattagccttacaactgtttagttaatacaagtgtttacaatataaaccctagctctacactcctcttgtttctcttgaggaaaaagaagctagtaggaattttagcagaggttcgactagtatcaaaatgttcaccctttgtgcataaaaaatgagagtatttataggcatacatgtggttaagggcataccctttacccacctagggtttcgtactcaacacgctgtaagagctggtactacaacatgacgatctatttgttggttggtaggaaacttctccattgtgtggtgtacgactacagtgagggatttcatgtgaactaggacacgtgtcactaaaaggttttaccttgaaaagttgttgcctagacaagtcattaggaaaaaaggagatttcaaagtcaagtgcgcgcactactatagtttgacacagggtacaagatttgagttggtgtcgaataataagtaatcgtcgcttcgagctccgtgtaggatatcgtcaagtatcctttgggattattgagccacatccgtcccggatcatactgacctactaccttcctagaatacttgtagctcccggaaactctgatcctccctaatcgcagatggaatgtaagagtcctagagtcctttacatctttgctaacacttggggatccctgactagcttccggaatataacagtttccttagtttccttagtgtcattaagcaaaaatgacatacctgattgcagatagtccaaggtggcacccttccgtgattaccacgtagcaggcatttgggaatacagataacaggtatacaaaataggaaactccctagaaatttctcagaaacaaacaaaaaaggaaacttcctagaaaatgacaaactgacaaacatagaaaatgacaaattgacgacaaataaacaaaccgacaaatatagaaaacgacaaacctacaaacaaacaattagggaaatcctacaaacatcatgactatcagaaaatttcttacttatttctatcttacaaaaataagagatatggaatctctttgtactacttatgagcagtctataataaacttgtggtcagcattgtagtcggagtcataattggggtccttctaagtgggtgccacctgatggtttatcatcttcatcgcttccagctggtggacatgctcatgcatcataatcaagaaaaaacaatctcccattctagtctagtgtactgaaagagataaggatcttgctttgattcttggtccatgtatgggtctatgaatcttcaaaatgcttgtcttacggagtaggactcctacagtgtctagtttctttgtaagtagttgattgtaactttttc

SEQ ID NO: 382242 - DNA, 1079 bp, Cannabis indica
ttttcgtcaagatccaatgatctaaaatctgaactttacatgtaccacgtttaagacaatcataaatctacactaacgaaactagaggaaattaaattacaattgtataaatattgaatttttgctgtttacaaaatgaaaactttgagtaattattacaccgctattcatccacttaaatatattaataatttttagctggggtggtgtttgttaattatatttgctacaggctatttcagtaatgaagaagcaacttcatcaacaattgactcagaaggatggttgagaactggtgacctctgctacattgatgaagatggattcattttcgtggttgataggttgaaagagcttattaaatacaagggttatcaggtatataaatgcaatgcatgcattttcagaaatatatcatttcattattcatgcatgtatatatgataatttgtatcaatatatggcaggtggccccagcagaacttgaggccttgttacttactcatcctgaaatttctgacgctgctgttataccgtaagtcaacttaatttaatctcgatcgttttatataagacatagatacaagaaaaagagacttgtatttaatatgttgtatttataatataacatatatacatatatattttcagatatcctgataaggaggctggccaatttcccatggcatacgtggttagaaaagggggaagtaatttatctgaattttcagtcatggattttatagccaaactggttagttttagtgaaaaaaagccttcatcttaattagtcttatataaatggctctgaataaactcatctaattacttatatatatttatataggtggcgccatacaagagaattcgaaaagtggcatttgtagcatccatacccaagaatccttcaggcaagattttaaggaaggatctcataaaactcgctaccgctaaactctaagcctgtcacaagttttattgtatctataatctatctataatatatgtttatttattttcaaatatttataggatataaatatatatatatctattctatataaagtgtgactatataa

SEQ ID NO: 382243 - DNA, 767 bp, Cannabis indica
aacaaaagtgaaagttgtggtgattggtcattgttaatgtttcctttttcattttcataaatgttgcctgcattacaaaataatttaacaaagagaaaggttaaaaaggtcaaaaagaaaaagaaaaggaaaaaaagtctacactcagtactgcagcaaaagagagtgtggtccacatgtcgtactataattggaagaaaatgggacccacccttaaacgaaatttcacatgctctgtcattttcggtaacgatcctccgtacgaaggtccacgtgtcaaaatctcctttgaaacagttaggtgtcgctttctatgcgctgtagaagaaccggcggctgcggcgcgttattgtcggcttccttacggttatgtctttctgcaggttcttgtcggctcactcggcggctaccttttccattttccaaagccaaattctggtccaacccttctattgtattgtagccaatagccattaacatttctcaaaattaagtgtggcaaaaatttctaaacattttttttaaggagaaatgctaaagggtatcagtggtgtctagcaccttcttacgtgtaaatatcgttaagtatcgggttccatataatttaatataatagcttttagagaatatcgctatccaatcgcaacgcgacatgtcgagaaggtggtaggcactactggtgcctaatagcaatgctcattttttagctattaaaataggtaggttttttttaaaaaaataaataatatatcaagttcattaaaatc

SEQ ID NO: 382244 - DNA, 2221 bp, Cannabis indica
tatatatatatataaatacacaaagtattaataacatacaataataaagttaaattaaatttaatatcattcaattatatttttttaatatataaaattaattgaatttaattttaaatatttacttataaaaaaatatagttaactaattttattaaacaataaaataaatcaataaatttatatattttaaataatataattaatattttttttctaagtttgtcagtgtggtagctatatatgttacccttcaaaaaaaaattatctaatatgttttctctttaaaatgatgatataatgatttttttatggatttcatattcattttaatgtttgaaataagtatatatatataattaaatattatacctaccttaaaattaagttagacatatatgtcttctttcgattgtctatatttagcactattgtttattcggttgaataatacgaaataacaactaataataaagtgcatatatatgtaaataatgcaagctaggctaggagacatcgagacaatactattgtaaaggatatgcaactaaaattcgagcacagtaaccaaatgaaaatgcatggacctcctacaaagagaaaacacaggcagaccagaattaattatatacaacagaaaactttatgaataatgagaacaacaaagacatggccatgctatagccatatcagtctacctcgatcgcattaagattgatatatttttaacacttctaaatatgccgtcttacgattgactaacaatactcattaaaaattattatatttacttatataggacccgatcgatacttaattaaattaatagtgataatagcaaatgctagacactactagtacattttaacatttctatttttataattataataacaatctcagcctagtcgtaaccaaagtctcattaaaacttgtagatgcaggtttacttgaagctagagcatcattatagaattcgaaacataataattacagcattcacagttaaaatatgatatagttaataaataagagtgttgttattggacactaatagttcctaacatcttttataagtagtattttattattagttagcgatattctctaaaaattattttctttaagttatatcataagactcactatttaattatagtaataagagattttcttaaccattctcaatgtataaatgtgttatatgagattattttgtttgtttttgtttgttttttgtttttttttttcaaataaggagactatttagttacctaaataattggcgtgacacatcagaaagtaaatgtactcctactttgaatgccgacggtcaaaagaaattagttgacccaaatattctgtgtgattacacaaacaacctaccaaaaaaaaaaaaaaaattatccctaattccaaaatcctctataaatattaaaatttgatcaccaaaattcataatcactttttatttgctttttctattaggtctttctttcctctttaactaatattaaaattatatatatttcacttgttaaaaaaatttatataaattcaagatcatatataatataaaacacaataataatatataataattagatatatgcgtacttaattgatcaataataattatcgcaatttgatagtgcaatactatcaactaactcttcctctctaaatctctaaaccagaaacaattttagttatctgattatcaaaagtatacaattatgatgagatatatatttataaccctagttgaattgggcctgctcatcaaagacttcaaccagctagaaaaacccacactattgcttcacttagactttacacacacaaatgctaagtccatcaactatgataaccaacaatatagactaatacaacaaagaactatctaatttatccaaattttaataaaactaataaaagttaatgtaagccaaataaaaagtctaacattctctcacttgggcaacattaattttaatacatacatatattatatatcaaaataattttgtttgaaaacgactcatgggttgaacaacagaaaaacatttgtggccactttaaaaataatagttctctgatagcatctcaacataccagtccaatttaacctttgatattgaactatgacaatcatattgtttttaaatcaacaaaagacattcataatcacaaataccaaagtattaaatcgacatggtca

SEQ ID NO: 382245 - DNA, 1358 bp, Cannabis indica
acatatagtcacatataaaaaatatatctaaattaattatttattataaatggttcggttcggtttaaccgttaactattaattatgaactgcagtcgaaccattacgccgtaaacggtctagattgaccaaactaccaaaaacggttttccctacgatctacagtagtttggattattgtggtctggatttaaaccgcgatttttcaatttatataattagccctaatttatgttgtttaatatttaataaaatatattttaatacatttctataatcatactttaaaaaaatatatatttccatttagtagagaaaatttgttgtcatgacaaactaataattctctccattttttctttctctcctcttttccccttactaaacaatctcaaattttagttctatctatttttctctcatttcatttatttcctcccacatttctcctctatcaaacataataagaataatcttcaacttttctgaaaaaagaacttttaaaaaattaaaaatatggatttttattagttttttagaaggggaaaaaaagagtgagagaggtctcactagagcacatagttaaatgcattgacaattagctaatgtgactaaagaatgagtaaagcatcagcctctctactataaaagtgatagttacccataagagaactattataaaacaacatgggctactcttaagaatatcataattaacaattttaatcagaacaagaatatcattaacaaccatgaagtgtccattaattctgttcttaaggtaggtgattgcatttagacaacctgacttcaacacaatagtatgataactaaaccgcaacaccatagacatcgccttcaactcaaccagtaacggagaatgatcaatgaaatgctttcatagaacaagctgatgatgccattgccaagactgtcatctttggactgtgtaagaactagttcgtaccatgaaactatcagcacaatgattcaccaaatacttaacttagcctagtaatcaaccactcagttagtcattatctcttatgcataaggctttttctcctataccacatcctcccacatagtgatgtaaatatggaccagactttttgatacggcacgaacgagcctgagaggcaggaacacgactcaacacgaaaaagtatgtgcgtaggcatgacattaaaaaatatggactgaagcacgacatgacacgaaaaaatataaattcaaacacgacacacgacacgaaaaaatatgggcttaagcacgatatgacacgaacaaatatgagtttaagcacgatacgacacgaaaaaatatgagcttaagcacgacaaacccgaaagcacgac

SEQ ID NO: 382246 - DNA, 2786 bp, Cannabis indica
ggataaagaaagtcagaagccaagggaacattgccagtgaaaattaaaaaaaaatttaagactgtggaaattattttctgaaaatgaaagtgagaagaagagcaatgaatgcagggtagtagcttggtcatagaatatgtacataataatgtcttaaacaaaacaatgcttataagagaggtgtgatagagtaccatagagcacacacaatgttggcaaggactgcagcctacaatctgccacgtcaagtgggaccataatcagatgatgacgtggcaagatcgtagaggtattggggtgttgagggaaggctttgaagttggggaaagtgaagaagattggtctgggaaatggggtacagttcgtactatataatattacatagaatggcgtgaacttggtgagcgtggcggagatgtgtgagcacttcaactcagtgtagtggctcttagtagaattaaattaatttacaataatattgtcaatttgcatggccttcgagacttggtataataacaatgcatattacgttgaacgaataagctaatatataaatatactacatgtaaagatataaaaatatatgtaatatattagtctataagcatagtttgagagttacggaatgtcagatctataatataaaagccattttttagtacgttattatattctatgcacgtaaggtgccacaaatttgagagttatacatttgttgtgggtgccatctgtgcttataaaaacaaagttgggtatgctttacttttggtcttatcattcccaatgaagagaaatgtatatataaatatataagagaagcaaatgtaatcgactcgagcactatatactatactatatacctcctcggtaatgttgtatatatgtaacctagatacgagaaatgctattacgtggtgtctaatatttaatattcttattcgtcaaattaagtatcagatattatatttaaaaaatataactcactaattaggtgatacatactttacccaatagatacttttgagatatatatccctaatttgtaaggtcggttttgagtggaaatagactatagcaaaaaaaaaaatttaggtccttcctgtaaaaataaatgatattttaaaattaaattaaaaatatatatattttaaaaagtaattttttttatttagacccttaaaatgagtagaccctaaacacggccctaacccgcttatgtttaagaccgaccctactaatttggtacgtggtgaggtcttattggcgtgtaacttaaaaggacagtttgagtagttatagatatatagattgtatgtgaatgagtactgagttggaaatataacatcctatcctatggactcgtgtacttggagtaactaaagctaaaagggtacgtaataataggttaatacttaatagaagtaaaactcgagggaagagaagtcttccttggactgaatgatgctcataggcatctgtggtacacaactaaaataatatatggagaaacataatattgagagttttgtttgatatatatatatatattttttgtaacatcagaaataagatttgttgctagctgatacaaaaagatgtgttattaatgtgaagtttattttattgtgctgcagtttcagttgaaaacctttaaaatgtatacaacagtacctcaaataaaattaaatgaaatgatctaaactgaaaagctaggcaaaaatcatttcattaaaattataaatagtaatttatcatttagaatatgaaaagaatagaattctctctaaattgttactgattgaagcattattgcaaaacaactaacacacaagagtatcaatttatatactctattcaatataccaccaatgataacaaaaaactaaagaaacgaagaagttaacacctaacctctaaaacaaactaactaacttctctaactaacattaaccgttgcttaacactcttcaacatcctctctcaactcgaagaaggatactctagagagagagagcttgtgacataagaaattaaattttggcagagttagaagttttctacagatgattgtccatctgttggtatataggaaattgtgattttatgctgtgaaactaaacatagtgaacatctacttcaatgtacttggtccttaagtgaaaaatgagattagaggcatgttgttgggcaccctgattatcacaccaaatgataggggtagcaagaggtataatgccaaattctttcagaatggaaaaaaatccaaactacttcaatatcagtagaaggtagagaacgatattcagattatgtacttgagcgagcaacatctgcttgtttctttgaacccccatgttattatattggatccaaacataacacaatatccagtagtaaatttttgatcatctagattgtaggcccaatctgcatcaaaataaccttccaatgtaagatgttgtgttagtttgaagacaaggtcaagatgaatggttcctttgatatatcttagaacacgtttgcaagcaatccagtgtgcatttgttggttgttgcatacattggctaagtttattgatggcataaaacaaatctggctttgtcaatgtgctttgtcaatgtgaggtattgcagagatgcaatagtacttttatagagagttagattatgaaaaagtgcactacctgagatagcaagcttatggccaagagatataatagtagtgcaaatcttggcatcttccatgtttattgtaacgccccgatttcccgagacgtcacactagct

SEQ ID NO: 382247 - DNA, 4878 bp, Cannabis indica
ggtcgtggttcgaactggggtctagcatccgggtcggggtttgaggtctggggtctgcgtcaaagttcgggtcgaggtcgggatccgggtctgaggttcggagtttggggttcaggtccggtattcgggtctagggtcgggtgtagggtctagggtctgggtctgtgtttgggttcggttaggttccgagtctagaatccaagtatgtgaaaaaaaaatacaaaatataatatattagataaagaaaaattgttttgaaaattgaaaataagaatttgatattttttattttctaattttttaaactaattttttaaaaaattcaaaagacgaagaggataatgctctgctagggtttattttgcttgtgccgtgtgtgtgtttaaatgctaaagataatatatatatagagcattgctattaggtaccagtggtgcttaacaccttctcaaaatgtcgcgttgcgattggctagcgatactccctaaaagctattatgttaaattatatgggatccgatatttagttgaaccaatagcgatattaacacgtaggagggtgctagccctttagcatttctcatatatatatatatttaaggtgtttagggtttcttggaatagtatatacgacaagaggttaatgacaatgggctgtcattttgggattttgaaccattgatagtcaacatagggtttgactgggtaaaaggactaaattgaccttgcttttgaatggttttcctttgctgtggtgtagggcattaattcctacacaatcctaagtttttccacacttatacataccaattatgttgtgttgcaatactcatatttttggcgtgatgatgtggcaataatgacagtgatcatattaaaagaaaagggtagaatgatattaatggaaactcttaattctttattttgatgttaatattggtcaaatgagaatatgccagtactccccacatgttaatgtgtagcaaaaatggtcatttgattaatgaattacataaattaagtccaactacaatttggttaattattatatatgacatgatttcaatttcttactcaatcaaatgactgtgaccatctttgttccagcttgttgttcttgctcggcaaattgtgttcccaaacccaagtgattcattatgagccatgtgaaagtcaagagctctcctcctttgctaagttgttgtgcatgaatgaatggtctgcaattaatagcagcatatgacaacatttccacccaaacttggctcataatcttccactgtgattcctcattctgtaattggtgtgcaagaatacacgcatcaaacaacacagacttgcttctctcaccctttacagctctcgatctaactttcggtttcactgacagaaccttcttacaagctttcccatgacttgaaagcttgtgcttttcgaaaaatttattggcctctgcacaagtatctctaaacactatgttccagttccccaaaactggtgccaacatcactggcttgttcaccagaagatagaacatgtaattcgaaatcaccttgcaaatattcctattatcacttccacttgattggtcatcatctttgtggccttgacaaacacatgttctacaacaacgttgagcaaagagttgccaaatgtttcctcctcctattttttggtcttcttcaacacttgaattggcctgatcattatagcatagctctgtagctaagtgccaaagaagaaggctctcagcatattggaactcacctatgctccatttcagttttatatagcttgaagaattctgtaacagagcagcctctcctctttctgaacatgtctctattgcatctctcaaattaattgccttcttggatttattcttcagctcttggaaaacaaaatgcttgagatgattatccactgttttccagtaagaaagtttacataacatcatttccattgtctttaaaatcccatgcttatcgacataactagccaagtcttggggtgccatcttaggtgctagacaatgactaattatgtccttttgagaaactgaccctgaccatctttttcttcttaatatagcttctggaacatgcctaatgatttgattatctttcattgccatgaaaacccaatctgaaaagattagtttaacaacagaaatggtatcaaggaggacagctccaatgaaaagggcataagtgacatcaatttcaaacttaccaaaaccatgtttttgagtgaaaagaaaaagcaaaaaggccaaaagtgtggagcaaatagtaatgaagcgaagaaagtaaccaagttttccatgtatgacaactgccttggtgtggagaacttggtacatgaagctgagctcgtactcaaccaatctaaacgcgcgagtagctgtttcgtggagaaaataacttcgacttgactctctatctttggagctgagaaggaagccaacaatgagtcccttaaaagttccaaagaaggaatatgatacttcaagtagtttcatctcatctaaattcttctgaggtggtccttcaatagcagagatggggtcagtactaccaaagttgctaacaccaccaggcacggtcgataccatcatctctgctatggaactttgaacctgaacagaccttgttgtagagtagactagctcagcttcttggtaatcaggaccaggatttggatctggcaatgtagtggctccaaatcggtccaagcttgctagacgcaaagccaaagttctttctacaaacttgatgttccctccaataaaaactaagatatttatacaccatagtttgttgttagatagtgtcaagtagaggctataagcagctgacataacttgcaagaagagtccaaagaggtgtctgatccatagctcattgtcttccaaagacagagaagtaatgccatcagggccgccaagatgcatcaaaagaaaagatgcccataaggcaaaaaggtcatcgttgccttcggggtcagttttgttgccaaggcttttggtgattagtcctatggccacagcagcaatccagtcagctaacaagtaagatgcccaaacagaccttgagagaaggttgcttcttgatctttggcgtgaaggtgctaataatagcaagaaggcttggagtaagaggcttgtggtgatgcacactctcaggtcccatatttcccatatctttctcaccttacttggaataactggtaccatctaataatctggtgtagagtgatgatgatgatgatgataggttggctagtaacaaatgcaatcagtcttctggtataattgacttgttaaatggtggtattgcataggggacaagtctttctcttttcttttctggtgggctcccttatttttttggacttaggctaagtttttggttcccacaaataaaggtaagaaaatattttgttggctaattccaaaagcttttttaagtaagattattaaagaaacaaaagaacaaactaatcagaatcaatcagaatcagaaagctcattgggtggacttagttaccaaggggaaaaagcatcataaaataatcatatgctgaaaaaaccccaaggcactatccatacattcattcatcaaaccatgaaatcataatacaataatgtctcagaaataaaaaacacaaaacaaacaaagccaacacagcaaaatcatttttgagctataggcatgttttatcatccaagaaccattacaagaatgattgttttccaatatccatggttaccaagcaagtgacttcaagtttgcttatcataaaaacaattatttagctcaaagatttcttcatgcatgcttcaagagaatctgtaataatgataaataagtttctcttgtaataatgataaataagttttcttcttcttcttcttgcaagttattaaaatattgaagtgtgttttttcttcaggcaattatacgagatctccaatattattttttctctctccatccattaaaagttaacactgaatatattcagacaagttgttaatgaaaatatcataagcaagagaacaacattttgatgaacacacctttgtaaataacaaaagatggtttaagctttcttcttgctctcaataaaatcaacaaaatgtatactgatgttttcaaaagctagaataaatgtatactcattttcaattattggacatgtacagttgactttgcaaaaaaacaaaacacgtgtacagttgtacacaaagtaaataaaaatgaaaagttcaatgaaataataataattgattaataagtcaatacaagaacattaagatattggtcttttttaattagttgataggttagttagtctaaacaaatcatgcaaataggacaaacattcacatataaagattatagaatcgctagctaattatagagcgtcacctcttagtgtgcatctattaatttggcctaaacacataaataaatgcaatgacttcaatccaaatcgattggattttgagtatgtttgtaatctgagtctctgtttaaggtaattatatttttaaatatgcacatcttttgtgtctctttcttggtacttcttattacaggtatgtaattcatatgatatgaactaatttaatgcaatggttattgcagatataagaaaatgggagatgaacaatcacaatcacaaagcttgggagatgagctatgggattcatggaatcttcgagcttgtcttataataagcctctccctacaattctttctgttgtttgcagcttcattgaggaaaatatgcaaatccaacttcatacacttgttcatatggcttgcctacaccctatcaaattggattgctgcttatggtcttggtcaaactg

SEQ ID NO: 382248 - DNA, 2025 bp, Cannabis indica
tttggttacaaaaaagctcaagcataacccctcatgaactcttgaaagggacaatcttaatacatattttcatttgatgacattgaaaatctcaaaacaggtcgaaaatacatgtctcattagagaaactgtttaaaaaaaagcaatgtaacctagaaattttcacaaatatcttaaatacactcgcaagatctgaaccaaaaaaaaaaaaaaaccactactatgaatcattaaaatttgctgattcaggtaatattaatgtgccacctacaaaataaaataattgtaaaataaaagtattaattaattacctgtaagaatctgtgccaatcttccacagcctctttgagcatactaactccaaccacgaaaaccaaaggagcgatcaaactaacggcgtcaaacggagtaaacggcgttagcgacagagccgcggccaaaagaaagtagagattggccactcgccgaaactgttcgaacaaggccttgggaaggaagctaacgacattgtatttcgtcgtggacaagtcgtttttaccgtacttgtacggcttcacactgtgccgttgaggttcgttgcagaagactagcctcgaaaaccccggattacagcaacttaaaccgacaaacgagttgtcgttttcttcttttgccaaaggtctagtgcatgatgagaaggagtagagtttgctccacttgatcttcttagtactgttgttatttctcttggttgaggttgaagatgatcctgccattgatgattttatatgatcatgatccagattgtaatgattacactatataaagttagcttatatatatattgatgttttttatgagagtgttgactgtttgagtaaactacggttttagaaatggggttgttaatattatacacatatatatacattggtttaataaataatggttgttggacgttaataaaaatatggagagttataataattaattataaagtagcttagatgtagtactgtctttttgtgtacctttttttaatatgtatatatacttttttaaagaataaaaaattgataacatgatatgatccggctttctggctttgtttgagttcgtacaataaaaagagaatgagaaacttccaatgtgtgaaggtttatttcaacttttcttagatcatataataaagcaggccaagcattattatgtaatatgtatagtaatttgaacgcgtaaaatcacgatattctcatatagaatttcagggtgcatggtttcaattcaaaacaatcagcttaccttataatattattacaccagttataacgcattacatacttttcatacaataataatttgaatttaataaattacaatattgattttttttttttatcaatttaatttattttataaaagttgattaaatccttattacctcatttatatattatttcggtatatgtttttttatagattgtttatcttatcttcaaagcaggaaagttgatcacaattattcacattgtagccttaaaggtggtattggatttgttgctaaaattagatcttctccttcattctgtttagttagattattatttagaattttttttttgtataaataaaaaaagatcatgtggtgcagatcccatccataccctttcaaacatttttagcaatcttgggggaccacgtgtcagctataggagtattatatctcagcctactttatttgggtcatcgatagtcatctcaagggttctcatcacacagatggcaccacctccggcaaggaccaagtcttgcttgaatccctataagtagaggggctggggtaggtttcgaacccttaacctaaacaagggtgaatcccagtaaaaacaatcttaccactacaccacacaacaggttgttggactatttagatttggtactatatatgcttcatcaatataaggctactagttgtgctctaagtgagcccatagttaaataaatttttaaaaatttataacatgttgattttgtgttttagtcttc

SEQ ID NO: 382249 - DNA, 2144 bp, Cannabis indica
cttttgtaataaattatcctcaaactatagaaataattacaaagttgcttatacgagtggctcttcaataaattattttcatagttcgatgagaattttttactcaaaaataaatcaaagggacaaaatcctacaagtgaactgggtaagaatccaatttattcaaactaaaaacatgaatagccattacatagtttcaacaaccatagagactaaatcaacattttcatatatagaaaaataaaaaagcacaaatttgagaaatgataagtaccttaattgagttcaatgtcatatcattaacaggcaaaccacccaaatccaacacaatcaagttcctaagcaaataaatatgcttaagtcctttagcagtgagaccagttttcgaaacagataatttctccaaacttgaaatagataaaacatgactaaaaccagcatcattaaccttagaacacctagaaagatccaactccttcaaactattcatccctttaaaaaacaaaacacagaaattaatcaaaacaaaacaaaacaagacatagatgaaagtatgaatattatcacatataatcatatatatatacctgaaatagcccaaagagcagaattattaagcttagtacaatctgcaactttcaaagaactcaaatacttaaaagctccaatataagccatccattctccatcaacatagttttgatctctaagatcaactttctccacagtttccttgaaaattctgagtgaaaaaacagaaacccatatcaaaaatcatacctttaaaccttcataatcgatcaaaatccaatttttagagaaaatcacatctgggtctgattagaaaatgagaaaaatgagatttttagttatgttcttcatactcaagtaatgaaggatagaggagacgacgagagagaagactgtgaagcagagcttcggcgaggtgagaaggaaggcgttcgagagttcgtttctgcttccgccattggtccacgctgtgtttgctctcacacgctgcagctatgcaaagtttgaccagttgggtcttctcctccattgccattgctttgcttggttctcaagatctgttctttttcatttcatttcttcatattaattttcctcacttttcagaggtcaagtcaaacttcaaaacgtcttagatgaacgacacttaaaaagatgtcgtttttataggttgagtaaaacctcaagcctctaagataaactacaattaaaatgctgtcgttttttcgaggttaagtcaaacttattgtgagtattagtgccggaaatactcgaaatttttgacacgacacaaaatcagcacgagcacaaaaaaatatagaattaagcacgatacgagataaaaaaaattgatattaaacacgatacgtaagcatgaataaattatcttaaaagtcaccttatgtggcccaaaaaacatcacacaaaatattaaaatactctaagctttaataattataataatatatatgtatttattaattataaataaattaaaataataataaatcttaaatataacattgaatattataattttataattaaaattattaaaaaaattataaaactaaaactatttattttatttatagaatattataaaatttaagtatttataagtaaatagttaaattgtaataaaaaattacataaatatggttaaaactataaaatatatatagttggggatttatttcagtaaaaaaaaatatgaaaggaaaacatgaatttgagctcgaatataaaaatgagctaacctctttaagaaaaataaatcgacacgaatttgagcatgacacgaaaatattgattctacggattgtgtcgagtctactctttaaacatattagcacgacatgacacgacacaatctataatttttaaggcacgacacgacataacttgtcttttaaaaatcacacaaaaatataagtcggaccaagccaactcgatatgcacgaatttaaaggcactaatgagtaaggatagaaacgaggcaggtaatacaaaaataatgtcgttttaatagaaaaacgacataaagaaagtcatattttggcagccatatataataatattaacataatttttaaaagagaaaaaaaaaaaaa

SEQ ID NO: 382250 - DNA, 1004 bp, Cannabis indica
gtttaattataatccaatctaaaagtgctatgacaaaactgtttacattttttgtatctgttcgtattaagcattgtattcaagttggttgtattaaaaaaaaagttgtcaaaaattaagctcagggtcctatttttactattttagaaaatacagggtccattttgtcatttaacaaaacacagggtctaattggtaacttttgcaaaacagagggtctaaaatggtatttatcctttaaactattaaaatgaggtataattgaaaataatcatttttaatttttagaatttagaagttgataagaagaggtagtttttatgaataataaaataagacatttatcctttgttggttcaaaatcaattagcatacaagtaaataagggaaatcttgtagagattaattggttacccaaaaaaagacttagtaaatgaatgaatgaattattggaatcaaaatggttgcattatccaaaatgatcacatgtttacagctatagaagaagaatatttatgaatgaattgatcttatttattttttatgccatggtggaatcatggagtggaccactcaattaaaataaaaccctaatcaaatatataaatattaagaccatgccattttttttttacataacaagattataaataaaattgaagaccatgttagagcatttccattaagtgattgaaagctaaatatagatcatttaataaaaaaattgggcattttacaattttgtatacattattttaattaattacaaaatatgtgcaaaaaaacttattatcattttctcatacacttttatatataattaaaaactttttttcaatttttattataatatatatatggtaataattattgattagtatatatatggtaatattggttatgtttatttttatgtttacaattataataaacatactaataatataaaacattttatatatgtgtttattggctatgtttatttttatgtttacaattataat

SEQ ID NO: 382251 - DNA, 3789 bp, Cannabis indica
tccaacaaagaaatggtgctcatatctataacctcagaaaagacttgatgaacttgaaacaagaaagtcaaactgtgagcatgtacttcactaaactgaaaactgtttgggaacaattaaccaatttcaggcctagctgcacctgtaatggatgctcatgtggtggagtcaagaagttgcaagaccattacaacatggagtacatcatgtcgtttctcatggggttatctgatttttacgcccaagtcagaggtaatatcctagtcatggaccctttacctgagattaatagagtttttcacttggtttctcaggaagaaaatcaaaggggagggcaaaatatgtcttcggatccaaatggaaatatggcatttgcttttcaagaagaaaagaatgcaggaaaaccaggtggttcgaagaaccaagcaccaaaacgtggcaggcccttttgcacacactgcaacatgcatggccatacaatagaaaagtgctacaaaatacacggttatccaccgggatacaacaaaactggtaagtcgaaagatgcagcagcaaatcaattccacactacaaatgagaccagttccagtgccaatgaaaacaatactgtgttgccccaattaactacaagccaatatcagcaattgctgagtcttcttgctgcccagaattgcagtcagcaacccactgatccaggaccgtcgacaggtaagtcaggtatgatcttgacaaattactcccttttacctgaagctaattcgtggatcattgactctggtgcaaatagacatatatgcgctgatataaaatcttttcaaagtcttcatcctattcaaccaaccaaactgtttttacctaataatgaacatctgattgtgaataagagtggtaatgtttgtcttggcaaacatatgactcttcgtgaagtgctgtatgtcccttcttttaattttaacattatttctgtcagttgtttaacccaagatgacaaccattctattaagttctatgctgataaattttacatacaggaatcacaaaccaagaagatgattggcaaaggtgattcgaataacggtctgtatgttttggatatcaataacgtttccatcaatgccttcacctctgctgaagtttggcacaaacgattaggacatttatcgaataaacacttagatttacttcaagatactttgctttgtaatacaaagaatttgcacaataatgagccttgttacatctgtcctttagctaaacaaagaaggctccccttccctaataatgcaaactttacttctaaatgttttgatcttatacactgtgatatttggggcccttatcatgttgcttctcatactaaccacacatattttttgactttagttgatgaccactcaagattcacttgggtgtatcttctcaaacacaaatctgatgtgctttcgataataccagagtttatttcttatttgcaaactcaatacaattgcatttttaagcgattcaggtctgacaatgcccctgaacttactttcaaagacttatttgctaaacatgggatattgcatgattttatgcttgaaacccccgaacaaaacgctgtggctgagcgaaagcatcagcacctccttaatgtagcaagatctttatttttccagtccaaagtccctatcaaatattggactgagtgcttattaacagccgtgttcttgattaatcgaacgcctacaccaaacttacaaaagagaacaccttatgagatattatttggtaagaaaccagattataatgatctcaaatgtttcggatgtttggcctttgcttccactatcacttcacaccgaaccaagttcgaaccaagagcaagaacatgtgtttttcttggctatcctcgaggtatcaaagggtataaattgtatgacttaaacactcaacaaatatttgtttcaagaaatgtgatttttcacgaaaatgtatatccatttcacaaacttaatactactcctcatacaattgatcctttctcactccttgttattccatctccacatgttactcgcacacacatcacggattatcacacaccagaaaccagcactatttcgcctaactcgttttttcaggatgaagttgctcctgctcaggaacgatctgctacagaacagcctgcaacttcaaaccagcaggactttatttcagatcctgctccaattcagcaacaaccgaattctccatctcaacctcctacttcaccaagaagatctacaagagtttccaaaccacctagctatttacaagattttgaatgctataatttgctacaggataaatcaaattctgcttatccaatttcaaaatttatttcatactctaagctttcaaaaacttataaggcatttatccttgcagttacagccgaatttgaacctcaaagctacaagcaagcaatccaattcaaaagatggttacaagcaatggatgctgaactcttagcactaattaccaacaacacttggactgtagtaccacttccctcaaagctcgattagttgctcaaggttacacacaacaagaaggattagacttcttcgacaccttctcccccgtcaccaaaatggttacattcaagcttctcttggcgattgtcacaataaaacaatggcacacattacaactcgacatcaacaacgcatttttaaatggtgatctagaagaggaagtttatatgcaaattccacccggactcacacttccatcttctggcacagggaccaaccttgtctgcaagctacacaaatcaatatatggtcttcgccaatcctcgcggcaatggtataaaaagctcactgacgcactcttacaagaaggttttactcaatcccaagctgactacacactcttcacaaagggatctcataacacctttattgctctcttggtctatgtcgacgatattatcatcaccggtcccaacattgacattcttcatgctctacaagattctctacaagccagatttcgactaaaaactttgggtcccctcaaatatttccttggctttgagattgcccgagccaaggctggtctgtttttgtctcaaaggaaatacaccttacaactcctccatgacacaggttacactagtagcaagcctgccaaggctcctatggatccaagacaaagattggatgataccgaaggagacatcttagacaatccttccaattacagacaactcattggtcgattactctacttgactctatctcggccagatattacgtttgctgtcaacacactcagtcaattcatgtcctgcccccgaacgccacacttgacagcccttcaccatctccttcgctatttaaaaggttcacctggccaaggaattttctactccaccaattcttctcttcatctccgcggcttctccgattctgattgggccacttgtcccacaactcggcgatctaccaccggtttttgtatttttttaggggactgcctcatttcctggaaaactaagaagcaagctactgtatctaaaagctccgctgaggccgagtatcgtgctctcgccgccaccactagcgagatgacttggattcaatacctcctcaccgaccttcacatcgcacaaccaacaccagcttttatttactgtgacaaccagtcagccattcacatagccaacaaccccacttttcacgaacgaaccaaacacatcgagctagactgtcacttcattcgtgagaaaattgccaactccaccatccgactcatacctgt

SEQ ID NO: 382252 - DNA, 2396 bp, Cannabis indica
taaaaacacttgtcccattctcatatctctattgataaaagtctttgtctcccatacttttcacaaatatggaggagattgccatgaaaaggctgagtcaaggcagtaacccaagtgcttcaacacatttctgtggttgctcatctgtgatgccactgcaacttcatttgcaatcattttcaagtgtctttcgttgttaaacgttggaaacaacattttcaccgaaatttcataacaatcttcatcttcttcttcatcattaacaatcattttcaatacctataatgtaattatgtatatacaataattaatggttacatacaagtataaatggaactaggcaactggataataatgtgtcttcacaaggaatgcaaatgtttcactctctggatagcttgcttcactttggtgagcggttcatcatacaagatagcagggttgtcaaactgagaggccaagcttggctctcctagaaaagctctgaatgagtctgccacggagtacgaaagagacttgaggttgtaacctccttccaagaagaacacacagcgaccaccacatagatctttcgcaagttgttgaatgttggatgcaagcatgtaatatgtccctgttgtaaattgtaaactggctaatggatccagtacatgagcatcgtacctgaccaattaagttgcaagctagcgagtgaatcttgtgtttcacaagccactatggtaaaatgattaaaagtattcataaagaatatcatgtatattgaaaactcacccagcggagacaagaattatgtctggcttaaacctctgagcacaaggtacaatgacttcatcaaacacagtcctcatggcaatatcacctgagcctcctggtaaaggtagattgagagttgctcctaacccatctccttgacctatctcatcaaatttaccagtaccagggtagcttccattctgtattgaactcaagcaagaaataaatgttggtatataataccattaatgaatactagatgatgattttttgaccatataccatcttattaaattttcttatttttaatttactcaaaaaacatttcgtataaatacttcaagtacaaaattttaatcaaatctgcttgattaataatatacatccatttttttaaggcttttcttttttaccaaatcaacaactttaatgaaaacaacatcagtactaacctggtgagttgagagaaaaaagatatccggatcctcatagaaagcatcattagttccatttccatggtgaacatcaaaatcaattatgaagacacgctttaagccatgtacgcgttgagcataacgagcagctattgcaacattaccgaaaacacaaaaccccatcgggccttttgggactgcatgatgtccaggaggtcttatcaaagcaaaacctgtagtttgatcctggtttagctttgatgcttcaacctgaaacatgaaacagaattatgtttgtatatcatctatcaatctttaagctcaaacacagtctaagaaaaaaaaaagtgaaatacaaatacaaaatattatatacattcaaaacaaattgcacttaaataataaccactgaatcaactatggcaagtcctgctccagctgcagttagtgaatcctggaatgtctgcaccattttacatcatcatcagtataaaggaaggaaagttaagtcaggttgctcatgcataaaactacaaggatgctatatattcaagtaaaacttaagcatgtcaaattacatttcaaattcattaagaactctcaaaaatgtgtgaacaaatcattttctcaatcaaacaagtatgaaaaggagagagagaagaaacatcaaaataattgtgcttacatttgcagtagcatatgttggtccagatccctcaataaatataatgccttgttgtgaagccttatccatagcctgcaatgagtggcaaaaaccatttaagctaaaacagaatatatgtaagctcaaaaaagaatatattatgcatgggtaagtaccttctcaaggcctgatacataagctgtagaatgaacatttgcaatgtcatctactgaagcaggcttgaagtctttaagttgaataatttctgggccacggaactgaatatagaaagaagcaaaaactatcttatgcttatgactgccaaatgttcaggccttaaatttgtgaaattactgctataaaatctacctatcacagctaggaattactggctgatctagtccactcaaaagctgttacatttaaacactttggaatcaatataaccaatcaccatagattcaccaaccactactacccatgatccttcttatactcttcttatttatttcaattcaatacctcttgatcctcatagattttca

SEQ ID NO: 382253 - DNA, 1051 bp, Cannabis indica
ttttgtatgatttttattattttatattattaataaattatcatatgaacattaaataacatattaaattttccgtcaagatttacatttatacattagggtataatagtaaaagtttatgcaaaaatgtcacacaactattatttgtaccaaatatagatcaacttttacatctcccattagagacggtcttaggggtgttcacaataagaatggtgcaagttgtaactctttttgcgggttgtgaccattttttcaaaccaaaccgcatatggagttttgtaatttctcatataataaaactgtaaaaatccacattgtgaaaatacggtgtggattataataaaattaatgtaatgtacacatatattatatatatttattcttttatgaagaacaataaaaatcatattataaaaattagtaactttataatatatgatgcgatgcggtttgatccataactataaaattcaagtgcaaattgtactatatcgtgcaattttgtgaaaatacaaactacaaatgcaccgtaaaagatttcaaactaagttttttatgagatatggtgcgatgcggatgatttgtgtggtgtgagcaatttggtgaacacacctagcaaaaccaattttaatagctttttttaaaagagcttaataaaataagttaactactttggttgactcacataaaaatttaatattttaatgaataaaaaataacttaaattagtttaagaaatactattttttaacagagactcttaatttaatttttttcagtgtattgggtggaacacattcaacccggttcaaacctaaactcgaaattctctaaacacccgaactcgatcaaacccactctatgtgcaccaggctataacaactaagagcatctccaatggtagcatcatttaaggatgttaaaaatctccacatcatctaaaaataatattttattttgtctatcttccacatcatttttgacacttttatttttaaaaacactccaatagtataacactcttctaaaatgctataattatgatctc

SEQ ID NO: 382254 - DNA, 1604 bp, Cannabis indica
acgaatactaaattggtcatttgcatagtgaagctcttaatgcttggttttaggcttcttcacaatcatcacagagcagtgagcatggtgagcacaatagtcactgacactgcccaaaacagccctgcagtaatcaaaatctcatggtcaatatgagtaccatatcaatctccgattaccaacctaaatgcacactaaactaatcattgtaatgtgtttgacagccgaaaacgacaatgaaaacgcttttgacaattgataaaaaaaaaagtgtcttgtttatgtggttctcattagtcaagatgacaacaaaggctacatattatatattagtccgtatacacactaaactaatcatatagtagttggtaagattacctctttattgctccatagccatgactgcccacaaccaaaacagatgcatggtgtttctctacagtttcacagaggacattccgagcatcaccttccataacctccaccaaacatcattcacctacaaataatgcagaaaaaatatcatacaaatatcctgaatcaactataaattcatgaatttgttaaagccccataacctaatgtcttgcaaggatatgctttcagcaaaaaccaaactcaatccaatcaagtacagaattattcttacaatttgagtagaattttcctttgaagctctttctaatctatctacttatcaaacttattaatttaccataaatttccaaaataaatgtcattttccatttgaattcaaaagaccatctaattttgttcatttccctcctaaaatccaggttaaaacaaggggctaaaggactccagtggattgtgtaaataaatatcaaatcttttatcaaattatctgattgcagaaagtgtgaactaattttaggcagcatatatcaattatatccatgattacttcataatctgtatcacagaaatcaaaactgagctaatcatcatggcataaaataaatttatcaaataccaattataaatttccggaaaaataataccaactacaaatgttattgtttcaaaatcaatcacagaagcgaccaaattaatttcaatctggcctaatcaccaattcaccattacgaactactattaataagcttttaatcacaaaaagaattcataccgatttactggcgcaaacttccttagctttctcaacgactcttgcagcgatcctcctcaaatcactatcgacaaacggcaagacctcagccgcgcctaatttcgccatgacgaatccataagtcagtatcaaaatcacacaaacaaaacatatggaaaattcagaattgagctataaacaagaattaaagcgaggttaccagggccagcgagaccgacggcggaggttggagtaggcttagcgtggacaagaatgagcttaaatggaaagttgggagcataggaagcaaagaagcggtctagagtccattgtagagcataagagctgtggtcgctttcgtcaattccaaccaccatgactggtttctcagcggtagccattgttaaacctttttcttctgcttatgttttttccgtgatttctccagttgtcaactacatcacgaatatatata

SEQ ID NO: 382255 - DNA, 5736 bp, Cannabis indica
attcaagcgcttaaatgattgattgaagacttgtaagattattattcaaaattcaaattgaggctctatgtaggcatgtgtaccagtgtagcacttggaataatggaatcaatgggaaatttcgcacgctgattccattttattccaagtacaacaaatttctatataaggttactttaattacactcaatatacatatggaactttatttatctctcttccatttgaatctcactaacacgttgttgttatattccttcatgtgtcaaatatgtaatcaatcaatactaaatactaaatagtaaatatgtaatcttttcttttttggcttactatgagacttgagagtgctctagttaaagcaaaattagttgctccattttaatgttacattcaatagaaaggtctaatcactagatcagtcattgtttgtttgtgaagataacttttatggtagctcagataatttgcagcctttctatgatgagcttgtcaagtatcttttccttttgctgtaaaatgcagcaaaagtggaagaaggaagctccttatagtacagtgcccttgatatgatatccatatgtatattcttgccagtacaattcaacaacattccccaactagtagcggttgtggaattatgatgtttcttttattccccttttgaagcagtacaattcttaatatattaagtattttgtaatacatgtttttaagtctcaattctagaatttctaacaggtaagtggttagaattttcacgtgggaggaattttatatcagaagccattctattcattggaggtttgaattaggagccataacttatattaaagtagtaaactgtaaaagataataataaaacaaacaaggtatagagtcaacagagttgttagttttgccaagtaagagttatcatcttatgtcaataaacaaggaagagacagatatttcaataaacagcttggccaactggcaaagataaatctatggcatccaaagtttacaaattctatatgacaaaagaaaagattcacaaacattgatggaaaaaataaaaaaggacaaaccaaagacagagagcatctggaatcagcgtggtacaatgaagaagagaaaagatttagtcaaggtttgaaactaaaaccagaccatcttcttgttccctcttttttcctcccttgaatgctggaaccaagaagattttccagcgatttcgcctttctgttgcgagaccttcccacttcacgtaaaagctgagttagccttttcttttcatcatcaacatctggatttgctgttcccagcttgtcttccctcaccctcaaaatatactccaatatctcaattgcatcttctaccctgcaacaacaaaaaagaaatcatgtttagctgattcggaacaagaaaacccgaacacccagtaacaatcagccagtgctaactcctgctaagatcatattttcacagaaaatgaagaaaaaaaaacaaaaaacattgaaatgttcaaacttgccttcccatggcatcataagttgctgcaagattgctatatactccgagtgtatccaagtgacatggtccacactcctgctctaatatctctcttgcttcttcaaacagttttgtggcctccttatttgtacagctgcactgaagctaaccccatctggttcaacacaattccaaagaatgctgatttcctctccccgctcgcacgaagcttacctatagcactctcaaatgaatttcgagactctgaaaaccttccaaccatgtagaacatcacacccatctgagcttctaatcctgcaattgtgccacggtgagcaggcttatcctccaataactttattgccttctgcaagagtctcagaccctcctcgggctcattcacagcttcatagatggccgcgatttcagtcaaaccagtggcaatttcctcagatgtaaatccaggcgaaggttttgtatatattctcaacgcattctcacagtatgatttggactctctcaactttccggtcctgtaatagtcagcaaggcgaacaaagattgaggccacagaagagtgattttcaccccttatggatttgaataccgtaagagctttctggtaagcaaaaacagcctcctcaaagcgacagagggacaggtaaatgttgccaatgctgacatcaatagttgcaacctcgttgtcttgtccgttggctatcattaccatactagaaagaacaagatgctcaagggcagtgtcataatctcccttagcctcacagacaagagccataagcctgcgatcagctgcttcttcaagggatgccggttcactgtgcaacctatgaatttcaagtgtctttttgcagaagttctctgcctcttcaaattgcattgcttgcatatgtgcttcagcaaggtacctttcattccaaaggaaaaaaccaatgaaagtgatcatcaaaaagacaaatactgctaaaaaaactttaacctgaacagtaatttgcaacttaaatcaaaaggcaaaagggattatttttgttgtccaaatctttgatgccaacattctaaaaatggcgagcgaagatattatgacacaacactttttcaagatatggtaaaaggaataaacatttacgaactagtatttacacttatcaatcccaataaatattcataaagagttgtgctgggaacatgcggacccactaccaaggaacaatttttctacccaataacaataactaccaagaacagaacataaatgtttagctgcgccaattaacgacacccaccttatctaatcccgaccagattcgaaacacgcccaaattagtattagacatcggccactaaaaacactgcaaattaattaaaaaaaacaaaatcaaagaactttacctgtaagtctctgcaactcggggatccgactcacccaaagcttccaattggattttaagacccgagtcgtaacaggaaatagactgctcaagctgacccatgattgaatacgtgtccccaagctgcatgtatcccgagaacttggccaatgcatggtctaacccgctttctatatttgggacctcaattgaccgttccagaaccggaatcgcctcctctaatcgtcccaaactactgtaaatcgccgccacaacgtgcaagctcatagccaactcaagactctgaactacagggctccgctcgaaagacttggaagctctaatcgcgtaatccaaagccttgttcggactctccccggaagaaatcgtgtctcgggctagcttcaataaaaacggcccgagatccggattgtcgagtgaggattcgtccacgggtagcttttcagaggtggtttttctggtagtgggtcgggtccgtaattgattggaagaaggagacgctgacttgagatagccattggttccattcaaagactcggtcttcttagttgggtctggggttcccgatataaaaatgggagatgggttcgacgaaattaagcccggcatggctgcaaattgtgagctcagcctcagcaatcactctactcagtcatggtaagaatatataacaaaatacaaaacgaaaagaagaaagatgagatttttatttttggtgtagtgaatgaatggggttgttgttaataataagaaaaagtttaatgatggtggtggtgatggtgatggtggtagtggtggtgaggatgatgaagggttgcgtggaagagactcctcatcatcaaagagttagggtactttaagttgatgacgagctttagaatgaaaaagggaagcaacagtgataagaaatccatattctctttctctcccactcagctctcagctcttagctcagctaaactctctttctttctacttctttttgctttctctgcaattttttcacctcagctttggtagtggtagaggagcgtgaccattacacttggtttcgctctcttatgttttcgacccttaaaaccccttataattacatctttaacattgctttttctttttaatggtaataaataaataaagcaatacttttttaataaagtttctcttccatgttatcaacatgagtgttactttagtgttctgcagaataatttagaaaaaatgtcttcaaagaataaatctgttttagttagtaagttcatttttactgcacacttaagtacagatgatgatgatgagtgttaatgtgattatgaggaaaacgattttaatttttacaagttagataatatatacagtatacactaattgaagactttaggacctttgtatacgtagctgtatctagacttattacagcatacaaactcctacaatgagttatgactaggacatcttttgatttcttatatggagtgacactggaggactacgtagtttagtcaatgataaagttgcattacaggatcaaactagaagaaaataatgattattattattattaagtctctaacaactggtcaatttcttctgaaattaaataaataaactactggtcaatgagggcaatattggaacatgatactatagtttctgtacttgagaaagttcacgagctggcttgtggtggcaacaaagatgattgcttcctaccattatgacatgacaattttccatttcattttctgcataaatcaacaaattaagaatggttattggttagttgtcttaatttaatgattcctatttaactctttgaatcaagttgttaattagttacaaatttctccctacgttacttaccaacccaatacatctagtcgaaatgtgattagttacaattttttttgtctttaaattttgttaattagatgattatttttgttggatagataaaattaagaaaaagtagaaaaatcattataaatttgaaaattttattttctatattactattttgagtaaatacaaaaattaaaaagacaaatttgcgcatccggggaatcgaaccccggtcagtaccgtgggagggtactatgataccactacaccagatgcgccttgctgttaaggtgattattttttaattacttaaccgtgctaagaaaatgtagttttcaaattatttcatttttttttggataaatttacacataattaacaaagcaagaaatcacaatcggcagtgaaatttctttaaactacgatacctcattgtctaagcaaaggtagggacggatccactacactagtacttatgtgggggctatactaacaatatttaaaaatattgtcttttaaaaaagtttttttaaaattgataattatagatcaaaatagtagaaaaattcttacaaaattaaataaatattaataagtatgaatatttttttaatgataaataagtctccacgaaaattttgaattcatcactaattaaaggatatattttaccaaatcataaacccaattaatctaacattaatatctaatgtagttgagttgatatatttagagaaatgttgatatattttgaaactgatgtacctattactccaatattttatttaattatttttttggaaaggacttcgaatattttatttgtagagagtgaaatctacaataaggaatttgggcaccagcaacctgtcaagaacaaagagagagacaaaagttcaattgggagcaccggtggggtgtcagccaaagggactccgacgctcaagtcagtacgattatagtaaaaaattataataacggaaaataaatgtaa

SEQ ID NO: 382256 - DNA, 1616 bp, Cannabis indica
taacctgtgaagatgagccaagactcttagatcctcgccagacaacctcaagggtcttgtcattttttcgcttagctctatcttggtagtcaattctcccaaagaaaaaagagtcaaatccaacctaagaaaataaaaaagaaggcaaaagggattaaaagatttgtttatagagacactttcctcacaaccataacaaccatacctcagctcctaacaggtaggcttgtacggcagaatgaccaaatggatcaatctgccaaccaatcctaggagtgacattaaactcagcctttataaagcgatggccaagagtagtctgatcaatcatatcaatgtaatgagttgcagcctcatcgtgcatgcacatacccccatttctacacacacccaagaagaagaagaagaagaagaaaaagccaaaacccacacattaaatcacaaaaacaaaacatatttacagttgattattttattatgtttagtaagtacatacatgagctctagttgaccagagttgactagtttcttgactgtgcttttaacaacctcactctgttcatcccaccaacgctggaaaaatgcctgtcatttactaaaacagtaaaactcatttagaaataaaacactacaatcccataaatatatatatatatatatatatggattggcttgcctgttctacgtaaatgaacttgcgattcttatcagccaacagtgcgggaactaatgaatccaacacgttttgaacacaagcatcctgttgttaatacttcattaataacatcaatattacattatatataattataataatagtaataaaacatgtaatgacctgaatggagttgttggagccaacatagtactgatcaatggtcttcaaccatccaacatcatcgtgagtatggggaaccaaatgaacattgatctttccattaacaatagtggaaagtagtgttgtaagcaatgaacttagagtgtccagtccatgaaaacagagctaccgccatgaacaacaacaaccaagctctgatcgccatcatggaataagtaagtaaagttaacaaaactagctcagatcagatcagaccccaattgggttttcattactatcgcttcacgagtgaaaacagagtctctctgtatgtatatatataaggatgtatgtaccaacttttctttttcttctttctttttcaatagtaatgttgtcacttactacttgttcgattccaagtttcagaatagacaaagaaagaatacaaaatcactgcatgatcgatactatactatgtggctaaaactgaaagataagattgaaattgaaacatagatggttttctttttttatgtggataaaaacaaaaggtgtgttgtgttggtcgtggtcttgtcttggtcctgagtttggtcccttactctgatgatttctaggctaggtgtcttttttttccacttaatcaaactgttcgaaccaggaagaatactataatcgatggtggtggggtcgatcggtgttatcgccagattttatttctttcgcttgttaattaccattaagttaatgttgagtaaactgctagcaaaataaaagaggaacgatattaccgaat

SEQ ID NO: 382257 - DNA, 863 bp, Cannabis indica
tatggatgatcaaacaattgatataccaataactatacattgatctagctacataatttttcagaattttaatacgtatttcatataaaaaattcaatacatggatcatttattggccgttctaatatagtaagtttgtttatatgttggttgagttgacgttgacttaccatgtttttacgattgattcttaacttgaaactaaaaatcatagtcaatcagttcaataatagtattctacgttttgttagcaatatctgattgcatgcttcgtaaagtgattgccaatacgttatttacggttgttgaatatttaaatttattattgtaagtttgtttataaattatttttggttgagttaacataaatttacaatttaatccaaaaattaaaataaactcatttcaaatacgaatgattaccatcagaatgagcttcgcaacctttctcatgaggtatgttaataccaccaattatcaaaggatacccaagctccaatcgataaaggtcaaacacatgaccaacccaaaaaggaagagcctttaagggagtagtagatacctcagacagagtttgcctagcgtccaaagcagttgtcgcagcaaccaatacagaaggcaaaatcgaaagcgacgttgtttttaattgtctcagaaatgaaattgaggacgatgagaagagatttttggaaactacgctgtaaaatgggagtgattgaatgatttgggggaggtattggagtagtatggtggaagagtggaagcacagagtggtgttgccgccaccaccacggccgtcgaaggtggaggttcgtgggtttgtgggtttgctttctcttcttagctatttgttaatttttttt

SEQ ID NO: 382258 - DNA, 5574 bp, Cannabis indica
ggttgttcttatttttttttcttatcatttaaatattattactttaatacattttattctttaaatatcaagttgttgtcacattcaaaatatagagaatataaaaatatgtgtgttgacctatgaaattagccaacgggcgtatgtatagaatacgacaccttttgaatgataattaataagcaaaaaagagtaccaagtaataattatgaaaaacacacaaaattgtagtggttcggccttgcccaaaagtatagtaacaacctactccacttgagatttcttattgaaataattaagttagcttgagtaatcttgattaccacagttttggtcacaataaaaatattgaatacaagagtcagagaataaaggctatcactctatcacaaaaatctcgatccccctaaaatgaatctatgtgtcctttatttatagtacctagatgctgttacaagtttaaacgagaaagaatcatggtccacaatctttggcagtggatgtgtgtgtccattccctcttgatcaggagatcacagatctttctattgtcatctttagatcgtgggatcataattgatgcttcacgatttattgcttcatgaaaagatgctaactgtattcgtacaatgtacaattataggtcatgcaacctaaggcctaggtaggtgacctatggaatcttggtgttaagacttgttttctcttcaaaacgcatataggtgtgtatggcatttgctccatcctacacgagcatgaatatctatccataggagtaactttacttttaaatgaatgttgagtcttggggacatgtaggtcatctatttcaatctctttagtcatttagccaagcacttgggcaaagggccaaccacccaaggcatagggccaataacttggagcataggaccaaccatgtggggcataggaccaaccacttggagaataggaccaaccatctggggcataggaccaaccacttggagcatagggccaaccacccggggcatagagccaaccacttagagcatagagccaaccaagagagtcaacttctgccttcctgtttgtcattctttctaatttttaatgacatgttccacctttttatttgccacgtcacttctaaatttttgagggataatatttcctcccccctccatcaaagtttattgcaatgtagccatcacggtaaacttgacttgagtatgaaaaacacattgcatgatagcacttgatcagtatggttggaccttacgaagtactttctcaatcattgacatgtcttcaagatatttctaaggatccaatttcctaaaaatattagttttatttttttaaaagaaattattcctaaaaatgtgattcgtttttcaaggaatttcttattcttaaaaagaataatattttttaaggaactatccaatccctacaaatatttatatatttcaagaaaatatccaattcctaaaaatataatatttttgtgggaattcgaattcaaatatgatatttatttttcaaggattttttttatcctaaaaaataagaaatttcaaattcaaattcaatttctgtctgcctgtaaatgagagactcactcctcatacacctcatttattacatccttggtaatctgagagagggaattctttaaaaatgtagaagcctctacgtgtaggaggttccttgtgtagttggggtttggcatctagggtttttggcataaggagcccaaggttgattgtaatcggcttcttgaggttctttatctgagtaagctttttttttctcttaatctttacaatatttaattataatgtgcataaaaagagaagaaaaatcttacaattaaattattcccaaaaatatcatttttgattgaagaataggttgatttttttttttttttgttgtatatgctgttcatgacactaaggaattaaggtttaggtgatagccttaggcatattcatatcaaactcacaattcttgatgaatgtcatctatgacccatctatagtaaaatgagtgtaactggagttttacatatctgattgacaaaaactttataccattagaaagatattttaaggacctataaaagttatgaagagagtgtctttaaactcatcctttaacattgtcgaaaataaatgtcaagtaacacattctagaagttgtgaaaattcactctccatatttttaagacaataaattccaacactcaatgatctttgtagatcaccttggccataggtccaagcactttggccatagagccaaccacctttgtcatagaaccaatctctttaaccatagtgcaaactaccttggtcataaggccaaacacttcaaccatagtgctaactaccttggtcatagggccaagcacttcaaccataggactaaccaccttggtcatagggccaagtactttaaccacagggctaataaccttggtcatagggccaagcacttcaaccatagggccaaccaccttggtcatagggctaagcactttacccatagggccaatcgccttggtcataggactaaccactttgaacatgggccaagagctttaaccatagggccaatccccttggtttggtcataaagcaaacaccttggtcatagggccaagtactttaaccatacggccaacaaccttggtcatagggccaagcactttggtcttagggccaagcattgtagtttagattcaagtcggttcagtgagggcgaccgcgaaagtcaccgaatgggtcattcttttcctttagtttgttgtatatttaaaataaatgtgtgggaggacgttgcagatgtcggggatggacacgactgttaagagaacccctttttgtttgatatgatggcttgaaaagaattaatagtttggagaaaaggccatgcaggagagcttctgcttctgctaaggttgcttatttgatccttagaggagacctgttcaattcaacatgacaaccatagggccaaccacctttgtcatagggcaaagcacttcaaccatagggccaaccaccttcataatagggccaatcacttcaaccatagggctaaccaccttggtaataaggctaagcacttgaaccatagggacaacctgtttgtcccctaatcaaccttgattttatttgtttacccttcttattgttagacatgctctcagacattggcctattttaccatgccctttttgtcggtgtttgaaggtcattaacatggagattcttctttcaaggaagcatagtccaatggcaagagtggagcaaacaactagactttctaccgatttggatcctcctcttgttcgtcacatggttctgggttctccattagactcttctcaaaatttttacatatcatagtactcctcgagattctcagagcatgcctcaacgtagtgctccttctgcttcctgccatggaaccattaggcctattgatactttggggtatcaaaaccatgctcctacaggttctcctattccacaaaactcttctttcgagaagaacatttcacattgtccctcatgtcagccatggactataaaggttcctaatcgttaaacttcttaatcttgagaacattcttcttagaggcaaactagctctcctcatgggcaatcttctcaaaggtgggaggagcatgtttcttgacaaaataatggtcatgtttctcaccgtcctttttcttagcaggagagtaatggggtatcacaggagactcagtcttagggagttcttgtgacatgctacttatacatctggccctaagatggaacctgtatatccttttagagaagaaacgagtaagggaaattaagaagtgcttagcctgtgaagttgttgagtctcaaggtctcctggctcatgctcctcactctagttagtgaacttgtccttagtttttatcccattttgggagcattatgtacttgaaaatttattcacatatgacacttttatgcctttagcttttttttatgagtacttagcatatttatttaaaaaaattatttgcaatgtcgactaagtatatttaatcgtaaccctcattgattcaggtatcattatactttgaccatattgtttttcatgccatactaaccttacctttttatactttccacgctaacaaccatggcaatgtgagtagtattatacttcaccatgtactatgaacaaatgatcaagcctatcatcccaaagtcctggtgataggccgaccaccctacagggtttgtggctcaaccaaccaccctaaaggacatggctaggttgactatatgattctctcggcctatgtttatgatgtttttattttatgtgttttttggaacacaagttcctaggaaatttgagctttcttagtaatttaaggcatgtcctcattgcttgtgtataaccctattgatatttactacatgcccctaagtgatcatgggttcatggtcacttgctacttgaccatgccttgcttttgagcatttatacacaatgatgcaaaaataaaatgcttgtccctcattggtagtcgagtgatggtttcatactcagtagtaatgatacctatacacaaatttcatattgtctagcaactatcgatcacagttcatgtaatttctcgtatactcgttataaaaattgtagagaagtatatttaagttggaccaaattatggtcttaaagagtcttagatcaaataatcaattggtcccttaaggtccaagttcgattatgatctgatgatggtgattggtccttaaactgagtctctttttagattgaatgtatgataaatctgttaaggatctaaattgaacatgatccataatggtgattggtcctcagtgttgtctctcatttttaaatgtatgtttcaatatatccctcgaggactaattatgattaaacaacattggtgattggtcctaaaaccagttctcttttagatgttaaggagcaataggttccatcaagggccagaattaaacatgatctttaacattggtatttggtcttagaaccagcctcttttaaagatcatatggttcgataagtccgtcaatggcaaaaataaaacatgatctgatatgttcgacaggtcatcaatctctttgttaggattgtataggtcagtcagtttgtcaagagtcaaaattaaacatgatccaaagggatcaactcatctagattgactagtctctttttgaaaggaattaaaaaagttaagtgagatacttaaggattaaattcattcattgattataagcacaatggctatttgaaacaccctaactaacataggcgtattacgtgctttttaaacatgttgtgcagctcgttgctaatcaaagaggtttatggaaaacgtgattaattaaaatttttgctttttaattaaacttaagaaataatattacaaaagactcgggatcccgattacaaaatcatttacaaaagatttaactgtttatacaaaataaatgtcgcctagcgaccagttacaaaatcagcctcactgtcccgatgatcgtacgct

SEQ ID NO: 382259 - DNA, 2028 bp, Cannabis indica
ttgagatcaatctttgaacatattaagctttaagacataatcattaactttatgaagaaatgaactctcacaatcactattttgaaatcatagttcaaagcttctcaattattacatacccgagtctactaacaaccataatatgcatcattaactctgctcctttactagctccaaggcatacaaagcagagaccaatatcttattattcactaactaactactcacagatttggtgttcatagttcatactgagactgaagcagcagtagcagcattggctggaacaaatttaaccgaaacgctattcacgcagtgtcgttcatcggttggagtttggaatccttctcctttgaaaacatgtcccaggtgaccaccacaagctgcacaagttatctcagttcttctcccatctgggtcaggctaaggaaaagaaaacacaacaatgtcgtttgttaattgcattgttaaacgacaatgactgctcaataaacaaccaacagacacactcacagtgcggtttatagctccaggcagaccctcaaagaatgcaggccaaccacaaccagagttaaatttggtactagctttgtaaagtggtgtaccacaaccagcgcaatcataaattccttcttcaaacaacttgtcgtatttcccagtgcctcgttccctacatacaaatcaaaaaattaatcaaatactgctgacaataccaagatcgaagagcagaatttaagttagattttcagtttaaaatataccctctttttaactcttcacaactaaacatacaatacttgagtgggagactacaaaagctataacaattattactagtgcccatgaagactttaataaccacattgctctaaataacgtacccatgctcaaacatttgacctataattcttgtttaaaacattcacaatttaatagtattgccacaatattgtgctaattgtaatagttttccaattcattgaattgagaattgaataattgtacttgtagaacgctgaaaacccaaatctcagtatcacagaccatgttttcaaaataaatccctaaaccaaagaaacaaattcttggacaaagaacaactcaagaaaaacatagtcaattaattactattgtgtaatcgatatagatatatttatatataaatcttttgttaattactctgttcctttttgacgaagaatcctaaactgttcaggagagagaatagctcgccactcttcttctgtcttttgcactgggattggagcaggtgtaggtgtagtcgccatggctgccgatcttcgcctctatctgtcggatcaggattagatgttatttggatttgttttcttggaataaatacaattttctcgggaaaatgaacgtggacagaaaattgtcgtagagagagggggaggagctcgaggtgacttctaccatcattatcatttttatttattttttacatttatttttgtaatttgaaaaaaattacactacatactacattatttttatgttatactacatttttgtaacgtgaaaataacgattttctttataacaatatgcaaacaacaatctgtaataaaaaaaaatcataaaaatataaaaagaacttgaatttttataaaacataaataacacacttttagctttgagattaggtctcgtaatatttcactaaaaaatggtattgttatgggaaaaactaattttgataaatgaaagttacaatgaagaatattcaaaaatctcactccacgtatggaaaaaaatagcatatgttatatttatgagcaactctttaatagttttaaaataaacatcatgtatcttacaattctaatatattagagtaaaaacaaaaacatctaacgagcaaacaatctaaaaataaaaagtcgattgaaaaataaaataaagccaaaaagagtcgcttgtacttcggagatagtaagtcaaaaaaagtcaccaaaaatccaaaaatcgatccaaaaagtagacccaatagagttactcgtgatt

SEQ ID NO: 382260 - DNA, 2429 bp, Cannabis indica
gaaacaagacttgtattaatgcttggaaaaagaaaccgcgatgaataaaacaaaataattacagaaaaatactccaatcccttataagagaagaaaaaacatctttaaaaataatttacacttcacaacaacaaatactgtcagcaatgagatggtacaaatgtgcatgtgcatcttttggaaataagaccatacctgaataaggttgatcatagtcattagtgccaacctaagccactgaagatcagttgactcttttgcatcatcttgagcaatttcagcaatagaccgaatcaaagtgttgacaagattgggagacaatgcaacttttctagccagtaaaccaatgatcatcatagcaccagcctatacacaaacaaatcatatacttagcaaacacgattaaataaacagaatcctcgttcaagaatgagttatggcttcaaagtttgaaacatgtaagaaaagtcaaattcacattcagcaccctatgcaaacaaacactgacgcattaatatgcaatgacttaagggttagtttggttgggggaatggaatgaaacaattttgattcctttttctttcctttatagtttgtttggttacaatctaaagcattagaatgtcatttcaatggaatagctttcccattcttttgggggaacggctattcatcccaaacaagaggagaaaggccatttcaacgtacaataatattttaactagttaaattttattccattttccattgttattctaattccactcacacaacaatgtttctattactcccaagtcccaaccaaacatatgcttaattaatacaacaagagaactcatgtcaaagatggggggaagcaattatatggaatttaaaggtagcaaaaaatataataaaatggaattcatatgtggggacaaatgaaaaaattacgatccatacagaatacactacatatgtaatcccctggaacattactcgcaaagaaggaacatgaacaaatgtaaagcagtttcttatgtattatcaagacacgtattagtggtagcaacacatataaatgcttctagactattataccaaacatctatgtaaagcttctctactaagtcacttaaaagcttgtgagccaaaattagaagttataaatacgaatatgttttactagacatgacacaacaggggacaataaaaataccatcctaacaaaaagtgtatctaaacctgaccttgtgatctgaaccaccttttgcatcaggctgaagtcctgaacgagcaaatggaagaattttgttgacgaaatcattctcaggagatgcaacggaacccaaagcctcaatgacaacagctgtgcaaaaactgatcactggtctagagggctgaagcttctttgacggtgttgcctgtggcaagaggaatcaataataatggcaccaaaacaagatgtagaatcaacaatcaaatggagaaaatactcacataatggcatatagcttccaagacccccttatcacgtatacattgctgcactatatttttttctaggtggtggtgcaccagaatgttttacactgtccagaaatttccatttactatttctgcagcatcagttatttaaataaaatatatatatatcagacttcttaaaattagcatacaacaatttgaaagcaaaaaacacattaaaaaacagcctgctaaccctgtgtcaatcaactctactattcgaacaaaggcatgggtatcatggtatggtaaagaacacaaaatcagttcctcaaaattgtaaacatgaatcctgaaataaaaggaaggccacattaaaaaaaaaaaaaaaactacaattcaaagaagaagaagaggaagaggaagaaaaaaaaacacccagtaaggatatatcatgcaagcttacttgtatcttcttatcaagtactcgagagtcttgattgatgattgatgttggaaatgtactgatattaagcgcaagtacgaactaattgtttcattaatgcgattattttcctctattcccaacaactctctatccatttccctacttttatggcaaaatagatcattcctgtagttcctaaatcgctcatcaatgcttataagaacatcaagacctgaaaagtaatccatacatccattattttcaataaacaaaaatatactaaaataaattccttaaggcagaatttcatcttagaaagttggcgttaagcccacatacaaataccgagaagagaccaaaataaagagaccctgtaaagtaaataaatttgaatgtacaaccaaattttggttcttcgtataatgaccttcaaatgccatagagagaatagttttaacattaatgtcagcagtttgttcggatttgaagataacagaaggacgagtgaaaggcctcttctgctgtagtaggagtc

SEQ ID NO: 382261 - DNA, 2171 bp, Cannabis indica
tggagagtgatgcgagatgggtgaaccacccccacacagatacactagtagtagttgcaaatattaggacgataatgtacactgcattctggtggataatggtagtgtcgtcaaccttttgaatatccaggaattcaaatagatgggactacatgagaaagatttaaaacagttgcctcgaacatctacgagttcactggagacacaattgagttgaaaggaacgatcaagttgcttataatgcttagtgaagcacccgtgacagcgatggcaaacttcacagtgattgatcaacattcaacatacaatgcgataataaaccacccaatcttgaaggaaatgaagatcgtgacatcaatctaccacctcacaatgaagtttcctacacccgcaggtgtaggttcagtgaaaggaatccattccgactcactagaatgttacaacattgcagttaagatcgcagaaaagaataagtcatgtaatatgatttacatgcttgaggcaccaacgccatgatacgagtcattcagaatcaaggaagttcctcatgtggaaaagccagacctggaccccagagtcctcgattacacaaacatagcataagctactaaagaaacaattgaggtgcttattgatcccactgatgtttcaaaagttttaaaagttggatctaaactaaccatacatcagtgagaaaggttgattaccttcctcaactagaatctagatattttcacatggaaacactaagatatggtcggaatacttcctgagatcatgtatcatcggctaaattgatcctgatgtgcgaggagacaaaagcgtcagaaaatagaacccgcgaggtacttagcgctcaaagaagaatttgactgcctgatccaatgtgaatttatcaaagaatcattttactcaaactagttagctattcctgacttagtccgaaagcctaatggcttttggcgcacttgtgttaattttatagacttaaataaagtttgttcgaaagatagctttctataaccaagtaatgaacaactcgttgatccaactgcatgtcatgagctacttagcttcatagatgcatattcgggatataactaaatcctgatgtatgagccagaccatgaacacacctccttgatcacagaccgaggtttgtactactataaagttatgtcatttggtttgataaacacaagtgcaacatattagcgattagttaacatgatgtttgtagatctattaggcaagaccatggaagtatatattgatgacatgctcatcaagtttcaatacgcgaacgaccatgtcactcatctggattcattgttcaaaattttaagccaatataagatgcgactcaatccactcaaatgcatctttggcatgagttttgggaagtttttttttaatttcatggtaaatcatcaaggcatcaaagccaatcccgcaaaaataaaagccttagtagagattcgatctcctactaagcctaaagaggttcagagcctcactggtaagattgctgctttaaactgttttgtttcacgatcctctaatgaatgcaaagattttttttttccagattttaaaaggtaataagaaattccaatagactgataaatgtgaagaggctttttaggctttaaaaacgcagctggggcacccccaatactctctaagccactacctgaagaaatactgtccatgtaccttgcggtatttgattatgcaatcagctcagtgctcattcgcgaagaccaaggaagacaacatcttgtatattatgtgagcaggcatttgcttgatgccaaatcctgttacccacaagtggaatgattagactttgcactcatcgtagcttctcaaaagttgtgaccttatttctaagctcatacaatcgagtaattaactaattatcctctcccaaaagtagtggccaagcctgatacatctggattccttcttaaacagtcaattgagctcaatcaatttgatatccagtacaaattgcgattcgtaataaaaggctaatcccttaccgactttatccttaagttttcttgtgaacatgtagcaacaaactcaaaagagtgtcttgacccagacatccttgaggatacatgatggactctatatgttgatggagcctagaacagtgaagaatc

SEQ ID NO: 382262 - DNA, 2416 bp, Cannabis indica
aatatattttctttttctaatgctattttgatttttttaatttgtttatttatattcactctctagtttaatggggtctttttttttggttttcgacataagttggtagaaacttgtgcttgatttgattatattactttggtgattcggtttgaacataattttatatggtttagttctattctattgtgaattgatcatggagtcatatattcttgacaagaagtgtgcaattttatggggaaattggtttctgaaatggttttgagatgtggattaatccagccttggtatgaaattgataaaaagaaaataaaataaataaaaagtgagtattaattcagtgtaaagccgtggattactttgtagggaaggagcattctggaagttttaattatattggctaaatcaacaatggtgtagcttggtgggtttctgataatggggagttgggttcctataaaaataggaagggttacatttgaaagaataagatgttgaaaaacttgcatttttgtaaggttagtgttgaagggataagatgttgaaaactttcatttgggtacttatgtttaatgttcatgtactgtaattgcattacttttcctagatatgcatagtattaaacctgtaggcttcagcagcaggaataatggaaggcgatggacagtggattgtgtttctagaataattattgaattttaagagatgtttccagaattaaggtgagtcgcaatcttgttgccatggacttaggaatacttttagatgagtttctattatgttgcagtaggagaaccataattgaaatgtattagagcattgaaggtaaatgatctaagtggattctgctgcaaaaatgataaataaagcagtgggagtcttatatgtgatcattcattcatttgcttgagcgtcttgtgctagtgtttgtatgccatgaatgaatattcaggatcacccaaattcggtaggggttatgctttaagatgattaatggcacaaaaagagaactacgtgcacttagcttgatgtagataagggaaatatttgaaggtgagtcttataaagaccttttatatgaaaattctaaatcttttattaatttcattggtttagagtcttaatactattttcatgtaaatgagtggtttcttggtgttctttctatccacattgagttcttaaatttgttctttggctacatcacatgaaaaatatattaactgtaaagtttttaagaggccgatacttggttacctgtatcagttgacacgcattttgctctgtcataaaattcaatagagtagctcaaacagttagccctatggtttgctccggcaaggtttgaggtttgatcatctcttgagtgcctgtataggagttgctacacttctctggttaggcaaggagctagtttacaaaaactatgactaatgtggggtatatacaccagctaaataaatttatgacattggctttgttcaaatagttcagcatgaccttttccttgttatgaccaggtattgcttagtttgttaaactttgcttattgttatagacaacttagttagtatgtatatgagaggaaatggatccacttgcatttgacaaaacagaatttgttgagcgtttaagtgacgctgcattatgaaatgttgattcagaaatttcctagatcttgtaaaggaattctgaaactgggcttttttttttgtgtgtgtttggcaggaatgattcataaccggagccggaaaacatattgaatgttgtaaatttacagcaacaatgaaagagagagctcaatgaagtgccacttaatgttctgagggggttcaaatataaaatttccccaccttttgttaatcatcaccggtcatgaatattagattttatttgcttcaaaatattggagaactccaaatcattccaaaagttcatatatgtacatacattcttaatgactatcaaattgaatatatcatattaagtacatacatctcttcttttccttcctgtctacttagtaaaagtttcaactttctgataattatttgagattaaaaatgccttatattcaaacacaaccttttgtttgtcagggaggaaagaagagtggaaggaaaggggtggagggataggtgaaaagggaaaaatgaaagaaaaggagaggtggagggataagaaaaagacaaaaataaataagatcatatttatccttaaaaaataataattatattaggaagaagtaggacagtgtaattttaataattaatttaacatttcatcctttatttctatttctaattcccattaatataatggagagctactttcctcttcttccttcatattctctttcttttttttttccttcctttcatcctactctcatttcttcttactaaatatagac

SEQ ID NO: 382263 - DNA, 2899 bp, Cannabis indica
gtttttgatgcgttttgaatgagcataaaatgcatagctggaagtctaatcgttgctaatcttaccaactccgtcttcacattatttacttcctttctggcaagctcaacatctgttgcttgaccttgaaaccttgcaatgggctgcataagtaagaaggtgaaattttcaagttcaattgtaatatgcactgacacataattttatcaaatacatacatttgtgccaaaacagaagtcatgaaaaaaaaaaaaaaacctaagtttcatcataattgtagatgagggcaatgcagaacggtttccctttgcaccagcagccaaaagtaaggctgcttctccccacgcattaccaacacagagtgtaaatattgggggcttcacatacctgagggagaggagaatcaatttaagatcgctaaaaacatgatctataaacaagaccataatgattactcaccccattacatcatatatagcaaaagcttcagtctcataacccaacttttcaccaccctgaaaataaaataaaatgaaataataataaataagtaaaatattaatcaacaatccaagaaaaatgttttaaaaatttagctaattaactagtttttttcttttttataggagctaattgactagttaatacaaaagaaagagaaaaaagtgtcactgtaagtcaactagaacaaggcattacaaatcaagcacatttataaagcacgctgacatgcatacaagctggtaatttccaaccatatcatctagcagttggtttctttcagcctgcccagccagggctaagaaagagttgaggttggacaaaagttcaccatttgtcaaaattccaaagtcgcaatctaatatggtattccatcagaccaacataaagcagaatattttattctgaatagaatttaaaagataaagtcataaagcaatcaggcaattttttcaatggcacaaaatttctaaataattcaaaactctcacagatgatagagtgaaaaacatataaagcaaacaaaatactatgtaaacaaaggtcaagaaactacttgaagagagtaaacaacactgctaaccttggttgttccagtagaatttatgtaaagataaataggcttgtcagcatcttcatactgaaggtacagaaactctgctagtatcagctctgtaacagaagggacaagagacatgcccaagtacacaatccgatttttgtacaagtatgatgccaagtcgggtgggggttgctcccatgcacttcccctggaaaatggaataacctgcagagtacataaataaattttggcaaattttatgctaaagaaggttgggaacaaaatgggaactggagcaaacctgctcctagtctcaaaaaaatcagataagaatcagaaattttaatggattcgtacacagaaaatcttaaaactgcatttagctgtggcatagtctaaactacaatgacacataacgattatcttagccatagacagtcagcatgtgatagtgaagctaagtagagcttagtacaaaaagagggaaataatgaaagatgcatcactgttagaaacaaacaaatatataaaaaataatctttttaaagcgcaatggaagaagtcaaatctgctctgatacaaaccacaaatctacttaaattaaaaatagcatatcatctcctccagatacaataaacatgtcaaaatatagtgatggtattgatgctcaccctcatattccttaaaaagaaatgaaagaaattggccaatgagcctaataaatctcaaataaaagtattgggtattcttgtgtcttaactttttttaccactataagattctactaattttatggtagtaaggttggaaactccacaagcttgttttcaaaatggcaatgcagtcccagtagaacattatcacctgaccaaaaattaggtatctgggtcgatgctacacactagtcaaaccatacatacactacattaaaacccattcataaactccttacttacattagcacacctaaatcattgtcaaactatcacagattcttacatttcaaaacaacagaataatacagaaaccaattcctatgtccctccacgaaatccctccaaaaatttacccatcttatcctatgggaagcactaacatgagcatattttcccccaatacactaccaattcataatttctaagaacagataagaacaaaataatcatcatctacaagcattatccagaaaacaaaccctaaaaaggtaaaattgatgaacattgtaagcggaaatgaagaacataccatagtgaccacgcctcgtttagcggtggagttacgaaacaaagccggattgagagctgaggggcgaagtttctggccggcaaaatctgcggacaggctgccgccggcaaggggagagaggaaattagaagagagagaagctcgaagagaggaggaagaagaagaagaagaagacgacgtcgtctgagcacgtagaggagttaaggttcgggaaggggtgggtggtgctaacatgcgcgtgtggagagcgaaacgcgaagctgtggtggccacttccatagctagcagtcctttgacttgtgtgggaaagaattagatggagagcaacgaagaagataatcgcagaaatgtatttcatgctttcgtgaaacgacgcgtcgtttttctcatggggaatataattattagctactaatattttgccttcctcaaaaacgaccaattgttaaaagcaaaacatgtcgtatgatgaaaaactacatgtcgtattggaatattatttcaattttcaaatacgtttttttgagtaagtggtaatattattaaagttttttggctaataagtagtattttttttcccgaactttgaca

SEQ ID NO: 382264 - DNA, 1165 bp, Cannabis indica
ggggtaatttttttttcattttaattcatcttttaatttatattaaagtaaaattattaattcttgttgacaaaaccaaactcttaatattttttaaataatcaaagtagtctagaaaagcatatgttataagctaattagtatttacatgtgtgtgtatatatatgtctctcttgataaatatcttattcttcatgtagcaaaagaattgtgggtgtgagttgcccctcatcacaaaaatttccaatagaagcatatctttgaacaaagtattattatggaaatttatccgtacatataattataccatataacatctcatgattttagtccacaaatgtcccaatcaccaactctaatatataatcacagacaaaatattatataatttgtgattgaactattataacatagatataataacacctagagaaagttggcagttaggttagttttttttttttctctattatatctccttatagtgaagaaaacaaaaaatgcaaatcttatgaagactaattgatagaataaagttttgttatgacataataaatatgtatataatatgaagagaattgtcaaccacatacttggatatataattagtttggactttggaggagtgagatgaggatatgaatctaattattattaggtatttttgtatgatcgccaattaaggggaaatgatagtaaatatattatttccacacatgggttatgtgttatgggttaatataataataattgttctttattacacaaataatatatagttatattaaaaataaaatctataataataataaattgaagtctgatctgtcggtttggtggagttcgccagctccacatgtcaaatccaactcaccaatatttgcaagttcaaacctaaagcttacaaagttactacaataataaaaatgataattagcaattaattactatccatgtcacaaaacttcagccaaaagcacataaatccagcccattaagaataacaacacataataatttgggatttttttcctaattataaaaaaatattgtacagattttaaatattattataatcttttttactattaatttcatatattgttaacttttctatgttgtttttatatttgctttttatattgttttttattgttatttttta

SEQ ID NO: 382265 - DNA, 1851 bp, Cannabis indica
aaacagttaaattgaatgaaatttgatagaaatccttaaatctaaccatacaatagttcaggggaattttttaacggctaaaaaagttcaactcgcacctctcgcctcactcactcccttcatctccctcactcacaccaactcgtcagacactctctcaaacctttgcaatgccactttctccgatctcactcactccctccatctctctctccatctcactcactccttccatctctctctccatctcactcactcactcactcactcactcactcaacaaagcatgcactcactcactctgcgggtcgacttattattccttaagaataacaaatagaacccacaaaccaatcagctgggattctcttcatttcgatttttcttgcgccgtcaatctgctactaagccacaacagatcacaagccgtcagtgttccaatctggtgccctattttatttcctttgtcaagatgcggccgttggatgtcatagcacccattatttttcaagataatctcagttgcgggtgcaatttctgtcaacactgtagcagctccgtcatcttcgagtccctcgagcgcctagtcattgattgcctacattcgggaggtgcaatttctgcccttttctattttcgtattctttttttctataattttttttgattttagtcgatcgtttcataacatgtgcaagaattattttatttcatagaagagtgtggtgatgatacaattttgtggactagagtttctgatctgggaattacttagaatctgattacaaagccttggctgtctgagcatattttattaattttcttcgtccctcaaattttattgtcttgtgatcatttaattttttaggattagggtgtttattaatttgaattttcttttattaaaagttggcttatggtgataacataaattatcttagtagatttcagtgagattttatagtcaatgatctgaatgttacacacactgaacccaccttcaaattattatctagtcttgttattctttttttatgacataaaatcaaatttttgatagtcccacttgaacaaatctttcaacttcttcagagtcttcttctgctaagcttttttctatgatctctgacactgtatttgattggtagtatttccatacctatacacataaaatacaaaatataaattgtgcatatttattgattaaccaataagatagaggggaataaatgacatatatttacatacatgagtcactagagtttcaaaagtgtcataggatcacaatttgttgttcctcacaccactaatatctccaacacaagaactccaaagttataaacatcaaccttttcggttaatcttccttgtgctaagtattcaggagctaagtaacaaacaattaagaaaattaggacatataattgagtgttatatatatgtatgttcaaaagataacatattcaattaaaatccaaacaaacttaaaagtagtttttttactacatacaatgttcctgcaattgtaacactagaaacataactggcagctgctgaagaaaatcttgctaggtcaaaatttacaattttcggtttctatttcgaatctaataaaatgttgctagctttaatgtctatatgaattatcctcatttgacaaccattgtggaggtactctaaaccctctgctgatctaatgttgaagcctgttttttcagtctaattcgttgctcctctcagaatctaccttccacacattattagtatatatggttcaaacatgaattaaactagtattagaggctaggaaaaaacaaaaattataatcaaaagtgtaataatatataaagt

SEQ ID NO: 382266 - DNA, 2648 bp, Cannabis indica
acaagcattacaaaaatcaggtttaatattggaatgagtagatacaatagtagagagaactttatttaagataggtggggagggatggcccaacctatggtgccaaacagtagcagtcttgtgtttattgtaaacaggattgctggtggttgtaaaattgaaggcttgaggggtggcagcagagagtgtggagaagtccttggatttgggggaaggaacttgtaacttgtacaggccttcacacaggttaccccgaagaagtacttgcttggttgtcttgtccttaatgagacaacaaacatcatcaaattcaagaatgacttggttatctttggtaatttgggatatacttaagaggtttttggtaagacttggcacatgtaaaatatcttgcaaaattaaagattgtgttgggaaaatagtattaactgaacttgaacctatattagagataggaagggaagatccattacctacaagaactttagccttacccttgtaatctgcagaagtgctgagattttgggaatcatttgtcatgtggtgagtggcaccactgtccaaataccaagcatgagattgatcactgttagagttggtttcagtgatcaaggcttgtggtgattcatcactgggttgggaggatgagggatttgattgagggcctgtgaagttgatgtcgaacctgtggaaacacttaatcacagtgtgcccaattttgccgcatagttgacatgtgggtctgttgcctcctcttccacctctgtaggagcctctgcctcctctgttagtaccacgattgcctcgactgtaggagttggcacggcctccattgttggtgtttgtacttgccaaatttgcttggatattggttagagtatctgcagaaagttgctgaattcgcatttcttgactttgcagcatgaactgcacttcttgaagatttagaggttcggattttgaagtaagattgaccaccacagcttcgtattccggtccaagtcctccaagaatgtaaagaacaagatcctcattagacaaaggttggccagctgcagtaagactgtctgcgtactgcctcatttttagtatgtaatcttcgatcgactgagctcctttctttgtcgattgaaggagtcctctgagttgaagcagcctggctctggatcttgtggcaaatagttgggagaaggtattccagatctcagcagaagtttcacagtttataacatgccccaacatgttgtcagacaccgaattcattagctagtgcatgagaaattgatcaaatcgtatccactgctgataatctgaattaggaaggttacctgcaaggatttctggtggtgttgggcgtactccaagaacgtaggcatcaagatcataagctcgaagagcaacaagggcaagagctctccatatggtgtaattggttcggtccagtctcaaattcaatgggagaagattgttgttcggcaaaggaagtggtgcgtttctttgttccggttgccgtggttgctgtgcacgttcttgctccggtggatccactcgtctttcaccatgattcgacatggctctgataccatgtaagaactctgtaaaaccagagtaatggagcagagagagaagaaaagagaaacagtgaaggagatgaagaatgaatgagaatgctcaatcttaacagattggcttgtactgatatttatacagaatgtacaaaggcacagtttgttacaacagaaaaataagaaagaaaggactaactaacattctgttaataacagaaccaaaccgactttaacaaacttaactaaactactattacattatttcaacagcaaatcttttatctatatattatattcatatttgctcgttgagtccttataattagggaatatacacaaatgtttgattagtcattgggaatttggtctaagtgttctgtagtccaatccaaagttcgagaacaactaatattaggatgtaaaaaccaaaggcttgttttacgcgtttaactaaacttattacttttattaagataaataaatacgtaagattcatgaattatatgcaattgacttgtatacttacaaaacaattgtaataaacaataaaagaatccttttcataataattaattacaggttcttttgcttgtattaacatttgtagcaataactcgttaggtcacatatataacacaacaaatgataaaaaaaattatcttatgataatggtagctagtataataatatactatcatgtaataccaatacttattttctctcttattatagtatagacagtacatgatgtggtaacatacttattatccacgtatcaaatggtcatttgtttccaactactttttagtggtgtggtgttagttactaattttttatgaatattaaagggaaatttgattttttatgcttacatattcttaattttttttccctaaactcataatattttatttttttgggatatgacacattttgtaatatccctaaaatactctccatttacattaccccctctcttttcttctctctttatttcactacattgtcgaccatcgggcccactatcgggcccactatcgggcccactatcgggcctaccatcgggccatatcaaattct

SEQ ID NO: 382267 - DNA, 5992 bp, Cannabis indica
tgaacccaaaatggaacatagtgaagattattaggagttaggggaaaagaactgtcaggagcagcaagatagtgacactttgggcaaaatgccaaggttgaccttctaaaactctacccttatccccctcacaaccaaaagtaaccatgaacatgtcatcaacatgctcagacacaaaaacaagaaaccgacattgcgatgaccagatgcagagagagttttcatgagagaaggacgattgtagggtcgaatggtgtgacgcttaagaataagacttatggtggcaggggaagaactagaggaactaacatcataagtaaaaatagtagattcatcagggagaagagttaaagcattagagacagtatttaaaaactcatacatggtcgctgaaagaaaagcttttaaaacaacagtaaagaaagtgaaaagcaaagtggggagatgaaaagggcaatacttgagtttagatatatataggaagaaccaaaatccacgaataactcgtctcaaaaccgccctagtcacatccctagtcgcatccatggaggccacaatgatgaagaagagttgaagagcttcgggaatccagtcgtccgcctccaaattacaatctccaagggcatttttctaaggtaagatttgggggatcaggagtaaatgaggagaagacaaaagtgtatgatgaagaagatggaaagatgaagagaagaaaggttttgagcaattaatgctctgattaagattaatgagatgggaaaaagagtaataataacccctagagcaataaatgctatgaaaagtggaagagtacccatgatttagggggaactctaaaattaattgttgtgttcttccttttgttttttcgttatttttcgggtcactcttcttccataacaaccaaagatcattttagatctttattgtgactattttggggtttttcattttgtgtgcaggttcgattttgagagctcttacagagcttgaggaggaagccaacgagagataaaaggaaggagagaagaggttaggctgccatggattcaaactgaagaacaaggagaagtccagctagggtttcaagaagaagaagagaaggagaagaggagctcggctgctagggtttgaagaggatatgatattgtgttgctagggtttgaagaggatatgatattgtgttgctagggtttgcagctactaatatttggttctatactgccttaaatggcagagttttgaggaggactctcttgatccgcacaagagaggggattgtctattttgacattggttttatgactttggggtttgttggtgtaggggcatttcaggtattgcacaatttcgtacacttccatttacccaaaagatttttttttttttctaaaaataaaggcaaaaagaaatatgacaatataatattatagtttgattatcttgtaaacattataaaataatttttaaaaatctataacacatgccttttatgaattcttaaacccacaaatataatagtgagaccccacaaatctagcttaaatttacaatttggtagaattattccccatgtttaaatgaaattgacctctggtatttattattattattattattatttgcaagaaggtatatatattatttaatgaatgaaaatagtaacaatgggatggtgaatattctttcacgagtgattttttttttatttaatttgggaaattaccaaacacaatccaagcaactgcaaagtccagctttggcaccctacataaataatcttttaataaataaaggatacaaaagtccaattttagttttaaaattataattatcaatatgatactctagtgtcataacaaaccataatgttaatttaataccagtgtacagtgtgacattaaatgtatataatgtataaataatttaataatggtggttgccacccttctgccaaagtcacctactaaaccccaagaccattgtcttttactaaatactaatagcctctatttctatagattatcatattcacaaatatagaatcatttttggccccacacaccaagtctagcacattccaatcccatttcagagcaatttatttgaaaagggattttcagaaactgtcgttttaagctaaaaatttattcgaagccgatattaacagtttaccttatgcattgcttatgttaatatggtacatatggtacttaactcccattaaaaacatgtgtttagagttgttttttttttttcagaccagtaaaataatataaataaaatatagtagaagtgttggctagttcatcaatccaagccaagaaagaaaaaaaatcccacttaggagaatacaaatattattgaataaatgaacaattggacatctataataagcttactaagcattttgtacaataacaatttttttctgtttttttttttttttaatcttttaggcaccaataaatattattgcctccatcaattttgcaagaagcaaaattagaaaagataatataaccaattaagaaatgaaatgaaaaaatgaaacaacaaaattagacatctcttctattttttttagttgactctttaatttcgctgacctcaccatctttacacacaccaacatcgattgtcatagttttattcttctctgaaaactccaaaaccctgcaacaatttcttctgggagactgtagaaaggcattcaaagaagaatctcaaaataagcttttttgtgtcaaaaacaaataatagtaaagtatgcttttttcaagttcaaaagaccaaatatcatgaagcgtattcaagtttggcacaaaaatcatattaagaatggagaaacttaccctgttccaaagatctgggtctggctttttataaactttcactatgttaaacaaagaaggatcggccatcttccatcggcagagagggtgtggaactcgatgacgaacatattcggtaactgtttgattcttagaatgatcaaattttgtcttggacaagtaaaaaacaaaaggtttttgacatggatttctgctaacaggtcgagtattgaacgcgtatgctatgtaatctgctcttctgtaccaattcaaaaaagttctagacggcatctcaatctcacgaggtgaaaagacacctcggaagatctgaactgcaaaaccccacgaaacagaaatggtccagctcttcgaattgtcataacaaatggattgttgcatgattgcagctgagtccaacttgattggagcactgagtctttgaagtgcttccacacgagtaacattagggaaaattggctccacaatatcaaggtgatgcagggacaccaatggcgtcactggatgcgccgctaggagcccaaacaagttcccatatacatcatactgaattgaaaaaacaaaaatgttaaaatatggcaatggatttccataggaactaactaaagtggttcaaaaatcaaattaactactagatgattcgaccactattccgtactcattgattgtaatcaacaaaagtaaaatgtaccatattgtcaaagacattcatgttatgatttcttctctagttgaaaaattataagtggggagactttaaacagcagcttaggtaggtgtgttagctaagtcattgaaaataaggtttacctatttgtaattgagaacaactaagtcaccaaaagcttcaatcaaagaaatttttatccgtgatcaatgttgtaataacaaagaaaaataaaatttcagtgtgtctagaacaagaacaagtctcactttgaattagaagtagtgtataactataattttgactagttcttatctcagtctatgatactaagactatatgcaaaaaaccagtcaattagtattcttgccgacatttcaagaatagtaaaaaaagaaaacaaaagaagtatcgagtgaattagtaaagttctaagctgagctgacactaatcaaagtaagataacggcaataactgaattaagtgaacgagttacgaacctggtgaaaacccacttctttagtgagtggaacaccgagttcggccatgcatgcttgcattcggtcatcggagccgtacaatcccgggtaccgatgaatacagcggtcctgcattttcgagagagctttggctaaagggtagctaatggcgaagcctcctccgccgtaggccatgccgtacgagaagaaaatgttctgtaaatgactctccgaaaggcttccgatgtagtacatctggttatgatcgtacttccttaagatcctcaccagattgtcggtgacaaaaacggtgtcgtcgtcacccataacgaaccacctcacgtccttgagccccaaacggagtgtctccgacacgatccgcgagatccgaatcgccgaacggtgaccctgcttgttcgtgtacggaaacacagaagtatcgctcgatatcttcaacggcgggaggagttttcggtcatcttcttctccttcaccgtttccatccttttccacgattttatcaagccaaacgacacctctcattgtcttgggtctgtaccagagcttgatgtagttctttctctgactccacagactcgccgaagcagcaaccccaaaaacgacatgtcgtatttcagttttctccgccgtttctcgagatttgcgccgcgcaatctgaacagaatcagcagcagctgaagtagtggtggagctgttcttattgttgttagagagtagcaaagtagtggaaactacacggctgtggccaacggtgtagagggattcatcgtcgcacgcgacaacgcttgagtttgtgatgagcttaagagtgtaaacgacataagtgacacagacgaagagcataaggcagaaaattattttgggtaaaggtcggctttgacccattacaatggagttacctgaggaactcctcatctgatcccaaacaactttctccgaatctttatgggtaaccttcattttccaggatttttttttcttcttgtttaacaatgacaagcgaaaatcgggagattgttagaaataaataagggaaaaaatggccgaacccaaaaatttctgaatggattaaagcttcaaaagaatcaagatcaaacttttagaacaagaaatcaaagaaatgaatgaaatggagaatacccatgaattagggtagtgtttgaggaagaagaagataagtaaagtcactctatagagcttgcattgctgccaggttgcacaatgcagacagtttctgtagctatatacacacaagacaataataattatagaattcctctataattatatatagtaaagataatgggagggaagggagtttattgggtgcggtcgtttgtaaatagagcgatcgaaaagcgtgtgatgtttgttatttgacgataaattttacactattttctctcttttatgcgactggatcttcggatacttttttgaaaggagagattggcctcactctttttcgttgacctactaactcatattcgggtcggttttcaatttcacccggtcctacattaccatactatttattacctccaacataacattatataattgaaacacataaatggaagttttatttttttcaaaaaaattaaaattaataaatgtaccgacaccttcatttgcacatgaaattattatataaatatttataatagtacactcgcatttgaaagagagatcacaaaacgaaggtaaatagaattgggtgagttttatttgtactcaaatcaaattataagtagtccttctcgaaattccaccaaccatatggatttttgacaaaagcccattcattctcaaaattaaccctggcaatgttcttgatcatgaattcatgtaaaaaatccccttttgggatcaaatacacagcatatcattctcctgtaggtctatctccttagctaaaatagttggctaaattgttgagacccttctcaaaatctaccaaccctccctttttg

SEQ ID NO: 382268 - DNA, 2913 bp, Cannabis indica
attacaattatcccttccttataaaaattctatcccgaaatttacctgaacaactttggatatttctgctacatatccaaatcgagtacctaggttacctcttctactttactgttcctccataacactttaatcagtgcaattgtcttgttttgcaattgtcttggttattttttcctcatcttttgttagccgccttactttggcaacttcaacattgaaacattggatatggttcttcatacattagaaaatacattttggggactgtttagtcacgtgaggcatggtgttgggccaacaaatacattagaaaattgtttccaagatgagatggatctggagctagtcacttgaaccatttgtatatggcatcttttagcgtcaccggaaacattgatacctcaccttactcaaaacctttttcattttcattagctcattaaaggcatccaggtggtattttgggtctatcatcctatcatgtgatgaagtgttaggctctttaaaaattggtgggagctattctgcttggatttccctggtgaaaggtgattctttatcgaacttatcatcgtcccagtttgactctttcgaggctgtggaggcgatgttcatacacaagtcttccatttccttatctaaccttttcctccttctgtttagtctatctcaaaggtcttgaagcgttcatttgagcacttctatgcttctgtgaggtgcaacaggtgattcacgcctttgagaggcatgcttcctattgagtttttcccttaaatcaaagggggtggctttggccaaggtcttctagggttcaaaagagtggtctcgtctaccatggccttctagctagttttttctgggcacgctctatggtggagaagattgtggggtgttacttttggaagattcaggagtccctcttgccttggtcatctaattccccatgtaactggctatgcatttgtataaggggacatttggctgtccttccaatagaccatttagtacctcttgtatgttggccacaatttcctctagccactgttttttcaacctaaggttgtttatttccctcgcgtggggcaggcttcgcatgttggagcttacagaataaactcgattctcttttcaaagccagtggcacgacgtgttgggatctcgtggcaccagtgggggatatctgattggtgatggatactgtagtggtctcttattgtcttccagaacgggtgtcagcaatgtcgtaggtctgtcccattccttagtgtctttttcttgagcatgagcaaggttgccttccttagcaggtgttagtttaggtaccttcgtcatcggtgggtctccccgcccttggatgttaccttctggattgcttccctaatttccctcttttgggccatcctttcttcaaccctctccaataggtggtgccggggtttttttttcttgccacagttagttggttgctttccaaatgcaacttgagtcttgtttcttcccacagacaacaccaaactgttgacggtaaaaacttgtcagtaaagttaaggaccaaaaaccctaatttttttaacaagaaaagcaattaagtatggattatgtaatgattagattagagaagaaatcttaattattttaagattgttaatggcttttatatgcaataataactctcttgtttacaagatttcagtccccccttctcaaataaaataaaggggtatttataggtggctctaatggcccattgctacaagttgcattaccctaagtggtccctagggggaccatatgttgcgagaggaaggctaacggccaaaactcacagtaatggggtcaggtagtggtggtcggggtgtcaggtcatactgatacttgggatcatgctcccactaccttgtcccccttataccaattctactttatcatcttttgtaggcgccgtggccgtacttattcgtatatccttggagtaccttattcttcccttatagatttcctccctgatgaggctcaagactttgttgagtcttcatgttattggtagggttgttgtcacttggagtttctttaaggtgagaaataagggaaaccccatttctccttggtttgagggagatagtagaggtcggctctagcgagacccttgtctggctaggctaaaatcgcttaagcatgggaaggcaaggtctcctttgctttggtggcatgacaagttgaggtgacgaggagcgggagccccttcttgctcgggggcggcacaacacgagggtcaacgaaaccttctctcgctaatagggcggcgcaacatggggagatgacgaggagcgagagctctttcttgctcgggagcgacgcgacacgagggtcagcaagacccttgctcgctaatgaggtggcacgacacaagggtcagcgagaccctctcttgctcgtctggggggccgacatgaagctccaatgaacttctttgtttcgtccttcttctcttctttcttttctctcattctgatgtgatctcgatattttttcttagagaattttcggagttaacactattgttacacaaacattgaacttaatactactgactcgaggattagagttaattaacaccttaactatgtaaaaaatacttgtctctaatctttacttctttctttttagctcttaaacatgtttattattgattttcgaaaaacttagtagataatatggaaaaaaaaaaacttaaggtatggtataatgtaaagtatgtttggtaggaaggatggagaagtggaaggatggagagtttaagaaggagagagagaatagaggagtggagtaatcctttgtcttgtttggtaaggtaggaaggagagataataattttgaatccttttgtttggtattagaaggagaattgaa

SEQ ID NO: 382269 - DNA, 1442 bp, Cannabis indica
gtttagatctgtgatttatatatattttttaagtgttttataaatcctaacaaatattacttattttttaaaaacataaaaaattattaattaataaaaaatcataaaatataatttttttaacggtcacattgtaaattttttggacgaaaaagataaaagtttccaagtgttatagttcgggaggtatttttatttttaccaagcaaaacaattcaggaagcaagagtttacaagtgcaaaaattggaaagtgaattttttttttattctttttttttttttttttttttttttttttttcattattataaatatgaataagcaccccattccacctttttgtctttttattactttttgttttttttcttttttctttttttttttttgtgtttgtctttttcttattgacacactactaagttacaatatatgcttacagaaagaatatatacctattacatataaaaataatatagaaaaagagagattgaagttgtgaaaattgacttcattacttcttttttactatattgtcatttttgttctaattttctataaacaaatattttgataataaatgaataaaatacacaacagccttggacacactagtatataataattatgtggaataacaattcacctccctttgaaacacctacaaaaacataatgagttgattgggattcagcattcatgtcccacactagggatcattacatcttcatcttcctaataagaaattcaaccacaaagctctgaaaagtagtttccaatccactcattgtccatgcagatatagatcatatcatcatatataaaattcatgggccaagcttgaagaatccatattataacttcctttaacagagttagcaaaaaaaaaacttcctttaacagatgtcgaggtaccataccttcttggttaaagaagggtcatgacatgagcatgttgctctatgagtatgggcctcttgtcccaaaatcatagcaacaaacttaaatgcaaattttgaaaggaaaaaaagaaaagaaaaagaaaagaaacattgtcaataagggtagggctggtaggggacccttccacaaaaaccttatcatgggtcattttagcatgggttgttccctcactccacaccatttcttgtgatacttggacaatcactacctaacccaacattgcacctagccaaacgagtagcatttaaaaaaaaagagtgaatatatttatatatatacctgttatattaaatgtgtctatgtaaggagaattattagtttaacggtttttttttcacgttaaaattaacggtcaaactaacaccttcaaatcaatcaattgattatttttttttaaaaattaattttaaatatttaaatttaatttaaaagtctcaacaaaattaaataattattttttttactttataacacatt

SEQ ID NO: 382270 - DNA, 2848 bp, Cannabis indica
tcagtcttcctttttttaagcaagcaagaaaatattgagagttgtcatccccaaattgaagccatgttattttactcagctgttgaataaagcttgagtagtttcgctgggctatgactaactcaccatacttttcttgctcatcttgctgcaactgagtatttgaagggttattggacagtttgtcttgagctaaattgaacttctccttagcagtgtaatagttgttagtaatatcccccatttcagctctagaaaacttttttaggacatgtttcagcctaagaagtttgctaataagacaattcagattattcttgttgttgttccatttccaacattccaaaatttgaagctcttatgttgcatccagtaattgaagaaatggaaaggtttaattccaaacttatcgatttcatgatttttattaatacaatagttgttattaaatagaatgtggtgtggccagctatattcactctactgtgcactaactggatatctccctaagcacttgaactttaaaaaatattctgccaattagcaaaattctgctagcaacagtagggctagaatgatattcccagctaggaaaattattctttatgacttcctaaattcaatcatatctatgtttagtctcaaagagagcacctaaaccaattttcttctgcctacacaaatctaaaatagctttttgttttctatttttattcatgcctcgaacgttccaacccaaaatgttactttgttccatgagtcaaggtggagaaattagtatccaaattcctaacctcagccccttggagcacaacataaccattgcttgttgtggcaatcaaattcacattcgtcaaacctcccttagatcacttccttcttggagtaatccaatctccaccctccctagttgttgcttcattcttgatgtttacaactgaactgcttgctgcctctgtatctatttttggacttactttattgtctttgcttctcctataacatcttcctgaattgttgctttatctttctcaagtcggacaatttgttggtttttcccctaagctgctgcactagcttcacttctgcccttttcatggtcaccattcagattactcttttgttttttgacccacaacagtcctttatctttggagcaattagccaccatgtgtgccaaaagatcacaggcagtgcactttgtgagaagccactcatattcaacactttgatccattagattgtttctttgattgatgtatgacattattttgggtggattatttgagatttccatgtctacaagcactcgagcaaactttaccatagacctgtcattcgtcaccttatcaatcataattggcttgcctatggtactaaccatggcactcagattattttttgaccccaatattgaagcctcaaaccgttcaaacgaatccacactggtaatgattgggccatattcacagtattcgtgtcaactgaccatggccaaagaactactgacttcttatcaaagtgaacaacccctagcacaatatcccttgtaaccacatctctaaaactaaccaacgaaaagatagagtccatacaaaaaaaattatcaatgcctaagtttccccagatcctcttcacgaaccctttaaaaacacgaaatggaggattggctccaaggtctataccaactatggatgaactccatagacagcttcagattcattctcatcaatgtccaatttggccatgagtctatccccaacattcataggttcagtgaaatctaattgagtttagggagtacaaacctggttaattttgaatttactccatgtataaccagttgaagcttgaaaatctactttctctcctaattgtccacttcctccacccatctcgtagtagatttcgattggggtagccaagagaaatctcagcttcaatgtcttcacagggaaagaacatctgggttggagcagactttccaaatctcatatgggttggaacagactaagatgcaaaattgacttctaattcctcgtaggggtcgtgaaacacctcagactgaatcttaattggattctcttcctagatcaaagggagttcactatcaaatcgatcttcatcaacagcagccaccattatcgcttgttatagcatttcaagccttaaacggccactatcccctacttgaaccattgtatcttcctgtccatcctctaattccagtttctcacaattttttccaacaatatcaatcatcgtggtgctcttaatcaatcgaattggctttcgaatcacccgtcgcttcttcgccatgggagaagaacaagagaaatagatttattttctctaaagtaacatatcaattatttaaaatatgtaatttaacattataatctttattcttttggacaaagacctttcaagattagaagttcatgatccttttagcactgaatattagattcaacttaaatgggtagttggtgtgattcaagacgtagtgaaaattaaatagtaataataaatcctgaaattagaaaaaatgataatctatggttattcatatattttcttaacataaatactaaataaatataaatacaaaatgtttgtgaatatattttataaagtaaaaaataaattatttccactttaccaatattattttgataaatcggtaataattaggcactttttcattttacacttcaaaattatttttttttttgtatttttactaaattctacataaaaatccatattgcaactagcgcctgcaacctgaattgcaacaaaaaaaacgtatagaaaacccttattgcaactagcactgcaaccactt

SEQ ID NO: 382271 - DNA, 2953 bp, Cannabis indica
ttttttttgtttatttggtgttaggcattgctacaatactacattgaacgacaatgcctgctgaagtgtaccaggaggattctcatgcacgcttgtaagtttgttataaatgatgagtgatttaattattaagttctcagctgttatctttagagacttattttttcttttgggtgtcttcaactagtgctagaccctctacagcttaacttaaacactactttttaaactcatatttttatgcagtatctctaggaaacggctctcgaaaagatgccgatatatggaaggaggcattaaacctgatttctgatggtttagaagaaaaactagtctctgttctccaagagcttctatcttctagtcaccctgcccaaatggtatatttattatgaaaagaaaagatgtattttcaccattttagtttcttacaacatgatgaataaaatgatacaaatgaagccttgaaacataagcttcaggtgtcacttttccaaacttacactaatttactttcaataatctgtgtttggtggataaactttattcttcactttaagaactcttctttgtagcatgtcttcaaacttatactaattaactttcaataatgaatttgtgtttggtggataaactttattcttgactcttcaagaactcctttttgtagcatatgtgtttgtggttttgaaaatgttactatgttatttttattcttaaatgtccttggtaaatttaggccactgaaactttggtgaagttctgtcataatttactatatgtaccttagttctagcttctaggatgccatctcttgcaacaatttgcttatttatttattttttatttaggctctttgtctaacactacaatatttgcaataattggattttcacgagtagtaattttagaaagagcatttgcttatactatgttatttagattcttaaatttcctaggtaagtttaggctaggggtgttcataaaaaccgaaaccgaccagaccgtaaccgaattttcggttccacgtcatcaccgaatttggcggtcggtttcggtttcagtttttttaacatggcggtcggttataatttcttatcattggtactgcgcaaggtttgaaaaaaatctatattgggatcaaatgtgatctctttaatcaaatcaaaacataggattgaggcgtaagtctttaccattcaaaatcataaattttaaaaatataaaattaataatcaatgatgagatttaaagcttaaccttagtttataaaagtcacataataagaaagcaaaaactgtaatattttagtagcctaggataaaactagacataatataaaagtctacaattctgtattttgtttttattttactgtcttactagttgcttttagttctcttaattttctattgtttcaagcctagtggcccacaaaaatataataaaaacataaaccattttttaagcccaagttaagtgataaaacaggggagaaaaaaggttccccccaatcaaaacctatgcataagttggttttgaaatccaacaagttttactacctttcttcacgcctcaaatgaaattggttttaaaacatgggttgtgaaagatttttactaactgtggcagaaggctaccatattgtgagatttgagaaaattatgagatagttattgagattactggggtgatatttcattatcctatcccagattaaatttaatttcaaatggtgccactggttgttgcagccaggtctgaaacatgcataatttcctgttcatatcatttttgttgttatcttagttaaggtttttaacactaagtttcctgtgaaaattttcataggatgttgacctcttcaccttgtgggctgaggagacgctgattgaagactatttggttttggacattcttttcctcacttattatgagtcattttgtatttgcaacggtcagaggtggaaaatattgtgctcacttttcaaggtactttgtcattcttgtattggaagtgcttcttaaagcttttctattcttaatcattgctccaaactttctttcaccagggaattttgtccgggtcatataacttaagaaagctggaagtttcaactgaagcaatacagtcttcttatcaagcaaagatccaactgttacttgtcctaatagaaactctggacttggaaaatcttttacagatggtccatgatgaaactcctttcaggtgttctgctgatcattagtttcaccttcaatgtttttgtgatagtactgttctatctgtattggatctttagaaataaagtagaaaatttatgttcaatttaatggacacatctataactatatgaagtgataaaagtaatactatccatctctttttcacctgttcttcctttaatgtaaaatgcacgcactattcttcagggaggtttcttctcatttttccttgattgatgtccaagagatggatacgatagtgtcaagtcttaatgcttttgaaactaaggaagcaggcccactaattctaacatgggcagtgtttctttgtctgatttcatcacttccaggaaaagaagaaaacaatgttctaatggtatgctcttcttggcttcttttcccctgtgcactatactgttacaatatttaattaacactgtttctggcaggagattgatcatattagctatgttcgtcaagcttttgaagctgcttcactgagatcttttcttgagatccttgagagttacttattaaatgagtcagatgtaagttatcttagtctttctagtttctgcttagttagttgaactgtgttagttacctaatatgagaaatctctctcttaagttgcgtttggttggaggtaatgaaatggaaaggaatcaaatttcatttcattcctttttttagttgcattttataatattggaatgtcattccaatg

SEQ ID NO: 382272 - DNA, 1862 bp, Cannabis indica
tattataaccagaaaaattggttttgcataaaaaaatctttgttaccatggggacctggtgacatatgatgagtcattgggcattttgagcagagtcttcatttaattgacataaattaaactcaagaatagttaaagatgaattgttaatgaatgtatgacatgttaattctgcaccagaactttgttgtatgattattgcttgctaacactacactaaaccaaatttattgacaaataaatacattaaaacttagttatgcaatgacctaaccaccaactgaaattaaatatcaacaattcaaaaattgttctcaatgatagttagtaatgtcattcaacaaaaggctgataaaactgaaaagtagattaatctcaccagctacccaaaacaggaccatataaatagatataaaaaaaaaccacattgactggaatccaatgaataataataaatagcacataaaaacatggataagagaagtgacccaagttttaaatccttgttccctaactaaacagttagttcaaaaggaaaagataaacatgagaagtctttactctgtactgtctttttattttctctctattttagactttggttgtttgtctttaccagaaaatgaaacatatatggaatccttgcaatttctttctcctttttccacaacacattttctattgtccaataagataagagcaaacactgttttttgtccccaaaatgagtataaaaacttcagaacaaacagtcttgttctacacaactcctaatttttatgacaaacacatgagatgttcactgtgagatcagctaattttaaagaactttaagtaattatgatacaacaatttatctaattttgtttctatatcctaaccaatgtacaaaaaaaattataaatttcaataaagaagagcaaaaaattaaagtaaggttgaagcaatgaaaagttgagagatcaaacttatttacacaaaataaaacaaatactaagctcttctcttcacattagatgaaagtgtataagatttgaacacaatactagtgaagaacatcagttaagggcaatgaaattaataaataaactcactattcaccatacaaaataatcattacaatactaaaaatatttacattattaccaaaaatgggaagaaaagagataatttgatgatgctcagtttgattgagcattatacattaactgaagaagaagagcaacgagggcatcgaatcaagccattttcattacactctaagcaacgactgagcgatccttgatcttcatcgaacactttcctacttccactgcaattccagcacggcacaaacctcatatccgcacaactctcacacacaaaccctactgcttctcgaacccgaaaatccttaaatatacgtttggttgggagtaataaaaacaaaagaataggtaataagaacaggaataacaatggccgagcaaagattattatgcattgaaaatttgttaattttgttttcatctttcattagtgaactttcttcctttatttattcaatttttcttaatagtcattccacctaaagttcgttttgatgtaaatttgcttatggtaattaacaatcattagattaatgcaatcataatccaatgataatagagataaaggaaatgtatttccttaaaggtgcaaaaatgtatactagcccagcaaaaaatataaattcgaaccaaatgacaccacgtgagtacttgactggtaacactcactttagtgatctcaattccatcgagaacgaagacatttttcatacatttatacatgatttttttagtatggattatgtgtttgatggtttgttgtggtaaaatagt

SEQ ID NO: 382273 - DNA, 2707 bp, Cannabis indica
tcttcacaagcacaagattctctttttatgcaactaagacgatcccatcccgcccaaagttgttcattgctaggtctttctatttcttttatagagtgatcctgaagttgtcatcaatttagtcttttctttttatgaggctatgagcaagtgttttttttagttctattaagtccttgttatctgtctttctaggtgtatgtcttcaacatgtaatgcgaaatgataataccgcagaacatggtgagattatgcactatagatgaaaaacgagatttcttggttagaaaaaatttcttccttgtttaataatgaatgtattgtttgattttcagcaatattaaaattagttattattatttttttttttaaaaaaaaagaaaagagataatggtgagagatagagagagataatggtgagaaatagtgaagaagaagaaagcgtattcttttgaaagaggataatggtgagactgagagggatgtaatatacagtacttgtataaaaaataaaggatatttcttcaattagagaaaaaaatattgcaataaccagagaacaaaattaatggtccagccatcccgaataattcattttattaatggttaaaatttaattgaagagatgaaatattgaaaggtcaagattgggagaggaacaacttccacgttagtacactgactgcgggttcgagtcaagtcctataaaaacttgtagcatatatgtttgatgatagtggtgcccaatatttttgtataggtgaggctccacgattagttattattgtggacaatgtcccacatgaaataaatagtagagaattgagtcatatataagaacatggactactccactcattgtcaattggttttaagataaaactccatgattcttaacatgatatcagagacatatagctaaagaatgccgtgtcttcggagaagggccgagaacaatgacaaattactttctttggtcccacgtctcatgactactattttgttattatttgtacatcatgaaaatttattgtgaaaaacttgccataaaaatttattatattaatcatttaagatactagtcaaagcacgtggcattgctgtagctattttctaataataagaaagtattgatcaattcctaaactaatcattttgcatatatttatttttatctaagactttgtcaatttaattttataaatatattaatttataaaatattagaaataatacatgcaattaattattatataactgacccaacaaaatataatgtttcctcatatttagacataaataacatagtaaagaataagaaaaaagagtaaaaaaaaaatcaacaaaattcactagtcctataatccaaccactactccatactacacaaacatgagtttagtaaattaatatgaaaaattgctaattaattaatattatattattgtagtgtaagaaaccttagagcatatccaataaatgttgtaaatacattattttagtttatatttataaaataaaaataatatataatgtggtttaaatttcgtacatacataaagttgtgtcaaatttaacacaaaatgtaatataggccaaattttataccaccatgttaatatcattttttatttattattttgtgacttatttatttaatcactaacttatatatatattttgacactaacttttatattttcatttatatatatttaatataatttttatatacttctcataaaaatgtaatgctagcttttgttgattttttacactttactattaatgtaatgtttattttatttttagtgcattagagaacaattataaaatagggatcaaatatagcattgatctactttttgagctaaatttagcacaaaatttgcatcttatcccaaataacaatgttcttagaactaatgattttgtgcatattgttatttcatgacctagtctctgttttataataagtagataaggtatgcgcttacttataagtaaaagacttcgaatctgtacataaagtgacttgactctgagccccatgatatgacagttattaggtgcgactactggccggtttaggatatcgttttcgatgattggtattgagagctaggagtctagtggatgtgatatgcacgagtagcttgtcccttataattatttgtgatctctctactttgcttatagatgatgatatgttttgttttgaaagaactaaccatgttagggacttttattaaactattaaactactggtccttagttgtcttcctatactagactttataagcttacccctatatttatcttctagaaactcagttggatatctgtggatgtgggaaagtcgttgatggagaacgacgagattagcttagtcctactttaattattaattaactattactcttttttaaatattggatatgtatctaattattaacggatggtctgtatcatttatatagagttagggatgaagaatatgatggatgctataagtattgtcttggtattttttggcttattaattaattctaactattaggtgactacataactatgagatatgaaaatattattattgtatatatatctttatatattaaaagtgtctatctaacgacatttcttggtttaacagaatatacttaaaaaataaaagaatattctgttaaatttaacgattacgttt

SEQ ID NO: 382274 - DNA, 820 bp, Cannabis indica
cggcctaaaatcaaaggcgctttcaaatatttatttatttgtttttaagtaaatattttatatattatttggatatttgtggtggtcataatagattctttaaatatttttataaactctccaaataatttagcatgtttaagttatggttcaaaagtttgttgtacacatacttatcattttgtagaagagtagaaaaataattgtattgaatcttaagttcgacactataaattatttaaaatttcttaggagacatattatttttacaattaatactattataagaaatctaaaaagtatatttaaatactttaattaaagttgcatttgtgatatatttcattagcccatgtgtgagttttattccattttttattttatgttataaaattctagaattaaaattacataacaataaatacatatatattaagtattttgcttgataattgtggaatataataaaatttatattgtgtaataacattgagtatcttttaaaaatatttttttattattattaaggtttttttttattttaattttaaagttttagaaactttttatttgtgtttggtctctaataataattgtgcaataataaaaaacttacatatatttaaaatattttgcttaatatgagtgagaaatttatttattccttaattttcaacgttcaatatattggtcatatggtaagagagctccaattgtacaattaatatataatttacattggttatatttttaattattgaaagtataagaaaagtctcaaatatattattaattgttataaaataatataaagtagatg

SEQ ID NO: 382275 - DNA, 3599 bp, Cannabis indica
ttaatatataaagatatagtgtgatgatcagtacaaattaacattacccagctatgaagatctcatctgccgtgtactattactcattcaaactttcaaccatctccaaaggaaatctaggagaagttcttgggcaaaacacaactctatagttggtcccaccagggcaagtaaaagtggaggtggggtcatcttgaggataactataagcatcaggacaccgattcttgaaaaactttgagaattgggtgggcccacagcttccctgaccattggtacaacaatactcattggtcttgaacacagtacatggattgttacaacccccgggagccctaagttggctagggcactgcccattaatgtcagcagtgcaccttattcccctacaccttcccgtagtggagctaaaatccatggggatgttgaaaccatccactaaggagatgtcaatgaagtcaaggttgttgtattggtttaaggcgtactcagctagtgtgtttggaggttgtccccacccttggcattggaggaccccaccacagtctcctgtttggcagcggccgcggccgctgctatcgaagttgcaattagttcgaccccatatgcgggccatctttgtgcccgcggctacgttgaaagtccatgtttggccacgatccagacggcggccaccaccggggctggccgctgcccagacggtgtatgagcaatcattgcggacttcgaaggtggctgcataggaagagacgaagaataaggttgtggtgatgattgaaagagtgaagaggttattggttatggtgtacattgttttgaacttttgattggggtgcgttgttgttgaatattttttttaaggtaaattgagataaagggaagtggatttatataaagggaagattgttagcctttggtttcggccatttatgatggacgaataagaatatcaagactagtgtaccatgccattttgttgaagaaatgctaattgtggttcataaaaatgtattaaaaaccattaatgaattatgagatgctacaatattaggtggcatttagttgaaagaaataaaaaaaagtgagaataggaatgaaattaatgcaatgtaattaaatttaaaatacagtaagaaaatacagaaaacaaaaattaatcttgcattggaaatgtttcttctatttcaaaatatcataatcatttcactaaaattgtagaaaagtcatttcattaaaataatattttatttttttccattccattctatttcatggcctattcttatgctacgaaattgttagtagtaataaacctattttactttaaattaacttgttagttatctcgaatctaaaacttgaatgaaaactcaaagcagtaggcggctagagataggatgaagttataatggagatggccaaagggcggcttttaggtatgatttatgaatattaattaatgaagctaattttataataaaaatagtaattatgttttgtaaattacaaatataagttcatcgtattagagtgactttctccattcacattagaaaaataatttttttacacaaagtggcacattttttaatatcttttttcacggccacatataatcttatacacttttacaagttatgattaattttttgagaagtttataataatatatatttttgtatctaaattattataataataatgttactacttttattgacatgtcaccctagctaaatttaatatttttaatgttttctattattttattaatttttctacatttttaaaagtaattttttagttactaatagtgttgataagaaatcaattagttatatttgcattaaaggttttacttttatatcatataatttaagatacattttggatgcctccaaaacttatttatatacatcttagtaagtaattagttatttttaatgtaacgccctactagcataggcgtgctactgtacttttcttaattactttcaagtatttgctaaccaaagggttttgttatgcccatatttcaagtattaaatatggacatgacaagtgaatatataagtctcaaaaattgagggaaactataaacaggagaaatgagataggtttctctcctcaaaatatgctacagttaatgatgtgtttgtcttgcattgtattataatatggctatcaaataaagagataaaattataaatacaattgaaaaggcaaaatcataggttcatctcggacttgatcgagataaacaagacatgtatagacagtcccactaaaactctaattgtctgtggtatgtctatttgatgtcccaatgcaatttttgatcactttacactaagacggtaccagaaattgaaaccctagttgaggatgtcaacttgggcaccaggtgaaaccctaggtgcccaggttggcttccgggttacaagttcatgtaatttcagctctcgaggcttggattaggttgctccatgtctttatggtacagaatactgaaagatagtgggctggattcaagttattgaagtttgaacttccatcctagagatctcaaagtcaacctgggtgcaaggttagggtcccctcccatgctaactgtaatgactccggttactcaacttcgtgatgtcatccctcatgccacttgtcaaatattgatgttcacgtcactagggaaagttttcgggctaacaaaaggaaagactctttaaaattatagatatagtactattgcaatgagtatttgcaaatacacaaaatcctgtagcaggagtatttaacctaaattggaaaggtccatatataattaaagttattaatgttatgatttatttcctaaaaattctataaagacattttttattattaataaaaagtttaacattttgatatatgcttgaatgttaaattattaatatttattattggataacttatatgtaaatattaaaaaattcctttttcatatatataaggctatgacttgtagctgtacagagaactaagatcacttagctatgaataaaacaatcaataacatattaaagttatgaaatctttaattaatggttgatagtacggttaattgatgcccattcttcggtgcaagtaatctcgatttggattactattgtagtatgacatataagtgaatgtgttatatataatagaaattatatatgataagggtcaatatgaataaagctatctttatcaaacatatcgttaactatacatacctaattcatatcataatgatgatcaatagtagttcggcctaaatcttgagtaatcgtgaactcttgttcatgttattagtttctttgattcactcgttaaagtttctcaaaaaagatgatccttacaacttatattttgggaatctaataatatggatgactgggaacatgatctataattatagaatcatgattaacctaatggatcaaatgttggttccctttaagtgttaattctagtactagaaagttgtgtgcaaattcagatgggatctaaatcatactcccactagtgaattaatggtactaaaagataaagaagtaattgttgggattttatgccct

SEQ ID NO: 382276 - DNA, 2841 bp, Cannabis indica
tgaacacctccgtaatatcataagcatatgttactaattaatttgactatatttatagaaaaaaaaatcgacaatattacataaatactgtgcatgacataaacaaaaaaaaagccaaccaaaacaaaagctctctataaaagaaaaaaaaaatggtttgaaacatataaactaaattctgtaaaataattcaaattgcataaactaatatttcttaaatttaataatacaaatagatttgtaaaaaattgatcttgagatcccgatcaacccaaattatgtataatcgacaaaatattagtagctaatattatacttgttgaaaatgttgttttccaaaatttcaataatgaatttattcaattatgatagcaacaaatcatttaaattcgcattcatctcacacgcaatagacttgacaatattatttaatttgtatcttttgtttttatgtggttgcattacgccttcagttctttatagttttgttataattggctgaccatatttgaatttttcaaaatttcaagaaacggaatcaattccatttctcatacagttcaatcggcagtttgattaacgaatgaattatattaattatgaagctagtggcgaattcatctcaaggtaatacaaatataaagaacttgtgcacaagttgacgcaagtgctgaaacgcaactaaagaaaatacttaactgcaactgaaataccaagtgaaacgagaatattaaccgttgaggataaatgacgatccaagtctattcttctacatacaactaaaattaaaagaacttaacttcacaaggtatccattgtgggtaaccaacaacatctccttctttgcaatgagtagcagttgttttaagattgtatgttatatctaaaatattaatagaaatataaagtattatcaacatcatatttgacacattaatttggagttccaaaactattctaattacattgacaattttgttgaatcttcaaaagttgcccaaccgttgattgatagttgtaaaaaatgtgttatgcataacactataattcaaagattcaaataatttcttcaactatattcctagttttattactaattagacaggttgcataaaaattgtttcattgttgaatcatacattatatatatcaacataattaagaaacatgtacaaaaacataagcataaaaataaaatacaatactatacaatccaaacccgtaatcaaaggttgtaaataacttggagataaaaattgtactcaggaacatccacaaaattagtttttttaatgttggtataacactgtaggtgcaagtaaaaatacacttggacttgtaataatcagaaattttaaacttgtattcctattcctgcattgatatataacaacagaacaaaagaaacatgaatattataatagaaatggtgttaaaactacattgaaattataattaaactaatataaaaaaaatcattcacacaatacaactaaacaatatcaaaaaaatcagtagatacactatattgcaaccaacaataaatatcatcaagagtgtacacccaaaacatataatgaaaaatatactaaacctaaaaaaaattaaaaaatatcaacaaaaaaacaaatcacactcactaaacattaaatatgtaaaaattgattacaaaacttaaaaatcacaaataacagtgataactctatagtatagaattatttttgtgatctttaaacttatttttttgtaaaaagagtaatgcttgtgatgttgtttggcaaagtttattagttttctttcttttatatttagtgagttaattttgggagtctttcaagttgttagtttctattgtagttatttaattaaactgatcaatgatgagaccagctgactgtttatgagaccgttcctagtgggccaaaaggaaggagatgggctttttgctttaagggtaagaatggtaccctaatgacccaacaacaagagaagtactgagtacaaccaccatcatcaatgaacatacctcataagaaaaatttataaaaaagaaagtacaaaaagagaaggagaacaaaaaaaagaggaaaattcgaagttaagaaggagaattacaaaaagagccacacattactctcatttataggatttgtctttttctactctttttattcctctaaattttgtaaaaattgatttatagccatggatttatatacacttttttagattatggtgactaaagtatgagttgaaattattatggcttgagtggctatgaatctttatgttttggtatgattaactctatgcatgattttagcatattgaacatccatattagagcctgccatgatccaaaaatgcagaaatgcaaagcatgacaaaacaaacaacaaaagacaagactcatagctttttattttattttattttattttttttgaattttctacctttttagattcagtacttctaatcataaaaacatgttaaaaaaaacaaccacattcacattaatgcaaaatttaccaaaaaaaaacttaaaataaaataatttgtgtttagacattagatttcaatatttcactagagccatatcaacaacggtattcaaaagtgaacaatttaaggaaataaataaaaatgaagaaagttttcttttttcttctttccaattccaactgatttaccaaacttcctaagcccattaaactcttaaatgggcttttcattcagtccattaaaagtcccatttgggccaaaaaaatgaagaggaaattacactttataccctttttatattgtcctcttttatttttaccctcttttttaaagtct

SEQ ID NO: 382277 - DNA, 5746 bp, Cannabis indica
cctacctacgtacgtctctctctctctctctctctctctctctctctctctctctctcttgttgatcctctgtttgcatctacattgggcgactcttctctttgataagtagaatactggaaatgtgttaggaatttgctgacaattttggatctaggttgtgggtattatgttttaacgattctacgactgattgcaggtagtttgaaagacaaggaccacgaaaatggttgagaagaccaagggcaggaaggaggaggtggtctcacgggagtacaccatcaacctccacaaacgcctccatggatggtaagttccacactgggttgtttgtattactggttactttgttgcatttggtgttgctttctttttcttttttgcttcaatgatatttatgatgattgtttgaatgctttcttcttttgttgtttgttatagtatttgtggattgggtagaaccttttctcttgtcatggaattgctcttaatatttttagatgggctttcagttttccccagattttcattctgtataaataccaaatgtcaaaacatgaagttctgaagcctgaaattattacctgttttcaaatatgaatttggggttcttgatgcttctgcttttaaatgtcatttgatggttgaaagggtttgatagtaatccatttctttattttagcatgtgagagttgaattggaattataacattaggtgggtcagtatagcctttgtatattatgtttgctgttgtgaaagactgatagatgagatgaagattacatttccatattgtgaatccttgtcaaaatagtggtacttactttttatttattgctttaatgaaattatagtaccttcaagaagaaggctcccaatgccatcaaggaaatcaggaagtttgctcagaaggctatgggaaccaatgatgtcagagttgatgtcaagctgaacaagcagatttggagcagaggaatcaggagtgtcccaagaaggattagggttcggattgctcgcaagaggaatgatgatgaagatgccaaggaagagctctactctctcgttactgttgctgagatcccagctgaaggattgaagggattgggtaccaaggtcattgaggaagatgattagattatttgtcttttttaattaaacatattctcttaggcagtaaaagatctacataagcattttgtgacttgtttatgtgtttttgtttattgtgttttttgactagaattttgtttggtaactgtgttttctgagaattttttatgctacacctaccagttttcaatctgatcattttgcctgtttctaattaattataaaactaaacttaatttatatatatgtttcactgactcaaaactttgaacaattatatttcaaagaaataacaactgaatatatcaaaatgtgaatctaaaataaagtctcgttatttagaaagaacttaatttctttcttgtgaaagtctacaattttaaaatgacttaggtatttaaattgtgtaaaaacaattaaattccttcaaaattaatccattctttgatcatttgttctcttcatcgccttggtctcaatgctctaatccttttccttgaaaggtttcgacattcctaaaacaagaacaaatgaaaaataaaattagtgatacatatttgaatcaaatattcaatcattaaagaactataaagtaaataatttaccccgtatctcatatgtttcaagtttaagtacaaacgcataccttttgactaaacttgttctgtttgctctgtttgtgcttagaaagaaacacaagtttgaagttcgaatgatatatttttatttcatttttttctcttcttaaaaataaagaaacattttaaagcttgtcaagataaatcaattcgtacaagtatcataaaagaaaagtttagaagattagactcattgctgcttcaaaaactttcaggccaatttgtagattacgtccatttcatactctcctttcctcaaaagggcttctaatataaatggacataagtatcctttcactcataacaacctaacaacaacaaaaacatccgtatttcttggtatttatgaaatagttcctaataattaaagtttgaacccaactttcagcgggccttataagaatacatgtagcctcgaagttttctcacttcttccgctgattcattaaggagatgatccacatacaaggagagtccagctccactgcaagtcaaatttgtaagtaatatgagaatatattttaataaaatttacatggtaatcttatggaggaaaacaaaatcaatgtacctaagtgttccaaatggaagccaaattatgtcccaccggaatcttggcaacctacataagatcattaataaacaaccaagtgaatagaaggaggttcagagtcaaactttcttatctctatcagccctgaaacttaactatctaagataacaatagaggtgtcttgtgagagttcacatacctcaacatgtaatacaaccaaaaaactgcaagtataatacttgcaaagaatgagcaccacatccatcgcctgcgatactttgagccagtaagtagtcctacgatggccaatgaacatgctaaaacagcaacccaccctgtttaaacaaacaagtcagcaatcacatctgacattattttaacagccaacgcaatgtaaaatgcatcttgagcaactaattgcagaaaaacttgttgagcatacctgcagatagtatacatattatatgcagaaacgtaccactatattagagcatacctgcagatataatcatccaagactccacatcctccatgaagtaagcataataacgctgttaatcgaatgaaaacaaaagttaaaagtaactgagcaaaagaataacaaaattttaagcataagtataagtacactaacataaccatgtcataccacagccaaacctttaacctggttgacaatctgtttaagtattaaagcaacaaaactacaaggaaaaaccatttacaattctagggataacacagcctcaagtttaacgactccataagaaaaaacaatgtgcgcattcatcgtttagttctttttgaatcaaaccaaatttcattgagtctaatgaaaaataatgatagcatacaccagatcatcactattttttctttcaaatcccattgttagtatataataagtgatagtaaacaaaaatacaagaaaacaatacctgttcccacggagatgaaacctgcccaaaaatagagtacacaagaaaacccgcaaaacaaaagagaatcgctgcaaacacgctctactagaaaaaaagaatcaaattattacataacaacatttagaacgaaaaaggaaacaaaagataaagaaaatcgaatacacaccctccataaacgactctgtttggcttggtcaccttcgaacaagcgaaccaattcctcttgttctgtaaattacacacccaataaagcaagtcaaatctccaatttcgtttgctttgcatctgaagataaaccggaatctcaattgacactttctgactaagttcttgaatttcagagatcaaatttatcagcgaaaatgcaacagaaagttcaatgacctcgattgtacaaaaatttatatcaagatgtagtttcttgcaaagattcagtagtaataatacataagaaaaatttcattcacaaaattttctcagcttccaagcaataaacaaagaagtattgattcggagagagagagagaccttgagtgtccatagggcgattatcgtccctagtaggaagagaaagattgtgtctccttcttctagcaaatagcttcattggaatcgccactcactaccaccttcgctttctccaacttttcttccctttcttttcttttcttttctaagcagagaaataaatttggatctcttctggaaatgtttgtggtgggaagagtcgaaaaacgacgacgtttttgtgacttggtcacacacacggcaccattttactattaatagaagaccaaatggctggtgggtaaagtccttcgtttgtatatctctaaattcaaatcacttctttgagaaggaggagggagggtctgtcttcctattcacaccttttttaggcttttaattccgagtcgtacaatattctttttcacttaaacactttcatcagattacattggtgaaatttgaagtccattatgtacactaattttattggtgtaatcagtttacacatttaaataaatacaacaatacataaattctgtcatcacatgaaattatagtaagagatcctaaagatatctttttgtgctttaaataactttttattgaggcaaaaataccaacattttgtaacaactacaatcaaagatcttcttcttccataaaacaagactagctttatcactaataataatagtattaatctatcttaatccttttagacataaaaagaatctagttaattagccttgtaaaagggtactgtaatggacgtgggagaagaggttgatgacagagtatccttgcagtaacggatcacaaccttgatattctcttctcgctcttgtaaactgctatatttgtttgtatttatagtaacacaactcaagttcttattctcctccctttttttctttttactcttctttgagccaactcttcttcttactgatttttttgcatggtcttcatcttgatctccatgatcatgatcagatgttaatggcatccccaagcagatggggaaacaacatctcagtctcttccaacactttcgattatacaagaatcgttggagcccaaaatggtgcttagactcggccaagaccacaggtggtgatgatgatgatgatgatgatgatgatgaagacactgtttcagccattgagttcttctactctatagtactagcaattataaatacttgttctgctatgctctttctttttctaattctttcctatatatagttgttttggatagtgatggttttttttgtttattttataaagtgatgggattcaaaatttggtaaggaatcaccaaagtcaacaggtttctttatgtgggaaagaggtgaagccgtgaaattatttgggaattgggagagattatagtataattcatcacaaccaccttattttttgggaaacattattttgattttgattggacgagttgtgcttggtttatggttcgttgataggtaatagtgttcacggattggtttaatctttttttttatattttttgaaccaaattttttaaattaaatcaaaccatttaagtaaaatttagaaaatatactcctttagtacctgtttttgtatgaaaaatacatttatacatttagtaccttatgttttcaataatatttatttggtactttatattttgaaattatacatatttagtaccataaattaaaatatgatcaatataattttattaatttgactaaacacttcttagttatatgtaatcaaataattaatttaaatgtagaatttataaaattaaagatagtttgattgtactgataaaattttataaaaaaaatttgggtttaggtaccaaatatgtataattttaaaacacaggatactaaataagtattattgaaaatataaggtacttgtatttaaataaaacataagatatcaaatgtgtatacaccttaaaatctatatctatatataaatataaaggaaagcac

SEQ ID NO: 382278 - DNA, 1219 bp, Cannabis indica
agtttttaggaaatatcactaactaattgtgagcgctacctataaaaagtatcgaacaccactggtgcccaataacaatactatatttggtataaaaacaattttatgacacttttatattaatcttgagcatgagtggtacccaacaccttctatatgtaatgcctcacaattagttaacgatattctcgtctattatcccgtcttctttttactgaaattataatatttaaaatccatttaaaacaatatttgttacatataaaattactcaacatttttatgtacctttattatttgataaaaaagtatacgtgatgaatgatagttatttttatctctattgttaaagtggtttaagataaacggcagggattgagttagaattgaataaggtaaaaaaaaaaacgtaattttttaagaagagtctagtttacatattaattccttttttgaacatacatattccttgattgtaaaacaactaactaatatttggtcactcctttaagtagtttgtaattaaggggaaaattctactttaggtatatacgcacgtaagttagcatgagttgttgaccttttatttgaagtcttatcttgtctcatccaattaagataatttaaacctctatattatctctcttatatgagacttacagttaattaacttttaaattttattttattaaattccttcaaaaacccacggtaacaattctaaacataaaatatatcagaaaagagtaatggcatatcttgattcttggctcactcgcttttttttgggcgaactttcatcatttctcttttcttctttcggcttgtatggtaaaaacaaaagttatcatatgttgtatgtgtatgatcgactaagaatttaaattgtgtttagttggagataataaagttgaattgaatggaaataaaaatataatttttattttatttgtttttgttgattggttagtcaactgacgcaaagtcgcaacaagtgagaatataataccaaaaatgcaatagtaataagtaaatgaacactagaattgcttagagagtttcttgaatgcaaagagtaaaaatggcagaatttatgctgataaaattttagatcccctctcaagaccatgcttgaccctttatatggagaagggagtggtgcacccctctttagggggcgagacattgagttaagctttaacccgcattggattagaaa

SEQ ID NO: 382279 - DNA, 3807 bp, Cannabis indica
ttaattttttaattctattttttatgttgtaaatcattcaaaatttctaaaaaatgtgcagaataactactataattatagtatacaccaacatcataataaaaataatagaatacaattttttttcagtgtaaaaaatataaaacgcccttggttatagcaaaatgattctccttattagctacttataataagaaatgaatcttcacacaattaatcatgttgtataaataaacgtggtgattactgattagaataaaagtgatatgattaagtcatgattaatagaaaatgctttgaatgaaagaatgtaagctccttgcctaaatatatgtgccacctagctaataattaactcatgtcgtcctagctagctacacatatggatctactccaatcaacattcaagggtgctacattggtgtttggttactttcagacacagattttaaagtcatatatatgtgtatatatacttagttgtatctttcttcaattcctataataaataacaagtaggcaagtataaataattagtaaatgatgatctctaaaatgtgtgtattattattattattataataatatatttagagaaagagagagagagagagtacacacgacgaatgggaggggttctaataggttgatcatgctttacaggttcaactgtggcgtgcttattcttgttggacttggaagacgatgatccatactccttacctgaaccttctgagcttacaataatctgtttattattctgtgacttttatacaacaacagaaacccaacaaactaatatcagttatgactaattaatcattcatttggccctagaaacatgatgaggagtgattaaagctagctttatagtgttagccaatttcactataatatatataaaacaaaaatcaaatcattagaaataacctcttacacagacaaacacccatataaatggaaaaatgttcttaaaaaaaacaaacaatttatggtttctatgaatatatatccccaaattttccagaagagaagacaccctcccctcttataacccactttccccaaccaaaataaaagaaagaagaaagagaaaggccccctaataatatattgcatgtatatatatatgctaactctttataatgggctgaaatttcttgttcttttctttaatacgagtcaaagggaggtaagctttatatatttgagaaaattccttatatatttcagagtatatgtatgtccaagaaaagaatgaatatatatatatagtaattaaattaacctggggatgatcttgaggagccatagttggcattgaagttcccatattgacagacaacagatttgcacaatgcccacatctcactgtcacgatggtaaataagctgctgcatggaacactcacctgccatatatttcccacacattattattattattacatcatcccccaaacaactaaaacccctctcatttcatttctgtacttgtttttctttttcccataaccgaaatcaaggtaaaaaagaggaatatatataactagtaaaacagctttccatataataataagaacaaaaatagattagatcatggtctcatcaccatgaaaagatgaagattaatgaagaggaacaagaagtttgttctttgggattctttaattatctatgtaaagacatagaaccttgacctttagcaagctatgacatcagagttcacagagctcacatggcaatatatatatatatataaatatataactaagaggtgtaatactacaactactactactactacaactacaacttctcttcatttctctctctctttgatttgttttcccaataacaataacaattttaatcttttccttttggtgcacttgggtggcttttatgcctgacaaaaaacccagccaggaaagaaagagagagaaagagagaaatatattgcaggtgagatgagagagagagagagagacgaaagcgacatgactggaacggaaaccattaaaggccatggccagcattaaacacagctataacaaaaataggccacaaataaagaaagatgaatcatgatcaaagatcagaagactatttcagtgtactctactgtttcttttctgcactaacgattaaagatcatcaaaaacagacaaataattatatatagtacttttaattacatgatcttaattataataatggaaaaatgagagaagttgctaagttatacggccaatgggcataatttttcttttggctttgttgatattttcttttgattttgaaaccaaaagatagatcagtttttgttatgatcagaagggaaagaacaacttatgttttactaaaatcatgtacaaaccaaaaatatgaaacaaacttcatcatcacatatatatatatggtcaaagcttctttctctctctcactactgccatggcatcatcatatgtgagaaataatagaagaagcaccaatgtttgcccaaagagacagatcaacacaaacaaataaaagggaaaccagacggtgatttaacgatgtcagttactgtcactataaatatataataatatatatatatagatcactaaataaattaaattaaattaatattaattatgatgtagtgttataaagtcattacgaatcacatgcatttatataaatagagtttgactaaagaaaaagggttgatcgaatttttgaattgggatcaaccctagctagcaagaggtattaaataatcgaaaccctagttttttttttatttattatttttataaaccctttagaaaatttgtatcttctttagaaataagaagaaatgtttttgtgtcactgtacagatatgcctagctgttctctttacctaacttctttttgtggtctgcttttcgtgatgatttggaattcataccttcctgtgcagattattacactcttcatatatatatacatacatatatatataatataacttccctttgctttgtttgaagtaatatctagtgatgggagacaaaatccacttacgattcatcataaaataatgtatatatttcatatcaaacagattgtttagctaagaatcagaaccagattttgttgatttaagtaaaaatataactgaaaaattgaagagggcgttataattctgttcagacaattaaaacccaattcatcttcttcttcatttttcaatgatgaatcatatatataaatacctagctagatccaacattaaaatacaattgtataattatatatatgaattaattaagaaggtgcaaagaagtaagatatagagaatgagatgaaaattattaataattaatttaaagagaattgtaccgctaagatggtgttgcagaggttgcattgaacataacaaacacgttcggaggccatcatgtccagtgacattctttttttttttaaattattgcttaaatttgtggaatatatagccggatcaacaagaattattcttatatatatatatgatgatgatatttatgaaaataataataaagttggatatatttaatttgtatgtaaaaagggaaaatttaaaagattatataagaaaattaaaattgcttttttatagagagaaaagttttagttcaataagggaagggagagagagagagttaagggggtaaggatgggactagtctggtcggagtgaagtggggagtggcattagtggtttttgtgatgtttgtcaagaaaagatggtttatggtaaaggtgggttgtggatttatgagagagagagagagag

SEQ ID NO: 382280 - DNA, 1700 bp, Cannabis indica
aatacataaatactgctaagcatttatttgattatttcagaaatgtacaaggaatcctatactaaaaatatttacataacatttgatcaagggaatccagcatttagaaacatttcctctcttaatcttaactaaacaaaattggttcgaaaagtaataataattcagacacaactgcatcagtgccatttaaaggtgacaaatcacttgacttaagagcagatgtaaataagcaaccacacaacatttttgtgtaaaccatatccttgaacaattgttctcagctaaaccatatccttctagttccacctcgaatccttggaccgttggatgctctcctagcagctgaccacggctctgctccaatgctttcttctgtatcggtaccaccagacattgcaggatcatcattaattataacagccatagtagaaggaatttcagagctgctttctacttgtgaaatatcagccagatctgaagctgcaacagaaatatcatcattaagagattgttgcccggagctcaccgtcggaaaagaattaccatatgtctcaaggtcatcaactaatctttcagcagagtccaatgctgatgagagtgaagagaatgaagcagaaccatgtaataattgccttgaaaagttcacagcatcacgtcgttggctactcactggtggctcagtttcatattggttaagcacagaactggctctgccttcaacgttgccaacaatattagtcagcagctgaatcctttcttctatcctaggtggtaattgtattcctcgactaatccgagactgcctcttactctcagtccttttagcctggggcctgggaggaaactccaaacctgactccttcgacttgcgagaatacttgttatccccattaccgtatattggaaccaaagcagactccaccacttctcctgcacaaacagggcactcctttacattaccatgctcataaggcaagtgataaaagcatggccaacaaaacaaatgaccacagcaggttagtataggctccatggcaatttccaggcatatattgcaatcgaaaaagtctccactgcgatgtccaccgatattctcattcgggtccgtcgcaagagccttggcaatcaactcagtacaattccttttgttccctttcacaatctccataggactttcttgagctacactaggatcattcccagaaaacaagatagtgctgcttcgaggagcatcactggatgcagtttgcacagaagttacatctacgattgaaggtggactacgagcttgaagctgcctacgagcttgccgttccctagtagccacctctaattgtctgattcttgcttcaatacgaccttgggcggtctctaactcattcagtagagattccacaccatgccatgaatactgaggttcctccagaggctctaaattcaaatcaagatccattacatcttccctttccattgtagaaagaaacaaaatctttgaaccagcctcttcactacgactaaaagcttttctaacttttctctttgaaatttcccataccctaaatttccaaagcactgcatataacacagtcggtaagaaaaattacccatacgtgctatgttacgttcttcacagtactcagacgaatatatatatatatatacatattttttttaaaaaaagaaaaaatccaataata

SEQ ID NO: 382281 - DNA, 3395 bp, Cannabis indica
atttgtcattacttttgtatttgaaagttgaaatgttttcctttatctagacatgagatatctttggggctttacttgtagtcttctttccatttcacttgaagatctacaaagtactcgtgtgatattagttagtaaaggcattggtattttgctaggtagttttattaaattggcttatccccttctacattggaattcttaggccagcttctgtcctgtgtttttttaaagatcctgcccatctttgtttataaatatgtacttttttttttaatttttcctaagaaagatgtaaaaaaatgttcatcaatgtgtgcataaagagtcacttataatattgaatttatgtagattttagatgcaagcattaacagtacttcagatggactttcttattagctgttaattcatgtcaattgtaaagtttttgaaatgcaaatggtctcttcattagtatgtagaagtgattatgcttatgttcattttttgttttgcagagttgttcacactttaactcataacttccgaagtgctaccggcattgtgcgctcaccattgagattacccattgagccacaccatgttcttgtgaaaatcatctatgctggtgtaaacgctagcgatgtaagtttgagcccattgttgccttttttttttcttttggattaacgcttttcttttatacattgaacttccttcatatgctatgtattctcatctttatcattctatttaattttctcaatatatgttcgaagtcttggctgctgctcttaacttggtttaatgtggatatcctacaacaccagtaagcagccatgaacaggcctaataatttgttttgtagcaactcaaacagattgcaatccaaaaagacaacacgttttcttacagaactctggaatctgcaaggaatgtgtagtttttgtagttcacggttaaaacaatgttggttcagaggtttctatatgtctcttagttctatctatctctgtcattttctcagctctcattcaagcccataaaatatatatatttcttttctatagtcacaccacctttaataaagtcttgtcaacagattggtagattttgccatctcatgagtatgttagagtaggccccattcttgctattcttcatagtagaacagatggtgattggacagaaaaaaaggatgaactatagaaaatgaaatctaagaaacaaacaagtgttatgatgttggggtttatgttatgctcagttttatgaatcaataacaaggattgtgtccttacttttgtgaaattgtaataaaacttgtctttagatgtatacatgttttcattctatctttttttttttgatgagggtatatataaacaggtcaacttcagctcaggacgttatttcagcggtaacagcaaaggtgctggccccagtcttccatttgatgctggttttgaggtacttattttttatgatggtgttagaaggttacctagaacatttattgttctggaatgtacgccatcgttcattacataatgattagaaatctacatatgcttttgctattttaggctgtggggatagttgcagcagtcggggactctgtcaccaacctggaagttggtactccagctgcagttatgatttttggaagctatgctgaattcataaaggtacactaatactaccatggaaccttatactttaattagcagcagttgtttatctcattattctttcatgactactttgagtttcagggcaatggtattgtgtgaactattttcatgctatttgtaattgtgctttgttattttgtcataagaataattactgaagactcaattcttgttttttacatgatttaggtgccttcaaaacacatccttcctgtggcaagaccagatccagaagttgtggccatgcttacttcaggattaactgcatcaattgctctagaaaaggtcattagtcaagctgaacactttggcattacctccaatttatatctctctctaacatcattttatatcaaaatttgctttatagccattacatttcttactcctgacaacatttttttccgtttgaattcttaggctggacaaatggattctgggaaagtagttttggttactgctgctgcaggagggaccgggcaatttgcagtacaggtcttttttcttttcccctcttatgtgttagtatttctcatatttaattttctgtagaggacctttacttgtatccatatatttttgattaaaagtatacaattgggaaaatgcttaaattggaagtgtttgacttacagcttgcgaaagtggctggaaataccgtggttgcaacctgtggaggtgcgcaaaaggcaaagcttttgaaggatttgggagtcgatcgagtcatagactataaagcggaagatatcaaaactgtaaatctcattaaacttttcaattatttaaaggattgaaaggtgaaagtagagttacttgtggcgtattttgtttaattaactaatgtagttgtcctatcttttagagctcactgttatggaaaactgatgcaatcatgtatagttgaaatacctttgtagcctgtaggtgccacatgtcttattaggtgttcttatttcttttactaaaccttctgagtaaaatttaattgatattagtggactcctaaaagaagaatggacagaccgaatcacacttttggctccacaaacactttctaattaatttttcttaagtcaaattagaagagcttgttattcatgttagtaagtaggatcaggattaaagtttaattgacaaaatacttgaagttacaatgagtagactgcataatacaaattctgttcaatatattaaactacacctgtttcttctctctgcaaatttcaggttctaaagaacgagtttcctaaaggtatcgacatcatctatgagtctgtaggtggccaaatgtttgatctgtgcttgaatgcgttggcagtctatggaaaactcatagtaattgggatgatttctcaggttagtttatttgattggattatagtttcatcttttttccagcttattgctttgcaagaaatttttgttagtaatttggtttgttgaaatcaattgattcatctggtttcagtatcaaggggaacaaggatggaagccatcaaattatactggattgtgcgaaaagattttagcgaaaagccaaacagtggtatgcatctaatctaatacatgtacagttggttccatttcctctgtatgtattttcttcatgaaaaatcttagtaggtggtatttttcaattcaattatgatccaatctacttggtgaatccaagtcttaactatggtggcgtttggtaacacttttgtttttaattttaaa

SEQ ID NO: 382282 - DNA, 2512 bp, Cannabis indica
tttagaggagaaaaaatcagccaaagatttagcaaaataccccaatggaaagcaatgagaatcacgaaccaaaactccaaaaccaatactactattttcccaataaataacatcatccacatttaattttaacaatccaacaggaggtgctaactggttaaaaaaaatatgatcttttccaaagaaaaaagaaatatttcaaatgtgttatgctgttttatgattcctgaaaatgctatttatctgctagcctcagatattgtgttagttttggtaaatttgcatcttttctagaagtggtatttgtgttcgtaacttcacataaggcccaattcagtttatgatttaagtgtggcccattttgaagttggaaaatgatcagagaataaaagagaccgaacactcaaacccacctttcccaaatcacgaccgacttcttacgcaaggcaaggcagcacattgaggaaactgactctcctctccttggaatattttaggtaaaaccatactcatagttcccttttcaatggcgacagtcggggtggaatctaaattaccagaggccatgccggaggagacttgctcagccaagtcgacgaggcaaggggaaggtctcagacagtactacctccaacacattcacgagctccaactccaggtccgccagaaaacccacaatcttaatcgtctcgaagctcagcgcaatgagctcaattcaagaggttcgctttttggcataaccctaattcttggttatgataattgtggtgttcgtttggtgctgattttatctgcttgttttatgatgaattttggggctgggtttttgtttttgttcatagggtttgtttcatttgaagtctgtaaactgtggaatttatagggttgtttgtcgctctgaagaagtgatatattgtgtaggaaacgcttaaaaagtggtatttgaaaatggggattttgggagggatcctttgtatgagcaatttgaatttcgattagaatgattactgagcaaattttggtacatacataaagtatcatgctaaaattttgctacattttcctgttttctgatttataaatcaccatcccctgtttaaatttggtactgagaacgaatttttgtgttactgacatcggtggtaacgtgaatgaaaacccatccggttaatattttatttagtttggtgctgttttaatcgaacaagtactttagcaagtaagtattttcttggtgagtttcggtacatctaggtgcaactgattagtgtttcttttcaaaattccataggatatatgttggtagtttgtttttattcagagttggtttattacagttttgattctatgggcatagttttaaatttggaatgttgcattagtgaaagatgtttaaatgtgtacaacagtgaggatgcttagggaagagctacaactgcttcaggagcctggatcttatgttggtgaagtagtcaaagtaatgggaaaaaacaaggtcctagttaaggtaagtttcacatggtctccggactctctgctaagtttgtgttatttgaatcttcctactgtaatggctgtttattctaaatttgttcaacctaatgacatatatttacttctttcttattgcaggttcatccggaaggaaaatacgttgttgatattgataaaagcattgatatcacaaagatcacaccatccactagagttgctctccgcaatgacagttatgttcttcatttggttgccaagtaaagtagatcctttggttaaccttatgaaagttgaaaaggttccagattcaacatatgatatgattggtgggcttgaccagcagatcaaagaaattaaagaggtacttcttgccatatccttagttgcttaagttccatttctttacttcaagtatacaattcgtcgcatatgctgtatcgttttctgattgattattacagcattgatttgtaaattatgatgtgtttcaggttattgagcttccaattaaacaccctgaattgtttgagagtctgggaatagctcaaccgaaggtaatgctggatttcaagttgtagcattagcatctggttagcaacacccttcttgtaatcattgaatgtttatcattctaaatctctgttatcttattttagggtgtccttctctatgggccccctggtacaggaaagactctgttggcccgagctgtggcacatcatacagattgtacttttatcagagtttctggttctgaattagttcagaaatacattggagaaggttctagaatggttagggaactttttgttatggcaaggtttgttctgatttttttctttagtccatgtattagtgctagtttccttcattcacgtggtatagttttaatatgttgccttaataacttctgtcacccattctgtttgtgtcattatgttttgctggtgttgtgaggctcttatatatctaatttttcttggtaggtgtgatccattggacatagatccaatttttc

SEQ ID NO: 382283 - DNA, 2123 bp, Cannabis indica
gaacgtagagattgattaaagattgtaattagcgttccttaaacgttttgatatataatgtatgtatatattgttagtgagtcttacatttctaaacgtctaaaaagataatatagaatatataagacttatgagctatttatctcttataatcaaatggttttgagacgaaactccatacattacaattcaaataaaatatcataagaccaaaataaaaacaaaaatctagataaaaaaaatagtgataagtaaaaaaaagccactaaaaatctaaaaaaacttataattcgagattaatttttgaaatgaaacttcatgcatattacaattctctgctaattgtatttattaatattattttggtcaattaaaactggtgcagtgaaatggccaatatttatatattcaactgaaaatgataatatatatctaaatgttggaaaatgtgctaaaaagtttgtattaaattctgtgacagaaggaggcttaaattattggaactaatattgcaataataataagagcaatgctattaggcaccagtagtgcctagcacttttgcgatatgttgcgttgcgattggctagcgatactccctaaaaactattatattaaattatatgggacccgatacttagttgtaccaatagcgatattgacacataggaaggtgctaggcaccactggtgccctttagcatttctctaataataaatacaattagcagagaagaagatgatccctatagacacaccgaaaaaccctagatttagacctagaaaaagaaactaaccgctccattaatttttcactttaatcataaaaataaataattatggtcaaaattgctaatttatgagacttgtataatagtgttaataatacttattatgtgaaagtcttttgaccattttaatgtgtggtgtgttgtgtgagtagaaattatttactttatgataaaatggaaatatttaaatacaaaaaagaaaaaaatgttaaaaaatattagtgatgtttaatattttttttatatgttaatattgttattggttttattaagtatcgggtctaattaagaggcaccgctaatactcaataacaacgttcaacaacaaaaaaaaaaaaaataatgagaattaatgcaaactatatacacattgtatagtagttctatataggtaagggtaaaaatatatacaaattaattaaatttagcaatgtatatataataaatggagattcgtactaagccattaaggctagtttagtggtgagggaaggatgggaaaagagagaggtcatgggttcgaatccaagacctttaagctacaagctattaattgattgtacaaataccattacgctacactaaaaaaaatggtgattcgtacaataattacatatttcattcatcaggattggaagacccattttttattatagcagtcttgtcatgcatggcatggcatgcagcagattcttacaagcagtaagaagtaagaacacgtacattctcaacattatattaatatgaaccaaacaccaattatataattacacgtgtactcttgttttgcttaaaaattgagcagctggtttccattaatatgtgtttagtattttcataatatagtgaaatttttttgtgcatctctccaaaaagttactactctattgttggattgttttttttttcttaaatgaaactttcatgaggaaaaaaaaaatcagcattgagtatatcgtaaaataatatgaaaaaactctcaatatatatacttccgtgatatgtactttcacagaatgtatttcgtaatgtacggtagctgttaaataggaggagttatttgatttgagggctggagttgacctagggataattaggttaattaaaaaaatggtaacgtaccctgagactcatctaatcactacaaaaaaatttacttttagtcacaacaaaacttgtgactaaaagtgaaaaaattgtaactgattataaattatgattcctatatatattgtgactaaaaggtccgtggctaaaagtattatgattcctatatttattatgactaaaactaaattagtgataacttgtaactaaatactatgttttagtc

SEQ ID NO: 382284 - DNA, 3139 bp, Cannabis indica
aaaaaaaaaaaaactaacaaaatccacccagataatagattttattgcttggaggaataaaaacagaattttatacattcagttgcagcaagtaatgtatcttggacaacttacaaagccgagagtgcatcccttttccaggtccacctgctgagaaagatccacctcctcccaatagcatctacaatgacggaagattattattatttcccgcaaatatcacccaaaaaaaaacatgtagacatgcttaaggaatttagagaacaaacagtagtacattaaaagaagggaaccaaagaatattagacacatcaagtaattaaagaattcagtagcaaaacctgtataacagtcaattgcatagcttccttctccttgtgccagccaccaggaaactcaaacgcaagagcaaaatgggttctctggtgaagtaagataattacattttaaatttttgaaaatgtactgagaacaaagattacttgatggatagacataccccagaatcaacatgacagcgatagtcacctcctgtatacaaagactttggctcttcaggacgagggacactaggtagatcagacaaaagtggttcagcaatggatactagctcctcatgatcaaccccataaccagcaagtacaatcctgggagctgtataattttcctgtaattttcattgaaatcagtccacgtaaagaggccacctttaaagttaacatataaactataaacatgcaagtctcagaacattctgtacaaacacccagatatgcatacgtaaagtaactagaagatgatttgatatagtgaaacctgcaagaagatagttatggaacttacagcaacaaattcctccaaaattgtaccattcaatctagttattgcagattctggagctaaaagaggattagccagagctcctgaataaccagcggaatgaattgcttccagaactaatgcgtcagggttgttggaagcttcactaatctcagatttcaccttctgaagctgtgaaaactaaatatgattagccatacatcagagaagtaactatctttctatcatacaatgattacgataatttacctgctcattgacctcccaatccaggaaaacaggattcctaacagagtcagcaagaagctcaaccatttggggaacataagtctttaaagcatcaaatgtataacccatctgttctcgagaagctgaggcttgtacatgcccaccaattgcctccacctcacgcacaacacgcaagtgactcctatttcttgtactcttaaaggccatacgctccagcaagtgggaggcaccaaatgataatggtgtttcatatatagaaccacaatcaacatatacgccaattgaagcagtaggagtctgttgaagcaacagaatccaactccaattaattagttttaaagcacgatggctcatgatagccaatgaaaaatatagaaaatatatcacaaaacatttattcccaaaaagacacttaccgctgatgtttgggaagctattttgaggccattaggaagagttgtaattttggtggaatctggttgaacgtggtctggcaatggagaaggcagattgacacccggtagtgggaagtctagaggaggtaaagtcctagaacctccaccgaaaagccatccaaatagacctccagaagtggatgaggactgacttgttgaaacagcacttgaacttgcaaaacggacgagttccctatggcagctacgaccctaataaccattgtttggtaagatgtcattaacccattgccaatcaatctaactactcaattgtaataaaaggcaccaaaccccaaaacaggagtaacaagtaaagcccagtgtaatctacaaacaaaacacattttctttgctatccatttacatcattaacattcgaaaaacaggtgcgtaaacaaaagaactaaatgattcaactcaagttcatggaaaacttgcattaggcttaagtaaatgaattaaactaatttcaagatttctaaattcataatttttctacattcctgacatatttctggaaacaaacactacgataaaatcatataaaacaactatcaaaagttctatagaatcaaacgagagatctaataagcaatagatacgcaaataaccataaatttctacgaataagattggacatacatagaatcattcgcaaatgtacaaatgaaagatgtgtatgagtaaacatggattcgagctaaagatcaacccgtagggttacggattgggagtttttggggataaaataaattactaacccttagggccctgaggcgtgaagctgtggctctgtacatggcgatgaactgcgaatagtgacgccctgagattgtcgggactcggatggtatcgagggttgggcgaggcgtaagggtctctctgctcgattggactttgaaggttcaacaatttgatttgacccttttgggggagaaagattgtcgcatggcattggcagggataggttgtacacgtgtggggcacgtgcgaattacgttgcagctccgaattccgattagagcagggaataatctggaccgttaatcaaagcaaagaacaaatggaattttaagggtaatcatcctatggcccaaacaatctatgtaatgaatattagttattaatttttaggatttttacagtatatactaaaattttcagtttttttacttttttatcctgggactgaatttttatcaaaaatattgtgtttttttcaaaaaatttgtgtaagctttatactatatactgtgttaagttgtcacagttggtttttagttgtttactgttgttgttctgttttgttgttttataaaaaaaatattacttttgtaaaaaaatctgtgtgatagtaaaattgtaaacttttgcctaaaatctaatatttttgtaaaaaccccaaaagaaaactcgtgaagacttaggcccaaagcagacaatatcatactaatgtgggagtcgaggttaggtagcgacccgactaggtagaagaatggggtccaacaagtggtatcagtgccaaaggtttaggagtactggggtaatggactgcatttgcaatgtgtgggagaaagaaaccctcaatgtgatga

SEQ ID NO: 382285 - DNA, 2180 bp, Cannabis indica
ttggtgagcacatggggactcacgtcccagaaccgaaagacgccattacaattatgagacaaaccccacctagcgagagcatgggcaacaacattaacagaacgagaaatccacgaaatagaactgttaaaaccttctaactcactgtgaattttattgaaagaaaaacagacattccaccacagacatcgacccgtcgacagagaactcaccaattgccaattatcagagtagaagtccacacccaaatcagcaaaaggccgagccatctccgcgccaaaggcaagcgcctccagctccccttggaaagaagaggaaactttcaccttcttagctccaaaacactttacgagccttcccaacctgttactgcaccagcatcaatatgcataagcacacaatatgctatgtaaatatttttttttagaagtgttaaatataatttcttattacaaattcttagtttgtcttcacgtcccaaattatatgtgaatatttttttaaaattttttatagcattactcgttataattacagtattattcttgtaaattttttaaaaatttcaaatagtttacaataccaaaaattgagttcataatatcacagtttattatgcatgtttaaaaaaattgcaaacgtattttcgggcattgtaaactatttaaaaatttttaggaatatattgtaagcctaatgaatagtttctatacaaaattagaaatggaatattttaatatggaataaactatttatatttttagtgagaggagacgattactataaaaagcgttggtgtaatcattcaaagtagatcatactcaatcatattcaatattcatacatacacacagagagaataccaaaccaaaatcaaacagaacacagagatcaatcatcataatctataaattaattaacattaacaataatgttgctgaaatacctttattcaggagcaaaatcatcatcatcatcatcgaagagatcattatcatcagtatcagatcatcatcaccatgttcaagttcaatcaaggcacagagctcaacgaaatcaacagaataatattacgatgcaaacgagaaacaatattctgttggaagctattgcgaaatcatcaaacggtgtcgtttcgcagacagaggaaaacggagttgtgaagatgaaaatcgttttacgaaaacaagatctgaaacagatgttacaagtaatgggaggagaagaagaagcagaggaggagccacgtcatcgtaacaatacgtcgtcgttttcggctgaacagaggctcactactctaatgaggaagaagagaaatcgccgaagttcttcttcttcttcttcttcgttttcttctacttggagtcctgttctacagagcattccagaataataattaagcttctgcttagtttgacctttttcttttttcattttgactataaatttattatgattaattaatgtcgaaatctgattatgatcaatactgtaaatttgatatatgcttagcttagttttatttttgaatcgatagaaatattgattttgtttagtgtttgtaagctaattgtatatcaaatatcatgattctggtatatgggttcattattttttatatggattgatttgatttgtgtatattcttgtatggttcctttgttgtgttttttttttaattttaaattttaatatatattaaattataattttgaacttttttaattgtcaaaatttttcaaaaaaattattaagattgttgaatttagaaatttttatctaattttattcaatattattaattttgtgattattataatatttagacccatgttaaactttaatttcttttaatataaattgaacattttgttttaaccatttgccattataataataattattattttaataatgagacaatttcattattaaaggatgatattactaggtctagaagggtagcatatccacttactaccatagctagaaatagacaaaagacaaagctggctttggtaggaatgggtaccaagattaaacaaataaatgaggattttacttgaataaagatttgagaaaattactaattatttataattttataggatgtaattttatagtggtctaaatattttagagtctgataacaatgcttattttattgtgacagtcagtag

SEQ ID NO: 382286 - DNA, 2800 bp, Cannabis indica
aaaaaatggttattcattagtatctactctcacattggtaggctcttttattttacagcaaaaaggaaaaattagcataaatacttaactaccgcctcattaatagagtcccacttctacactttcttatcaactaattcttataaatacatcaatttataacaaccttacatattttactaacccttcttcttcttcttctttctccttatatatactaacatattttgcctaataacaaatctacatagccatggattggtcctcatggctatccaaaaccagcctagagccacatctagtccacaaatacagcctctgtttcacccaaaacgagcttcaatacgaagacatagcatccttaaaccatgagtgtcttcaaagcatgggcatagtcgtggccaaacacaggcttgagattctcaagctagccaagaaggaaagtagtaataatggggccaaccccagatccatttcaaggctttttgtagctataagtaagaccaagaagtcgtttagcaagtattttagtcgtttggttgttcatgatgacatgccgtctaagggttcgcctgagagagtgaggtaccaccaccaacaccaccattaccagtaccaagagcagttgaaaggagcttttttgagaaaacagaacagtggtgagattgtcagagatgacaggcccgcactcaagaaggctttagctctttcagggcccattgatttaagggtccatgatcggttgatggcccataataatgctactaagagtttgaagctttctgggcctttagatggtaagcttaatgagaggttgatgtacccgaataaaagcccaagattgatgactgggccgcctgatggcaaaattcttgggacggagaggttgatgatcatgacgactagaagcccacgattgtctgggcctttggatggaatgggccaagataggttactggttgcaaagaaaaccccaaagttatctgggcctgtagatggcaggcctccaagcccaaagttctgttgcccatatgagaaggaaaaggaggaagttgagtatgatgaacattcactttggcctgcactgttccaagacatgaaacctacctagaaagattttccaggtctcttttcaaaggtttgagattgaattagatataattatgtataactttcagacttgtttttacttcatagataaatataatttacagtgccacttgtgtttgacctttttttatgcataaataaatattttgggggtgtcattagaagtttcctgatacatatagtgtatgtatttatgtatttcccttgtattttttgcaaacttggggctttgtctattaatactgttaaatattgaggcattatttgggtattgagtgagaggaacgttctgacatgtgaggcttgattgaaacattatgtttgttttaagtttcaactactcattgggttatcagctttggtattattattcattgatgattcactaatttacatccctaatttactatgttgggtggaagagaaaaagtaaaggtttgaacaagaatgtcataaaaaatgaacagtggagagaaaattagaggatgttcttgcatttatttatttaaaaataaaggttaattaggatttttattcccgaattttgacatgtattaaattatgttgtctgaacttttaagttcgttaaaaatgtccctgaactattgcaattattggatttaaggacttttgtctaatttaagtaaaaaaatttaatatagatgaaagttcagggagcatgatgtagatatcaaaatctgagacagcataattttgtacataaataatcactgaaatagtaaaattaaatgaaattaaataaaagtcttcaaatctaataatttcaatagttcaaatgaatttttaacggtccaaaaaaatttaggagtgtgatttagtacatgttaaagtttaagagttaaaaatagccaaaaataaatgtacttgatttttccttttttgacagatttaagttcacttgacttgaaacagattgtttgctgatattcagatttgaatgtaatgactgttctagtcaagtctgtttccagtgactgaataacaaaacaatgagtctaatttgaagcattaatatgcttttgaattaacaaagtatagtatttatactgaattcaacaaactcctgtcaggacagagtatatattcttattctaataaaaagaaagagtaacgactactttttattattattattattagtattaaacaatgaaaaagttagatgaattaagagaacaggctgtccccttaaattcttgattagcagccattctgatttaactcaaataaataaagaatggaatccacatgccctatatcagcaaaattataataataatcaaaagacacacccaaaatgatttcccttcacaagcacacaagccactctagctggcttctccttctgacatcatttgacactaagatattttcaacttggtagatttcttatgattctttagttcagacacaaagttgaaactcttatatgagtgttcttgggttgggaacacatgcatggcttcatctcaaagtgtcctctatgagtcaataaaagcacgcaccttcatcccgacatttcatatggatcttgtactcatttcagtcttggtgtttagtatggcgtgttcaaactatagggaatattaaataacaatatttattatatttaaatttagagtaatttgcggtatcaatacttaaattttatgtcgagtagcagataaat

SEQ ID NO: 382287 - DNA, 2799 bp, Cannabis indica
actttgattcccgatagctgacttcttgcttcggagcgcaccatcagctttaagagaacttcactgcacagaatgaatagataaggcgagaggggatccccctgcctaaggcctctccctgggctaaaaggtttcagtggctctccgttcaggaggatcgagaaagataccgttgagacacattgaaatattatattgcagaacttttcattgaatccattagccttaagcacccgcatcaggaatccccattcaagcctatcgtatgtcttgtgcatatccattttcacagccatgaatccccttcggcctttgatcttattaagcgcatggagtgcttctgaagcaagcaccgaacattctgctatccacctcccaggaaggaacgccgattggaaaggactcaccaacttatccaatatcagtttcaatctgtccgtgagcaagcgcgcaataatcttatacccaaagttgcacaagctaatcggccgaaactgatcaaatgatgaaggattttcacactttgggataagacaaatgaaagtatgatttagtttttccaccaacttgccatactgaaagaactcctgcaccattcgacatatctcctcaccaaccgagtccctgtatttcctgtaaaaaattcccaaaaaaccatccagccccggggcctttagagggttcagtttccagactaccgccttgatttcatctcttgaaggcacacgacataactccacattgtcttcatcattcacatttctttcaaagagcgtctcgaactcatcctctatccgaggttgttggcttgtaaataggaagcagaatttctttgagaagtactcccccataccttccctgtcgaaaatccatctattgccatcattaagaagagcacggatagtattcctttgacgtcgaatcatggttgaagtgtgaaaaaactttgagttgcagtcaccaagcgccacccagagttcacgagacttttgcttctaaatccttttaagcttatgttccatgtcgattatttccaattgcacctctgcctcctctgcacaagcctcctcactgtgctgagactgcaaaatactcagtctagcatagagtctcttaagttgttgatcacagaacccgaaaacattcctattccaatctttgggtgcaactttagtctccctaagcttcctacacacacggatgccaacttgcccataacacgggttactttacgcatcttttataatagcttcgcatctcgagtcacacttccacacttccaagaacctaaaagggtagtgaagcttttgagtaatcggttgcgtatccagaaccactggagcatgatcagaagccataatcggatggagtaacactgttgcttcaggaaagttcaaacaccaatcagcactggcaatagccagtcaagccgttttctaacagtatttagagaccctctttttctcatccaagtgaactttggtcccacgaaaccaaggtcgactccccccgtatcaatcaagaaattttggagatcaaccccctctcgattctgatactctttgcctcctcttttttctgattcattcgcaataacatttaaatctccacaaaccatctatttagattcacagtgtcgaactatattcgtcatccattgccaaaagacctttttctctcgcccatacggagtcctgtagataaggaaaagagtccaatctttgctgtggccttcctcatttagtttgtgatttatttttctctagttaataagttcacattaaattaaatttttttgttaattctttatttgggttaatgtgagctacaaagttcacatcaagcctcttttcaactaaagttggactctaaggtaagggtccttagccatgtctccattattttggccgtaggagtcaatcacattagtaggtgagatcattccaatacataaatttagtaaaaaattcaaggtaagaaaacgtttggttatagataaaattagcatgttacctactatgctttgaagtgggagcacaacaacaccatattattgtattgcaataaacagtggcttggaaacacacggttgctatccatttcccaagtttacatatagttgtggaaccatttattaaagtcttgtttctttatttcttatattttttttttgtttcaaactggtgcataatttgacatagtttgaactcaatgtagtagtttacttgcttatttaagtttaatattttaattggtatgtgaaatttcaagaggagtcactattcatttggtatttgatatttactatgatgttcgttataggtaatgtgctgtaggaatttatgaaataatgcaaatatatttacattagaaattttttaattagttttgttccttgttgcaggttgttgtgtatctaaatgaataaaatagttcaggttattatccttcgaagatagaatggttcatgtttgtaacgcattgacatgtgacaagaatgatcatgttgcattggtaataatggagccattttgtatgttgatgccttcttatttaccatgctttaattttataaatgtgatgttatagacttttctgctgcgccttatgttgggaagacacttcggtggcgtttggttggaggtaataaaatggaatggaatggaaaggaaacaattttcatttcatttctttgtttggttgcatataaaagtattggaatggcattccaccattttagtggaatgactattccattttaaaaaggaaagaaagaccattccaatataacaagaaaaa

SEQ ID NO: 382288 - DNA, 2078 bp, Cannabis indica
tagtgcaaatacttgtaatatatatttgaatgtagaagtatattgataaagttgttgtgctatgttcttttctattgatctcgcattatagtcttagaaagaagttagggaacatgtatgttattctcctgaatagaaaactatatgatgtgtgctgcaagcaatagagggctttacctttcaggttatgagttttgtttcgcagatgttagttaccacttgttatacctttgtgagaatggaatagaaatttgcatgatggagaagagcttgaaaataaagcctatctatctctctctttctctctgcaggtaacaatgcaaggagtaattcgaggatttttttccaatggaaacgttgtgaaaaatgcagttttgcaacgcatttctcttgtgaatccagtgttgcagcctgccatcctgtcacgttttcaggggactacaactgctcgtatagaagagcatggttttgaaagcacaactatttcagatatcatgaaatcgaagggtaaaggtgctgatggttcttggctatggtgcactacagatgacactgtttatgaggccgttaagtcggtatggacaccattttgatcctttcaattcctacaattaactttatccgtttgagtctgagatgctttctttagcgttttgacttgagcaactctcttctttgcagatgacccagcacaatgttggtgccctggtggtcgtgaaacctggagaggaaaagtcaattgctggaattattacagaaagaggtttgtctactttttttgttgcaccttataacagatatcattcgataaacacttatgctattctgtaaccatgttttaaatctggtgatatagcttgcaaattctgaattaacatattactaatgtttggaagttcaagtttggaattgttaaatttttgatgtcttttgtctgatggtatatttccagattatctgcggaagatcatagtgcagggaagatcatctaagtccactaaggtcggggatatcatgactgaagaggtatagtgcatagaggtttctttgtctatagcagcgattcatagctctctggatttagattttttctttttgtctatggttatcatgcaattgtggctcaaaatgctatgacatgatggctgcagaacaagcttatcactgtcaatccttccaccaaagttttgcgtgcaatgcaactgatgactggtacatttgttcttgatttggaatttctcaattcatgttttcttattttatttctctcaagtaaaagatacatggtctaaatctcgaaattgatattttgtggtagataatcggatcaggcacattccagtgattgatgataagggaatgattggcatggtgtccattggagatgtggtacgagctgtggtgagtgaacataggcaggaacttgaccgcttgaatgcttttattcagggaggttactagatgatgacgacaacgaccatgatgatgatgacaaagatcagacaggttgccctggtttaacagtgaacaataataggaccaggtgcatgtaaataccctttgctctttgcaactcctattctggttcttttcttttcttttcgatgttcatatgctatgacatcaagataccaatgtgggaactaacatggttaataacgagaacttattttctgcttaaatttctggttcctatattggtcatagactcgtaattgtttccctcatctatggtgtttgggatcttggtttttctttgagagtggaattttccatccatcaatttgtttttgttttggttaattttactcatctctttgttataggggggtgtaaaacatctttggtttttcttaaaaaaaaaaatcattacattgtcataaagatttaagaacaaaccagtaggtggtggatcaggaagttattatttccttgaaggaatattcaattacaattctgtattatttattcctcactaaacagggattaaatgatgtaaaaaattgaataggactcctagtgttgtaggtctctgttgtgaaaattgtgtacgcaagtatacgcaatcgtaacaagta

SEQ ID NO: 382289 - DNA, 2975 bp, Cannabis indica
aaaaaaaaaaaagaaacttcattttaaaaccttaaaaataaaatgatgataataatagatagtgtggaatatggctttgttgaatagttgatctatatatcatatctttttatcataattgattacaggattaatcttaaaatttagctagtcatacaagaataatatttttgagttctcttatttagaaaaaaatatatataataatttttaaaattaataaaataaaataagtaattttaaaataattttgtttggcaacaaaagaattgggctgcatctaatattgttgtatcagcgaaaaacatgcttgatcagtataaatatgctcaaggtagaaaaggtctttctttgtctcctttgaatgaagggggcgacattatgagcattagaatgcacctatgttacataagattaaaattaatgttgatgggactttgtttgatcaggagggtcgatttggtgtgggttgcgtagctcgggatcgtcatggtaatatgctataagctttcactaaagggaagattggccgtattcaacatgaaattgcggaaataatagacatcaaagaagctttaagttggattgtatatcatccatgggaccacgttattttggaaacagatagcttcgtctgtgtccaagctatctaaagtaaattttctatgatttctcagtttagtttacttgttcaagatgtccgtaatttgcttttagttttctcatatattgagttgtgttttgttaaacgatctgcaaacaagagtttcttgccaagcaatgagccaacttagcacagactcttgccaagttggttgtgctaagttggctcattgcttggcaagagactcttgcttctctacaagctgtgtgcttcaattggaggattgttccgctgaagtacgttctattgttttgaacaaaattcttaattaataaagctttcgatttttagtaaaaaaaaaaagaattttatttttgcaattgggctaagtgggccttacgcacaaacttagcacccaatacccaagtcgagcatagttttggcccttttgggtaccccttgcttggtgctaggggttgaaaggttcgaacctactaataacttgcatgtatgcatataggaaggttgttctctattgttgtagtgataataatccctcaaaggtggtgatatgattttgtccctcttcattgtgaagaaagttccatactctttttttagtggactaggttaggttagaaattgtatatagctagatttgagaattactagtctgtatgtgttttaattatgcccacttcatattattttacagccccaagattctatcttttctttgtaaagaatgcttggaattcagttgtaatccaattagaacatcatcaataaaattattcattcatgttatgttatgttattggtgtccattgattttggttgttataaatacaaataattgattctacaaatatgaaaacttaacataattattgagcaactttatgaaaacagaaaaacgtgggctgaatctaataagactgttatatttaccaattatatctcataatcataacttaatatgaatagttacaaatggagatcattttatttggcaatttgataagaaaaccaaactaattactttgttgtgtatatatattattacaaatttcaaacacgtgtatttaatgatcataatattcatgagaaaatcatgtttcacgttttcattaattgttggttgagtcttttgactaaatttggacaaacatggaatcaaaaagggaaaacgtttgcatattttgtaattaaaggcttggccaacccacgtacacatatttaaatataatcacttaatttctattataaattaaaaagtatataaagtagagatgcacatttcactcatggaattgactttgtagagacccacctttaatagggtagagatttttcgtctaaatgaggaacgaagatgacacttcctgctttaacgggaacccgtttagtatttcattttaaaaaaatttacataattaaccaaaaacttaaaaaatttacaaaaatacatcaatacggaaaaaaatttcatttttactctttgagtttttttatttacaaaaatacctcttcagtgaaaataatgtactgttttttagttgttttatagtttatttattgttgtattatagttgtcatgagatttttttgtttgttttatattgatttatagttgtcgtggaattgatttataattgttgtggtcattgatttataattgtagtgggattgattttacgttattttttattttgtatgtttaattttaaaactttacaagaatatttttataattcaaaattttaagccgtaaaattgtaaataaaatataaaaaagatatttttgaaaattctccttcattttatatttctaataacattttataatttatatttatgtttttaatttttagtatattagtatttttttttataaattttaagttatgttttggataataattagtttattgaataataattaatgtgtaatattttaattttttatatagtttaacatttttatatgtttgaatttttattataaacttttttttttattaaagaattcgccgctccgtgctcacctctattaggggattttgcgccccatccctgatggagaattaacatggatgggaattaatggcgcttttactaaattgtaactgaaattagaataattaatgggagaaatgaatcgaattaaaatagaaaataatcagaaacaatattttattattgtttactaaatagtgtggaaagaaaatcaaaactattatgttattttgtttacataactagaaaaggtaatcggaacggtttaatttgacaaaattactattattagaacatattattattttctgtttatagattttttaaagagcatatttatcttttttatttt

SEQ ID NO: 382290 - DNA, 1343 bp, Cannabis indica
atttaaaaacaaaagtattaccagacgctatatatattagtaaaaaacagttattttgtgttagttaatacgttagtcaacattgttatgtatgacatatattttttttaaatgtttttttttttcattctttgaacatgatagaaagtagggaatcttaacatgtgatacttgaagcatgattcaaatgtttagaagtctagtcttttataaaagtagagactagagactataattataaacatacagtaattacataaggcatatatgagaatagaatagattggtcctagctagagactagagaggctaataatattgcttttccattggagtaaagaatgtttccaacttaagtggccaataaattaaaagtgcgatgactttgactaccatgcatgagtgataaaattatgagtattgttattaggtaccaatactacttagaatcttctcgatatgtcgagttgcgattggctagcgatatttcttaaaagctattatattaaattatatgagattcgatacttaattacaccaatagcgatattgacacaaaactagacactactgatgtcttttagtatttctctaaaattatgtaaggacatcacaattaattaataagcttgacttaaccaaatttcatggcctaatttcgttaaataattttctttttggtctttttcatatacgtatacatagtcttaccttaacgtagtctttacgaatttatagtagtttcgacgttgcatggtaaatgatgaaagacttttgtggctgttgtttttttgaccattacacttaatcatcatcatagactttaataattaatcaagtaataatagatattaaatgcatggtgtctttttcatagtttggacgtgaaaaatacgatcgaattggtttcattattgtccacatatcaattatattgatcaaaataaatggaaatgacatatctataaaattcagttttttccttttcttttcaaatgaatttagaaaattaagattattaattttaattagctatagatacatttttttaattgatattttcttaatgagtttgacactacgtacgtgaatgtcggttaattaattaattaattaatgcactaatatattatcaaacactattttttgatgatatcataattcatatatagacttttttattggtcattgtcatcattatttcgacgtaaataatacgaattggtttcatgtggtcatgattattttcatttccacttggtaaatacgaaataatatagctatatatataatacaatctctatttaagaatattctattcaagaataacctctaatttgtta

SEQ ID NO: 382291 - DNA, 2611 bp, Cannabis indica
aatgagtatgttagttaaaatttcataataaaatattaaaaatagctttatggtaaatataaaaacattacatttattgtgatgcaaattttgcatcatgctatattgtgatgcaaatttagatcacttttgattatgtgagaattttgcatcataatttagcacaccattggagtacacttttaacaaactaagttatattttgtatttgcatcatttatttgcatttccattagagatgctctaatataaataggaatcaaatcacgcttcccgtgtggttgtattttatttagtaataattaagtcataaaattatattaaattttaaatttttcatttttgtagaaatttgtaatagtataaataagtattctactaaaaacatatgataataaataaattaattaatattgtactaaaaataaattaatattgtagatagacttttatgtttttaattattttgaacaaaaaagataattaatctatgtgtccccataaacatgttggaggcttgggtttcaaatgtctaagggattttaatttggcccttttggggaaacaaggttggcgtttgttgagtcatgaatcctcactggtgggtcgggtttttaaattgtgatattatcctcatagctcctttctctcagctgaaatgggggataatccaagcttcgtttggcaaagtatttttgaagctaaggacctattgctggctggtgcagtacgttttataggtacaggttctaatgtttccattttgcaggatccatggctccctgattgcaacccttttgttacttctaatcacccaacattatacaacaaagatgttagctgcctatttaagatgaatcgagaacttgggacgaagagattattactaatctaatgtctgagatcaaaatctcagcttctctacacagttgagtgattcagcatgggtcgatcattggccttggaagtttgagacagatagtaggtacactgttagcagtgcatatcgtcatttgcaagtgatcaagggggcctggtttgattctaaaaccactgacttctggcgtaaattatggaatttaaaaattccacctaaggtctacaacttccttcggagggctgcttcggggtcccttcctacttgtgctcaactggttaaaaggcatgttgccgtgagtgtcatctgccctttatgccaggcaacagatgaaataatttttcatgcttcgattggttgttcttatgctcgagcctgctcgagtaggaccatggtggacattggcaacatcctggatggcaatttttatagttggcttctggtgttggctggcagaggaaaaacaggggagcttgaagagctagccatggtagcttgggcaatttggaaagccaaaaacgatttcttctggcaaaataaaactcgtattgctgcaaatattgttgcttctgcaagatcgccttgatcaatttaaatatgctcaagaaagaagaggttattctctttctcacctattggatggtgaaaaaaggactgagcattggattgtaccattgataaattacattaaggttaatgtagatggagcattgtttgagcaagagggtcggtttggtgtttgactgtgtggcttgaaatagccaaggcagggtgttagagaattacactttgggcaaactaggacgagtccaacctgaagttgcagaaatagttggcattaaagaggccttgagctggattgcaagacatccttggcgacaggttatcctggaaactgatagtctaatgtgtgttcaagctattaaaggtagcatctctttgtcatctcaatttggtctcttagtcgaggatgttcgtgactttttattattttatcaacgtgttgatttatgtttagtaaaacgatttgcaaatagagtagctcatagtcttgctaggagctcctgtttctcaccaggtcgtgtgcttcagttggagaattgttcagcttaagtgtgttctattatttttggaagattttacttgttaataagaatcaaaggtctaacaattagggactctcagaattaaataagtaagtgagagaagagtgagtcacgagggggtaataatataaatttaatgggtaatgaaataataataattaattaaactaacacctttgttaaatctctgttaaagttaacggtaatgatattaaaatacggttaaactaacaaaaaaactgttaaatagccacttttaatatataaagatattatatttatattatataatttattaagaacaatataatcgtctatttaattaagaaaggatgtaataggtaataggtatatacttagatctaaggtgatctgaattaggttttgagtgagatttattctcagccactcaacacaatttatcgtattattttaattaaataaatgattaatcaaaacctaagaaaatgtatatataaagaaagacaggaatatagaaaaacctaatgtctcatctttctcttttttttatttttgtaaattttgaatacaacactaatgtgtaactcaaaattttcatctctcattcctcaatgatattattgttgcgttttatgccctaaataaa

SEQ ID NO: 382292 - DNA, 2035 bp, Cannabis indica
tattttaaaaaagaaaattagaaagtgaaaatatatatattatcctaattaaaatatcaaacctctctttcttcttcttcttcatacaaatcttcattgtgtttctttctggtttttgaaaatggcggacaacaaaaccatgacttctccaacccaatacgacgtcgtcaatgccaaatgggacacgtgtttggatctcagtcttcgtcgtttcgtgtacggttcattcggtggagccttggctggtcttcttctcttcaggagtccagttactcgttgggcatctgtagcttttggtgctgggattgggattggatctgcttacactcaatcacagcaactattatcatcatcgtcatcatcccaatcttcttctgtaaaggagaattaaacacttgaatcttcggtaaaacctaatttttcatttcataaataattttgatttgatgttggatttgatttgagaaaaatttaaatgttgtttcgatggatggagttttgataagaaaggaacaattgtgatggtatttttgttgattaggttgaatttgggattgttgattttctgaatatattttcgattgtgtgaatttttcatagaatttattatttgatgatgttggctttgaatatttatttgaagaaaaaaaaaatgctttgatggataattttgtttacccatggatttgtaagaatagaattaagatcacaagatcattagtgatgatatttttgttgattaggttgaattttgggattaatttgttgaagaatatatttttgtttgtatgaatttttcataattattttgattttgtttgaataagttggttttgattgaatgaaaatttgaacccatggatttgatgagttaaatctgaacttttttctctgtaagatcacaagataaattctagggattttagatgatatgttttttttttttttgattgtttcattgaattgtgatgatacatttgttcattagattgaatctgggatttgtttgtatgaatttttattttgatgttggctttgaaaatttgaccttgtttgtgtttacccatggatttgataagagttcaatctcaacttcttgctctgtaagatcacaagagcagcatgggaaagaaatacctgaacataaaaaaattctagggcttttttttagatgatgggtttttttgattgtttgattgaatttggattgaatgtgggatttgttttgttgcatatatttttgttttgtataaacactgatttggggaattaattaaaggttgatatttggtttgagggaatggaataaaaaggaattcattcctttccattgaatggaaaccttttactccattttcatgaattgtaattcaactcaaaattgggtggaaaagataattctatttcagtgtaattttttattggtttcatataaaaagttttttgttgttttagattatatggttattatggttcctttgatattgtttgtatgaattggtatgagcacattttggggatggttttgttgattatttgggggtcatatgatgatgatgatgagaatgttgaatgaattgttgacaattcatttttgtttctttttttagtttaaacaggaaaaagtaagggtagtaatataggttatgacacgatatcacgactagaaaatgatacgaaatgaagggatttggatttagcataaatatgtttggatcaaaataggctaaacacgattagaaagattaaatttcaagtgaaaaacaagttgacctatcaaacccgaaatcgatatgttaaacacattgtaggtggcttttggctcaagaagtttactttattcagatgactttgattggtggttctaagttgttttgtctatatttttgggctaactcgatcttataatagagtaaattttgaatttgtatatctttggttctttaattttgttttacctttcttcacctttcttctcatgttgtgcaagtcacttgtcaaaaaaaaaacatgtataaattattattattattat

SEQ ID NO: 382293 - DNA, 2152 bp, Cannabis indica
tactttataattgtcacacattttatcgccacaggtatagtttgaaattttagcaaaatattcacttacctttgggttagtcaatataagcatcaattacaaacacacaaccatcctaatatttaaataaattaatctacacaaaagaggtcactttgacgacatattgttttcaattaatttactcaaaatattagtcataaaccaacaccaaaatttgaaataaattgtttcttaaaattactcaaaaaaaaaaattgaacttaaaatcctcatacaatatgatacatatgttatcatatcacaatataatgagaggggaaaaaaataaatcacacccaaaatgttatgagggtgagacaatatcaatatataatatatatccaaaacaagaatcaaatcaactgctggtataaataactgctgatacgtatcctttaaagcatcaaatgaaaggatatatatgcacaatataaaatagatacataagattggcagtgacgccagtattattcggcagcaagaaaaaaaaaatatatactttactgaatcaagtacaatagtcgaaccactaatataatgcccataaaattatataatctaaagctagggctttagtgtcaacctccttttcgtgtctcccttttgtgtgctttctgcctctgtgtcttgatccacctctttcccttgtgtgtgtgtgttgacctttaagagtttgtttgtttgtttttttttttgttttttttttgttttgtctgtgttttctcctgtcggtgtgcttttctttgtggggcttgggtgtgttcctccttgtttttctctgtgctcttttgtcttagtgtggttggtaggatttggttggtgagtttgtttattgtcctgtgtcttcctttgtttctcctttgttgggcatttatcgagtcaatcattgtgtccaactcctctcttaaaggcaaaagttttacttgccttgaaacctctgtcaacctaatccctagtgattcttctctcaaggctttggcctcgtgttgcctgtttgggaaagtcattgctcccatggttgtggaagaaattaatgtcactgattttgtggccaaaacctggaaaattcctgtatctgtggtggccttggtggataatgagaaaacttctaatatcttcaaatttgggttcgaatgtgctgatcacagaaactgggctattgataacggcccgtggtgtgtgcgtggatactctctagttctccaagcgtggactccgaccatcgttgggccggttactttccaacttatgcgtgtttggattcaaatccacaacctcccccatgagtatttttcaaaagagaatggctatctcctaggggggatggtgggaaaagtgattaaagttgaactggaggaagctaatcctgcttcctggagtaagtttatgaaggtgctggtggacattgaatttgataaacctttattttctggttgtttttttgacttagctacaggagtgaagcaatggattcaagtgaaatatgagagaataggcattttctgttacttctgtgggtgcctcgggcatcaacgaaggggttgcaaactttcgtcgccggtgactatgtctaacagtgatggcattcccttccccatgtatggcccttggatgtccaccttatcatcgtactcgacggttttctcgggtcctacctctactgtaactcgtggagcctctttgtcgaccctgaggaacaaagatggtcctttgctgacgttgccggcgaccatggatgccgatgctgttcaccagaggagttcccatgctctgcctgctcttcgatcaaagcgtcctgtgaaagggacggctcggggtactgctggtctcgagacaaatcagcgtgcggtgtggttccctaagaaccgtgtccttggcgatgcgaggtcagtttccatatctggcttacctgatgaggaacatgttctgtgcttggaaaagggacctgcgaatttacctgttttggggacgaaaggtaaggaccaagaggttttgaattttgtatccgttggagataataagggaattgtgttggatattattttaccaggatcttctctttctctgatccttgaggctgaaactccttttgctgatgatctttcttcac

SEQ ID NO: 382294 - DNA, 1374 bp, Cannabis indica
attatttaaattataaataatattaatatatgaatatgaattcatcaacttttttttttctgcctttaaaaagaagatgctgacatcttaaggcttctaattttttagtggaaaaagataaggaaatatggcctttgaaaaggtgtgattaatattaattaattaattaattaattaattaaaattgtcttcttttaataaggatcattataccttttgtattattattattatagtattaacagaatattatttgcattaattcctatacacataaactaatgaataaatgggatttaaaataaaaatattttttaattacaaaaataatagaaatggaatgtgtgaatttggatttttatgagggcaaagacaagtatatgacaaagcacaacatttatttatttttattttgctcatctttttgtagatatgcaggctttttctgtccatcacgcttacctgttccctatcacaccaaattattaaattattattaattaattcatttttaattatataattttctcacttttctatctataaattattattatttttttttaatgtgtgggactaaccaattttggcactttttactcattattcatgaagatctatcctgccaatacaagaaaaaaaaaagtaattaatttgatattaattataagtggattataatacaagcaaactagggcaattaattaattaacccacttttgtatgatttatgaataaaccctagctagctatttataaaattcccatttttgggatgagataaattatctatggaattttttctctaaaacccaattatatagaattgtttaattaatttatatatatatataaattgaaggttactctccttgtttattactcctcctaattaataattaaaacaaaagcagcccatccatgaaggatgatttgtgctttatcattttgtaaaggtgtgaagatcataataatatatataaataaataaataaataaataaaagctaggttaataattaattaaagacatccaccaaaaaaacttttttgaaagaagaagaagaagaagaaatgaattaaaagtggtattatttgggttgagctttttaggaaaggaaaggagacaagagctaaaagggtgtttatatatgcacatctttcaaccaatattattatcaacctatctacactcttgttaaatatcacaatctttcctacttttcattatttctatctttttaatttgttcagtcttcattcattatatatatatttatatagcattctcaaaaagatgcatgggtgtacttcattgtatccttgatttttagatatctataaactcaagtttattttataaattgtttttttt

SEQ ID NO: 382295 - DNA, 2593 bp, Cannabis indica
ttttttttttttaaaattaaaagttagaaatctcattaaatagctaaatcggctattacaatagagtgaagagcagaaagtatattgctctcagagaaaatatgaccagcctaataataagaactgtaagccggataatgtttaactttgttagtagatcttttaacatgacaaactttaatatcattcaaagaaaatagaagatttttgtactcttggacaagaagaccaaaaatagatggtattttaacaaagttattaagagattgaattgcaacaaaggagtcaatttccaccacaatattgttcaaactcttcctctttatctagtttagggtctccttgatactcaccatctcaaccattgttacttgtgaaccactagttgaatacatagcaaaagcctccatgacaatactattataattcctagtaacgaaacttgtaccgaacgcgttttttggtgaaaaaattgctcaagccacattaatcttgattatatctatcacaggtttagtccaataatctttgctgctaacaatatcaggttcgtgaagcaacgactcaatgcgacgagactgagcatatctccattgatcaagaatgtgccctcattctttatttaggtttcatatcaattatactagggcacttatgacatatgtaatattattattggtggtatttaatatcggattttttaatttaataaagagaaatactaaaaagtattattggtatctatcaccatcttccgtgttatatatactgttattggtataattaattatcgggtctcatataatttaagaaaatagtttttagggattatcacgaaccaatcataaggtgtcggacaccacttgtactcaatagcaatactctttgataaagattatagagaaatcttaactaattataagatgtcaaattatagaggtgctacacaacttagtgtcccatagcaatgctcaatagtaatacaagataaagtgaaaaaaaacaaaaaaaaatatttgtaaaaataagtctagtgttgtttgggaaaataaaataataataataataattatagtgtaaatattattgaaaattattatattacaccccttctataaagacatgttctggttgactcttatatatgtgttggtattgaggaaaaaaaaataatataactttttttatgatcgtgtatgttgtagatatttaaggtcagatataaatttttagattttatgaataatttatcgtattgaaaataagattcaaataactacttactacgcgtataagaaaaaataattgcgcgtgtaacaaaatatttaaactttattttcgtcatcgtaaactatttaaaattttcaaaaaattacaaatagttctaaataactacaacgtacactaaaataactaaaaaggcctccttgatgctaaaacaactagagagtctaccaaaacacccttttaaggagtgtcctataattttacccaattttataagggaaatttaacttttcatgcattcattaggtaaaattagttccctaaatttatgctaaggtgtattggttatatatgtcaacatttctatttttctcataatacccatccctatactctcctccttatctttcttcactcctttcaccctcttcatcctcctcccgattctctctttctcctttatcaaagtcacactaaaattaccaatgttacctacatcttgtctcttcaatgtttgatactccattgaaccaacaccaaagcaagacattgttgaggcaccgaagaaatttgagaacaatcatgggtaagtatttttttttaatagttcttaaattttgggttagaatgttgttttcataattgatctacgggtaattgttgttattttgttattttgtgtgttgaaatagttgttgcgtgtgaatactgcatttttcttggaatctgctttttttgtctagtccgataggacccaatatgggcctggtgctagtttgatttggttcttggatctaaggacagagatgaaggcctgacgagcctgatagggggacgattatagtctaatcgttattttcggtttgggacattgatgatgggccgatgggtggctcaatacagtctgaaaatttgtggggccgtgtgcgtgttcgatattctgtctgatgtgatgtccaattgcatgtgattttgtggcttttttaaacacttttctcttagcctcctgcatttccgcttccaaatccaacaatttttcttaatgtggcctggcttgccatagtgaaagcagccatcaattttgcttctagattttgatctacctctggacttgtcatttttatacctgctttctttattttgacttctcccgctattttctaaaataagggcttgagactccacacctctcgccttgttttgcttttcaaatgaaaccaaggcctctgcaatgacttcatactccaacttgtccttcccataagtaagagttgtgataaggtgatcatatgatggaggaagtgttgccattatcaacacaacattttcctcatcactaaactttacttcaaatcttatcaattga

SEQ ID NO: 382296 - DNA, 3432 bp, Cannabis indica
aaaaaaaaaaaacaagttcaaaataggttgtaatttcgtttggctagatttaaaagaatttagacaattttgaaatacatcaaagaattaattatcaaataaatttactatacataaagtaaataaatatttcataaaacaacacacaataatcataaaactccattcacaccttgaaacatgccaaaaataagattaattaactatgtcaactttacaatctccctttcaaaaatttagtagacaaaattaattataaaactttataataaacatgtagtgatatatgtaaaacacaccctctgaagacaagcactaacaaggctaaaacaccaaaatttgaaactcaaaccacataacttcccctaaaaaatattactaaatatactttataataataagttttttctttttgaatgagccaataagtcattgagttaattgtcaatatatataaatatacatatttaagtgagaatagtttaataggaaagtacagtaaaataaatcaattaatatgaggtatatggctcgagccttgtgctttagagagtggctcgtagagaggccaatgggcaatggtctacgcaaagagagggtaagctttattatcagtttatgcacattatatagtactatatatatatatatactaaactattaatacaatattacaattaattaactgatcctcatctctaacttttgaagatggtcataatgtcagggtaaaaagacctagctaggctttagtctatggctgtttaaccgtacgctctatgttactcaaagatacattctttacttctcaaaaaaaccaaaaccaaaccaatatatatctatatatatacatacatatggaaaatgccactagtataaattaatattgagggctgatttaataaataattatataaaatcgctaaccattttgaaccggtgtagttttggacaccttcaatatcaatgctatatatataacaaaagtatataagtccacgattgaaggtgtactctagtcttaacagttcaatataaattagctatatttgcttcttttaattacttataatccccacacacacagaaaaaaaagaagaagaagaagaagaaagaatcaactctcttgattcttgatgacaatcccaatgcttttataattaaacataaaagaaaattataatattgatagaaataaatagcaaaaacagaaaagacaagaacccacgtttctagattgaagaaacagtcagagaaaattgaaatagtgcctgtaaaagctctaagatgcatgcaagagaatagttggctcatgaacttattatatataattaattaaattattcctacctagctatatatatctagcctctgattttttatttatttatttattgaagataaatgattaaattctcttaaatatatttcggattccgttttatgtacttaattagttttatatatattttatgtgttttcaatttaatctgttcattgttttagccacctaatatatagtacgaatatacattttaagtactattttaaagaatatgttattttattaaggtttttacttgtcaccgatcaaaacaaaatattgacctccattatgctatgagataaatatatatattcttagtattatgaaaagtcaaaaacaattattcgtttctcacaaaataaagaaataataaaaaatatttgttcaaaaagaaaaaagaaataataaaagagaaatatgatggattaactttaacaaaacaaggctatagacaactataattgttataactgtacatggtcagggatcatgtcaactggactgatcaaaccctgtgccttgtaattctattatttgtgaaattaaatattaactaattacacaaataaaaataaataaatttaaaaatgatcacgcgcagagagatgacgaactaataaactgcaaaagtatcttgaaacatatatctctatgtacgtaattatgaattttattgtatttatatttccaaatagagaaaaatcttaggagttataatgggtgaaaagacgatcgagcatatataaacattaaatcttgctctaaaagcatccctaataaattaaattgatattataatgtatgttattcactttttttttgatttctcattgtgttaattaaaaatgaaactcatcatatcctatatgtgagattaagattctcatgcaaaattaattgaacattattataaaattttcacacataattaattaaattatcatttaaaaactttcattattaccaaacagccaaaagctaccattataatttgtcaaaggatcgaatccgccaaaactaaatgatcgtccagcccgaactagaattcacatactcacacacataaatatagataaaaatatatttgtataattacaaaagagttaacagtggaagactgtgcaatagcaaacaaaaacaaatactatcgtgttatgtgtacgtctagctaaacctgaccaagaaaaatccaatgagaaatagctaaccctaattatatataggatagatacacataataactatttcttcttcttttttttttaaaaaaaaaaagattaatttttaattcaattaatgtattataacatcttgtcttacaagtattgagtattagattacatccacatatggagtgctgtaaaaggtccaacaagatgaagagcaaaaatacaaaaaaggatcataaaataatcaaagtactcttgccctgcagtaggcagtagtacgtagtactttgtaagggcttactttatcaacatggtcttaatgtattatttcatcgtcaaataaatgtttatgtgtcacatccatatcatcaccattaaacacaacctttaatattatttatttaggttcttattgggcggccttcgatccggagtaaaaaggccggagttcgagtataaataaccccattcactttctgtatctatacatatatatatacatacttatgtcccaaatatcagtggtcttattcttgtcccaaatatatgggtgtacatattccctcattgctaagaaatttgacactataatgctgaacaaataattgacatgtatagttgtatatttgtaatgatttaagaaaaaagattactagatctcttttgaacaaattaattgatgacaaatattcaagtgatttaggcttattatattacaattctcttctatatatatatatatatatggccattaacataaacacgtatgtttacatttaatatgatttgcatatagagatataataatatatatatatatatactcgtgcgagttacacttgacccatatttacgttaaataatatataataatagtaattaattaaaaatttcgttttcttggtagtgaggaaatatatatatatatatatatat

SEQ ID NO: 382297 - DNA, 2418 bp, Cannabis indica
attttgggattgtaattaattaatcaagtttattatgttataacaagtgatgattaattagtattaatatatatatggaggtggaggagttcaagtagtgcagataaaaacaaggtgaaagtgaggagaaaactgagagagccaagattctgcttccaaaccagaagtgatgttgatgttcttgatgatggttataagtggagaaaatatggccaaaaagttgtcaagaatagccttcatccaaggtacatatatatatataccttttattctattatatttataaatgtttatatatatacacacatataattctgatctaccttaattatcatatggtatggtaccttgatcatgattaggataactagtattcttccgagtgatccaattatatgattagttttattttttgaagtatgattaatttaaaatgtatgataattaattattaatttaatttatgagcttaattaactggtatttaattaatgcaagttaacttatatatagttaggaaattaggaagctatagtactagctaatatgaactaaaaatatattatgaaaaaataatgtgcatgcatttttatttaatttgaaacattttatatatatatatatatgctgatatgcatatatatttttttttctttgatttttgtatctttatataaatattaggttgcgtaaagtaacacttttttaattagatttttatttttaaaattagaaatgtaaaaatattttttaaaatcatattctctaaaactaattttactttttcaattttttaattaataagaatctaaattttaacaacaaaaaaaaaatatttcaaattttttttaaataatttttttaattaatattttggactctaacccaaacttagatcttagcaactgaacccagacccagccccaaacttggacccgccttcggtctcggtctcggacccaattttatgctcgacttaaataaaatcaacaaatgaaaataaaaataaaatatacataacacagttttattttttatttttaaaattgaaaaataaaaataattataaaacacattttatttttcaaaaataaaaattttactttttatgattaaaaatttaaaaataaaagtgttattgaacatcactttaattagttattttagataaaaaagaaaaagtatatttaaaataagcttacagttccatttcaataaaagaaaaaaaggcttactgttttaaaatgtttaaatacgtacgtataattacacattttatataataatgtagaaatttgtgcatgcattttcttgactacaaattatgggagaaatgaacttaatttggcactcaggaaaaatttccagaaattatgcatatatataagttttttaattaaaaaaataaaataaatattttcactttttaatattttaattgagaatcaaaatttaaaaaaaaaaataactttcacaagttttctaaatagttttttttttcttaattaatcaatattttagacttcgaccctaatctgtaccttaggaccaagactccgaccttggccctatagtcccggactcggaccacagctccagccccaaatacaaacttagacccgacttaaataaaattaaaaaataaaaataaaaataaaagttatagagcataattttgctttttgtttttaaaattaaaaaataaaagtggttatacaacacattaatttttgttttttaaaaacacaaattttactttttaaattttgtgattaaaaaattcaaaacaaaaatattaccaaacgtctcctatatgttaaaaactaccagaatgttcatgtaatacctaataattatgaaggttttttttatttttacattttaaacagttttttttacatttgtacgaaaacctacatagcaagcaatagagtaacttaaatcgcaactaaaatctacatagcaacctacataaaaactaccgaaacaactcaaaccataaataaaaaaataaaaaaaatagatatttaaaataattctcctaattattaattattctaatcagtaactactaaaaacacacattttttacacttaagtgtcatttcctagagtgatatgatatataattccaccgaattaataacagtttgagatttgattaaacatcttcattcgaatataatgtatcattctattctacaatgcatcccttagaaaggagatacactaatttactttttatttgtttcgacatttataataaattttttagtctaatttttcatttatattcatgtacattataattatttgagatatctaataaaattttgagaaatttgaaataattacaatatagaaagcagtgttcaacagtctattttatacacgtataaaataaaatagtcacgcgcg

SEQ ID NO: 382298 - DNA, 3429 bp, Cannabis indica
agagagagagagagattttggtaccaaaaaaaatttgaagcatatttttcagtttgtaaatttaaacgaaaaccattgttttttttcctttcaattctatgctccattaaacacatttcatcaaatttccctattaaattgaaaaggaaaattgggaataagcaagaaaaatgtaaatttttactttaagaaccgaaaaaagttagtaattaccacttgagctagtctcaagaaggcaaggaggctttaggtgaggtggagattatgggttcaaaacccagcgaaaagtaaaatgacctttggtaactataacaatactgctaattatatatgacaactacaaatcattataaagagaaaaaaattaacatttaaaattaaaattcaagagtttaaaaattgaaaataacactaacctcgtcatgaatgttgtatgggacagcaaacccaaaatctaacaacagggtagcatttgaaaattttccatatcttatgagaacctacaaaatttaatagaaagtactaactgtttcatttgatatttatagaaagggatgggaagagtctcacatagtatctctacacgtgtaatattgtacatatatataccaatttttttcttcccctgaaatcatattatcacaagatcaataagtgagataaatgcatgatttaacaaatcatgtaagatacaagctaatttttagtatgacgcttacaaaacagatgaaaatgggtctagtatgctatctctacatgtgcaacgagctagcctcaaatgacacttttgataacacactatgctaaatgcaaaacaaaatccttgaaaacttatccaagcctagcattctactacattatgtgatctattgtattttttctataatataaaagatctaaacgaataatatttgaattaatggaaacttcaatgaaatataaggacttgatataataataataataataataataatagaaaaaaaaaagtatcacctactaacctgttcaccgggacaataatcacgatcagcaataacctatacaaaacaaataaaaaaaatgaaaaattcttgcaattgttaataaatactataagattagtaacaaggttgatttttggagagagttttataatactattcttaatttttatacactatgccgcataaaggtactaaatgaaaagtaaaagtacaaacctctgatagttgtttttcatcatcattcaaaagaaattctttcacattcccatcatgatttaaaaaatctgcaaatggaatctataaataatttattaattcaaagaatacaaactaaatagataacatgaaaccaaatacgaaacattatgtggatattaaaatcaatgagttcttataatgttgataccagtgatacacctcttatgcttccccatgctcgagaactaactgtaaaattcatggttaacttcttaacaatattaaaatcatcaaataatgtattatgatatataaatataatatatacatgtaaatgtcatgagtataactgcttacctatagcatatgcatgcataaaatccttaaaagtgatcctttcaaatatatcagaaaagggttcaataacctgaaattttgttacagattctatcacttttattattacttctaattatcatactaataaaaaaaaaaatgtttagatatgagcaaaccacacaactatcaaaacataaattcaaaagctcctcgccaaacatatattataatcacttacatattgttgtatatgattcaactaataacttaagtggtgatatcgattctactaaagattattataattagacaaagatcacatgtcgataagtgacctccaatatttattaatgtcctcacttattgcggagaaaaatgatggtaacaaaataatcaagatataataaaaataaagcaaggaaataaacttacaaaaaaccttccatttaacattctaatacaagaaactttcccattctctactaaggtctagtaaagaaaatacttcaaagcattttggttttgtacagccagcttgcaaaccaaaatttaatcttacctcagaccctttctgctagttcttcctatataagtaaatttattgcaatgattctacttcattataccttattgtatattttatgttcctaaaattggttaaataaaataacaatttcaacaaaagaaaagaaattaagatttcgttcttgctatgtggacaagaacctatcgaagaaccacacaactgtgaacagcagcggttttggctatattctggggcgtttggcttgaaagaaatgggagaatttttgaaggaactgagaatggggctgaatatgttttgagtggctacatggttttttaagtcgaaagggtttgaggaattttcttttcaattcttgctaatgagtacatttatttatttgatttttttttttccgagttttagttaagtttactagtagctaaaatttagtttgtaatacggtttttctccgccacaagtctcccaaataaaatttgggtcagtctaagacaagtaacctctttctctttttcaaaaaataagagcctaaccaccacattcacttccccctaaagcaaatcattcaaaacaaaacctaaaacaagcatccataacaaaataatctattcaaccagccaaatggtgatagagataaacaaagattatttactacggtatatcatgtactatttataatgaccaatgttcaaactaaagaaacacaatctaatatattcgttaactaagggcttgtttggtaggccgtataagggtcgtattgtattagataacgaataacactataaaacattgtatcgtattaattattacgacaaaaaattttagtacaatatgaatcatattatttaatacataacaaatgatccgtattagtttgtattattctatttacaaaggaatcaaagtcaacctcagcctcggcctcggatctcggatctcggatctcggagccgaacccctaactaggacccagatttggcacctaaaccccaacacgaattcagactaggactcaaactcccgaccctgaccgggacctagacccgaacccggaccccaactcagacccgaatttggacctggacttctgactaccacccgaactcggaccctagtctgaggtcgaggtttggggatgtggtccgggtccgagtccaggccaaggtcgaatttattgaaaagatattataattttacacaacctattaatacaagttaataccaaatatagtattgtattagataatactaatacaatataatacaatccaacacaacacaatacaatacaacacaacataatacaacacggtgtaccaacgagccttaaaaacataaaattgtagaaggctttaaatt

SEQ ID NO: 382299 - DNA, 1608 bp, Cannabis indica
gaaagcaccaactgcaacataggactccaagtctatcaagtaccaaactttatcttcaccaaatctctattagctccttctattcactttgccattaagtcagttaatcttgtttaactaattttttctgtttcccaactaacttctatataaacagttctcacttcactgagaatactgaggaaaagtgtttttgggattcttgggattttgtcttgtgaggaaacacttgagagttacagatattcagagatccattctctcaactgtaattgtacttcagagatgattttccaagcttgattaggattaagttcacatagaacttgtctctgaacagggatacttcttcttttttttgtttgatctaagcgtattattattatacagacatttttgagttacacaagctgggattcgatcccagacccccacacacgcaaactccaataaccccctattgctactcgagctagcctcaagtggtaacaaggatacttctctgtgttccttgtttcatttctgcataatctttttattactttcatttgttcaaaattagttctttgaacttgtttctattctgttttcatttgatccttttagaacttgtgttaaagtattgttgcaggaattcacatctgaatttcccacatatgtcctgttatatgatcatagctataaatctatattactagctagaacttccacactaaactattctattgcatacattaattactaacacacaacctaaaacattatattatttttacaaccatgatgaacaccaaacaaaacagtaaaacccagttgattaatagaaaaaaagaaaacaaatctttctggtctaaatccttatctcagattctttatgtttctaaacttcgttactcaccaaactatgccttcaactaaagttttgttactcatgcaaaaacactttctgttaccccaaaagcacaagtcagattttttttttgtaagggaaaaacatagcaaaaatagtactagattgtatattaaaggaaaaagccactatttttacacacatagctctaacactagaaatgggtattccgcaattactgtttttctctaatctgaaaagataaatcagactctgtcacaagcagtttaaataaatataccaaaaaaaatcccccttttcaatttcttgaagaactgggcaagaaaacaaaatattgagagagatttggttaccttggtatggcaatggctacccatttttgttggttttttcttctgtaaaattctcttcactgtagctttgcatatatataattattatttgggaaaaagggtgggaaaaatgagaagaaatgcgtgtgttgccggaactgtcccacctgccattccactaaagattcaatcacatcaagctcaaattgatttaaaaaattggaaaaaaaaaatgggaaattgggtatagtgaattgggtatagtgtctgtttttttttacattgggtatttgtaacttggaagatttaatgtaagattgaatccatgttataatattataagtaatgtatatatagaatgatatttgttttttcagaattatgtgtattttttaattttttttt

SEQ ID NO: 382300 - DNA, 2403 bp, Cannabis indica
ttttttttgtccaaaatccttctagtttaggggtttttattaatatctgtcatctttctctctgcattgttcttgacttcctatttggaatgagtaactcatggaatttcgtttctaaatagttagtctagtcgggacctctccaagcagtttatgggggaggacctctagctccctttctatactaggtagttagggtggctaactacttggattttcttctttttatacagaaactatgcctaagcaaacatgccaagaggaagctaactcagaggaggacgtaatggagtgagaagatgctccaaaattgatcctcaacgacaatccatgggagctagaccaacatgtcaacatgttcaggaattataacaatctaaggaagtatgaaatcctatgaaggctcgaaagtgttctagggttgttctcgaataggcttcccattctcagggagaggcctaacaagtgcttggaaggaggcttcggtgtttagagctgggctcatattgagatgggggcacacctgcctctgaggtgctattttgctaatttctgtgtcgtggctagaataacacctttctagcttattcctcaggcgtaccgcttactatcaaggtggtacgtcttttgtgttcaacacagcaaatctatgtcaacaccagaggagatcttgtacttttacaagatcatgtctcagcccatgaggggccacaaggagaaggtgggattctatagactggagcgctacactaggagtattccttaccccaccagttccacgaagtatatgcacgacttcagggactactacttctacacctccagcttcccattgaagaggcttcctaccctcagtttggatttcaatactacaagtaagtgttgttcgcttctttagactttaggattctatttttcctcctatttgatatgtactaatatcttatttttcgcatctgctagactgccttccccagtcacctctgacttcggagctggaagagaggataactttctaaaagtccttctcatccaaggagttttaagtagaaaagcttgtgaccacgaacaacctccgagaagtaggtcttattacccacactaggacggggtgcatctttttgtgaaggacacagtccaggatgctctgtgaggggacccaaatgaggttaatgaggccatcacatttattattactgaagagactctgaaggcagtgaaggtcgatgagcaatggttggcgaattggaggagacaattcctagaaagcctatgcgaggctaaggaactcactatttgattcaaggaggtagtgtaatgagggtgcttcaggagcgagtaccttcggtggtggtgagacacccttccatataattagggctcccactataactaattttgagactgtcagtcaatgtggatttgatcaatatttcttgaacttagaccatcgtagatatccatgcagtaggtatatagatagagtagattgcatcattaagagtcccaaccacttcttccaatacaagactaacttaggtcgagaagatatttctctttttgctagggagaaagtcaattatactagaattaatagtttggatcttgttaatgtcttgcatgatgatgtgttgtaaatatcatatcttttgttgtggtcttgtttgatggatattttgtttgttttgtgtagatcaactagcaactctataaatggggctgctgaataggttcctgggcaatatcaaatcccggtctaacaaggttcaggaaatcacctaaggtgagagagataagggaaagaagaactaggctattaggagctgatctcagtagctagcatcttcagcttctaatccaaaagctgcttctaaggctctgggtatgaaagccacgtctagttccatgatcgacctaactgaacctatcttggtcgtggaacctttgaggcaggttcctatggagaactctggatgagatagctcaaattaccatgggccaggcgtgatcaacaagaagcgagatggttcatccaatggtggtgccaataagaaggtgaggatggagacaaaagagaaggtcctgcaattggctgcctcaaggaggcaggcctcgaagactcaatcttagaaagggtttgatacatctgatggcggaagtccacctaggcaaggcaccagaacatcaagagacaatcacgatcctcctccaccacccctagcacctaagattattcttgccacatgtactcagctgtctagggaaaggaatgaactacctccattacctccgacacctttcactcttcctgtgaagctgtaacgtcctcgcttcaagcctccattgggtctttacacccacggaatgaatgactcttatacacgagtacgtcactctggctgc

SEQ ID NO: 382301 - DNA, 2373 bp, Cannabis indica
gactatgtaataaataaagactaaaagtataattaaattttttaatacattaatgtatacaggacatcattaatcgtaaattttagctatattagactaatgccatttaattaataatattcaatatatatatatatatataatgaatttcttttagcaagtagtatatactctctcaattaagtctctacaggatctatctataaatatacaatttcttatatcaacttaattcacccaattacaaaagtattcattcagctctaagagaaaaagaaaaaaatgtctgaattgccaaggtttgtggtaatcaaatctaaacacaatggaaaatatttgacaaagataactaaggaagagagcatcgcaaaaggattgtcagaaacgttcgtgaattttcgaggcgaaaacattacgagtcctttggtgaaattcgaattggagagagccaagacaaaaccgggatggtttcacatacgttattgctacaacaacaaatacttaaccttgaaaaaaggttattattggtatttcctggcctcagccgaccagcccctcgaagaagacgaaatagattggaaaaataccatgttcaagcctatcaaaactaatacttttgatgatgataacaacaaacaagaatatcttcgactttcaacatgtcaccaaccgttacgcttgtcattcaacgtggaaaaagaattacgaggatggtctctatgtgagcgataagaaggtggatgatttcgatactttcaaagtcttggattgggaatcgcttgtcatatttcccaaaactacagtagcatttaggatgctcaccagtgcaagcttgtatattagcaacaaacaagatgcgtatttgagggtgctcaaggaagccaacatcgtcgataaatgggtagcacatgagatctcaatcgttggcgatggttatgtccgcataaggaacctttccactaaccaattttggagaagctttagcaatgttgtcgcggctgactctaacgactccaacgacaagtacacgatgttccatcccatcaaagtagcagacaatgttgtggttttgcgcaatttgggatttaacaagttggtgtcggtgaacaatcctgatgctgacacagcagcagttagatccatgtatgagtctgacattatcgataaaaccaagctcatggtggttgagcgcgtcacatcaagggaaatctacaacattaattttcgaaaagaggagggtagggtttataacctcagcgttatggagatgagtcatgcagtggccgataaccctgacgatgtacataacactatgggattgacacttgaattcaataaaacaagatcaatttctcttcgcaacagcgtttcactactatctgacgttaaaacaaccattgaaatcaatgcaattccattgatagtcaataaagaaaatattaaattgtcagctaatcaggttactgcggtaggaaagtggggaacaaccaaaactatcgaaactttaaccaagactaactacactgttagagtgcctcctaagactagaacaagagttactcttgttgtgacgcaaggaacgtgcgaggttccattctcttatgctcaaaaagataatttctacgatgccacttccaaaatcttggagatggaagatgggatgtacactggggtcaatattttcgacatcgatattaaaaccagccatgaaaaactaccctaataataatatatataacaactacgtaatgtttctagctagctagatggttcatgtgtcgatttgttgtacgtttttcactctatgttttttttaatggatccttctttatgcttctttaatattattatattgtttatttttattatttaagaaatttttgagtttagtagcttgtttttcatcaaaatattcttgaagatccctatttcaagaaaataaatcccatccatagttaaatttgggttttagtagcaaatttattgtcttatttcttttaagcaaaataaacaagagatctctaatcgaagagcaagaaatataatcccaacatattgtttaaataaaaaataaaaacagatctcacttgataacgtttgataacgttatgatcgaagaaatatatatatatatatatatggataatatattttataaattctaagtgagatacatagataaatatatatggatcgtttcttaacggaaacgtcaccatcaatggaataaaatatattattttattgtctgttgtggcacggtcaccagcttgacatagcaagtttttaataactttgaaaagtcaaattggtgagttggcataatataagattctagcatttaattcgagtattctctttttttttttttgg

SEQ ID NO: 382302 - DNA, 5923 bp, Cannabis indica
tctaaagggttttttttctattgatgaaacataggattggacgcaagagatataggtccaaggttgtcacaccaaagaatgggacatgagggaagttgtaggcctcattgaagagtgattggatcaagattagttctgtggtggcaaggaagatatcacggtattctgattctatgctcaagtgagcaacaacactttctttctaaaactccacatgatcagattgccccctagataaataaaataacatgtagaacgtctatcattaattgaacttggccaatcagcatctgtataggcaacaagattaagagaagtagctggtttgaagtgtaagccagagtccaccgtgccaacgaaattcaagaaagacgtttgaaagctaaccaatgatcatttgtgggagccttgagaaattgggaaatcttgttaacagcaaagaaaatatctggtcgagataatgttaagtattaaagagctccaatcacacttctataaagagttgggttatccattagagtacccatggtggctgaaagctttgtgttggggcacataagtgtaggtgtcgaagtaggtgctgccatattcattcaagcaaaggaaaaaaaaggatatttggcttgtgtaagaaatagactagaagagtttcttgtgacttcaaaccccaaaaagtatcaaattagtcccagattcttgagtgcatattgctggtgcagttgggagattaagtgatgattaaagtttgaatctttacctgttaaaagtatatcatcgacatagattaatagtaaggtgaagttgtcacgattcctcatataaattaattaggtgtcagctcttcaattttggaaaccccagtgaaacagtgagtgtttgagcttatcaaaccaagcatgaggggcctattttaagccatagatgactttgttcaactcgtagacataatgcatgtgagtagagctttgaaaaatagcaaccatataaacacattattggaggtccccattgagaaaaggattgttgatgtcaattcgttggattggccaattatttgttactgtcactgagaaaataacatgtatggtacaaggcttgatcacatgactaaatgtctcaaaatagtctaggccaggggtttgttaaaatcctttggcgacaagccttgacttgaacctatccactgttccatcaagattgttttttattcaatgcacacatttgttatctataactgtcattccagtctaaaatgggagaagagtccatgttttgtctgtaatatgatcccttatttcatttttcattgcaaagaagctttaagagtcctaggctcaatgcttatattagaagatacaattagagcttttggtttgtgaatccctaaccttggctctagtaatcattgtgtgtttgtttacattttatggtggttgagtagtgatggaaggttgagattgaatggtgtcaactagagtaaagttgggttctggttcatgatctagagttgctaaaagtaaaggtagggaacttgaagaggtagctctagttgtagaatgtgttggttctggtggatttgttgcaaaagatgttggagatgtctcatgggtttaaactgggggatttgccatgggttcatttggttgaacaggtgggcttagggcctggtgagtggtgacatttgatagtggtgatggaatatggaagacacttggttgtatcagttgagattttgttgagacagaagctgttttgggaaataatgttcttgctatataattttggcatgaaggatgcatgcatttttacccattatgacaagggatatatccaagaaatagacaatgtattgttctaaaagcaagtttgttttgctaatcaggtagtagtaaaggatagcacaaacaacccaaattcctatggaaggagtagtcaagttgttgatgaaagagtacctcaaaaggatttctgaattgaaaaactggtgtgggaggacgattgattgtgtaagcaaaagttgtaaaagcatccaaccaatgtgatagagacatgttagcatgtgctcgaatgagaggcccatgtcgacaacatgtcgatgcttcctctttgctcgaccctgctgcagatgagtatggggccaggggtatcgaaaattgattcccaaaggctcaagtatggactgtaatggcatgtattcaccaccctaatccgattgtactgctttgatttttgtattaaactataattcaacataagctttaaattgtcaaaaaatggcagcaacttctaacttcgctttcataggatagaaccatgtgaattttgaaaaatattagtaaaactaacataatatctgaaaccttccattgaactataaaattattatctccatacatctgtatgaacttactcaaagcaagaagtagttttaggtattgaactactaaaatgcatgttatgtagcttaccatacttacatgcttgacaaaaaggaagttaattacatttcatttttaaattggcactacagagaacacttttcaagatccttgacgaagcatggccaagtcgatggtgccaaatctgagcttaagagaaggtttcaacattcttattcttggtacaattgaaagcagcaggtatgggagtcactcctttattgtaaacagtaggtaaattgactctagcttgtgaaagattcagatggtataagccgtctttaagatggccctaaagaagtacttggcctgtagtcttatccttgatcatacatgcatcagagtaaaagagtaaggtgatattataatcagttgttactttagagatgctcaatattaaattcttagtaatagttggagcaagtaacacatcattgagtagtaatttcttatttggattatttaatttgtatgaaatgttgtttggcctatatgagacattgaaatttgagaaccattaccaactattattttagctttgcctttgtaatcattgatagttttgagattttgagcatctgaggtcatgtggtgggttgctccactttccacataccagccattatcttcagcagtggtattggaatcagacaaaagagcttgtggattgtggccttgattctgagaattggaggagctactttgaggttccgtatcataacaatgataacatttgtaagcaagatgtccaatcttactcaagatttagcaaactggacgagagccacgtcgacgaccattggagtaaccacgacttccagattgagagcctcgaacctgcgagtttccacgaccattttatcaacctctgcttgtgttggtgttgcgagtacctccagaggaattcttgctaaattgaccataattggcttgtactgagtccaaatgctggagcgcagcttgttcaatgcacatttcttgattttgtagcatgtattggacttcttggagggtgagtgcatcaactcttacagtccgtaagacaaaccaccatttcatattcatggccctctaagaatgtacatagccagttcttgatctaaaagtttgtgacccacaactgcaagtgaatcagccaaattcttcatcttcaagatgtactcatcagcacttatagatccgttctcgatgttcggaatggcaagttcaagttgaagctgaggatccttcaattgagtggtgaagaggctagcaaagatggtccacatatcaatagcggattcatattggagaacatgtctaagcatagcctcagagagagaattcataactcaacttattagcagagcatcacaatgagtccaataatcaaatgcaaggtttctcgtgtttgtacctgcaagaagaggatctagctgtggagtggtgccaagaagaattccttcaagtccacgcacacgaatggagggaagaattaaggagcgccagtatgagtaattttgtcgatcaagtcaaatattcagaggtaaaatattattctaaatttaaaatggtggtacggcagcctgaggagcgatcaaagcttctagtggacaatggggagcgttgttgcgaggatcgtcaggatcagccataggtatgataccatgtaagagcataggatttagaaagagaagaagaagaaacaaaatgaaatgaaatgaaatctcaatgtaagatgtgagttgttaagctttttatacaacttgttacaaaacagtgtttacaccagtcgttaataaacaaataaaagaaaatgacaactaatgagaataatagaaataacagaatgctaaaaactactaaactaactttaacaataatatagacattcttaaaaatatttattagacaacaaaactaaaaacatattacatcagatgctataaatttttttcttcattttcaaaattctttaaaaatttactactcatgctctagattttaattatttatctcctaaatatatttcatcaattatttgggttttaatttttcttttcttataggtggatatatgtaaatgctccatccaagtggcatcaaggagcattgtctgctatatcaagttatatttgatttattgttttttttttccttttaaaaaaaacattcaagtttttgatatgacaacatcgctttaaaaatcatgctcaaatttgctcgaaatatataaattagtgttttacttaaatttttttgtgggtcttagttctaaattatgagaaactattatctagtattttttttttattctttttccaattatcatggataacttaagagatgagatattgaagggaaaaaaatagagcaaataaaatgaaaaaaaaaggaagaagaaaaactaaggaaaaattgaatgagataggtagtgatggtggttgcgcatcctctatagcagaagagagggagagagagagagagaaaaagagtgagagggtgaagagaaatatgaatgtttagttgtgagagaactattgtgagtagaatttgaattattagtatatttttaagatagaaagattatgtgatacatttttgttatagatagagtatgtcatttcaaccatatatacaaactcaattttcccaaagaaaatatatacatacaatatacataaaatgaagtaaaaatcacctgagctatgagccataaagagtaacttgtggcactacccactgataataggcaccccaagatgcgattaccatactcatcctttggtgatgcctcgtggctctgttgatgttgaccatgtttcaaaaggtcaacgtgtgttgaccaaatattgatttctactcctttgtacaaggttagaatcattgctccacctattccaactagtgatcccaacaccttagccttccctgatgatcttccaatgttcagcttctctaacctaaaacgtatacttgaaacatatattaatttgtgcatataatatatattttatttttagtgtctgttgttacacgtaaataaattataattatttttttcatgaaaatgtgtatatttatgggattattttatacgatcacttaaaaagattttgtgtctcagagtctataagaagttgacaactcatttgatgaagttgtgttttgtttgagtgagaaacactgaattattgagcatctctatttttatattatttctgatttttttatatattttttgtttggttagtttctctctcttggttcttcatcatttctttctctaaaatttgatgtgctctgtggtttccacaaaccaagtttttgaattgggtttcttcaacccaacaaacccaggttttgatctgtctttgaattcgattcattgtattcaaagttgttatttttcaaaatgggttcggtggatatgagaaagaatagagaaaaacagaggaaaatcatagcttaggtattattattactgaactgattttacagaatgg

SEQ ID NO: 382303 - DNA, 4266 bp, Cannabis indica
atatgaacagaacgtgtaaatgatttgccataacattttcagtagacatacaaataaaatgaaaagtagtgatgatgggatagaaatttaaaggtgaagaatgacagaaaaactgtacgtaattgattaaaatgacaaatagcttacccgaggaggaaaacatattgccctgtcaagttgtcaatgtttcttgttctttgcaaaaggaccaattgcggaagtatagcaacagcttccaaatatacagaaaatgtccacattacctgctcaatcaaatttggtgagggaacaccacatagaagtggataataggacaacaatagtctatggttatttagaaacaaacacaaaactggcaaactatatgagcatagaaaaattaaaaacagaaaacaaacaaacaagctaaaatacctctttgaaagtaaacttttcatttataaatatggcaaaaataaggcaagggaacatgaggaaagtataacgaaaagtatcttggtccctatcgtatgatctgcgaactatcttgtggcgtctcatataccaaacaatagagaaggagctcccaagaaatatcaacttcattatggtattatagaatgagatgaaattagtaaatatatccaaatatcgtgtggcaaagacaattgcataaagttcctgagtctttaaagaaactcctacaaattcaagtagaaaaaaataaatttatgagaaacgaagtttgaaagtatcaacagaaataaacaccaataagaaagcagaaattacattcaaccattcatgaacatgaagtaatatagttaatgagctaaaagtaaaatagtaaattttgcaaattaaataggtatatgggacacttgcaatcaaacaagtcatatctagaacaaaaaattacacaataaagattccacatttttttataatgcatctctgaatcagaccagggatgcgtttcaacacctgtcagtatctttaccaaattaaagcaaagatgaagaacaacagaaactgaatcgacaccgaaagaaagcatatgttcaagctaccgtctaaaagtaagctattttcttgttaagctaatggaatagtaaactcaatgaaaatttactatcattccaactcctacagagcagaactcagttacaaagcatagtggaatagtaaactcaatgaaaatttactatcattccaactcctacagaacagaactcagttacaaagcataggataatagctcagagttcaaactgtagaatatgattcaaatacacaaccagcaaccaaccaggcataagatttatcttgccactgtaagcaactattgagtatttagttagaaagagctcaattacaaaggatattgtggatactcgttctgtgttctccagaccatagattgtgatctggatacacaaccaactaaccagccacaatatttcaaataagaactatgatcaaagtttgacaaaacccactaaaagttgtcttcttcaaattcagacctacagagtaatcataattcacaacaaaaaatctaaacaaaaattaataacgttgttaaaaaagaccacacccaattatccctcttgggatcatgtaataactgagattacattgctaaataacagtgaactatctccctctaatgttaaaagaagtacaataaaattgaatcagaattaccactaggcatattctgtttaacataatcgacaagtacccagcctctaagtagaaaagaaatcaactttaatcgtcaaattatacactttaatgtcccaccaaagctttatatataaataaaaatcgcaaatttaagttcattttcgttcaaagaggtgaaatggaagaaagacaaaccagcgcaggatttgatagtgtggatcttaagaagcagaacaaggacgctggccaaatggaacatgtcccctgctaatctgaatatattcattttattttttggttgaatggatgttaggaacaaccagaatatatttttctggaaaagtttttcagagggctttcccacctttcagatctctccgattaattgtttttcttccctttctttctacgtttcttcatttattttcaatttaatttctttttgatatccaatatttcacgtgtaaagcctggaaactgaaatcgacgaatgaaaggtaaaacgacattaaagcgaagaaaggactccgaactaaacgacaatacaaaacatttttaataggggtgttcatcaaactgctcaaatcgctagcattgtgcactgtaaaaaaaaatgcggtttgaaattctttcgtgtgcggtagcagtttgaattttttcaaaattgcatagtgcagtgcaggttttgaattgttaataggcagttcaaacctcaccacacattataaaaatactcatttttatatttatttatgtgaatgtctaactcaaaacccactaattattatattattaaaacttaattttttttcatatttattttcaagctttatggtatttaaaataagtgttgctcaaactttattatatttgtgatagtgttttgtccttaatttaaaaatttacaatattatcgttgtatagtgtgctaaattgctaatccacctttctatatttatttattttgtagttttaatccaattaagtgtttacaatgttttcgttgtataatgtgctaatccacctttttatatctatttattttgtatgtagttttggtccaattaagtgtttatatcggatgcctcttgaaggtggtctcaagttgttttgtctaaattttcgagataacttgatcttatataagttgttttgcttgtagcgactcatattctgactttgtatatctttggctagacaattagcttgtagactggaagttcctccgcgtcgacgattatcatagtgtgattctaatcactctctcaaaaaaaaattactagtgatagttcaaaccgcagaaactgcaaaaaccacactgcaccggattattttttacgttgcggttttttagtttcgcagtgcggatgtagtttaaaaaattaaaaaaacatgcatgtacagaataatttaaaaaaatatcaaaaactgcaacacccatacaacaaacgctactaatttttaatttgtaacaagtcaagagtttatttacaacaaattctttagattccatattacaccccttaaaaaaaatcattgtggtaactctttataaaaatacaaatgacactggacaccccactataaaacatcataatattttagtacatgttttaggtgcatatcattactaaagaacccttttcaaatcccaacatttaacatttatttcgtgtacgatcaattcttctttctgtaattcggtgtttcatatttcacaacgtggctaagtggggacgcttttacagttgtcttacaactcagatcctggtgtgctcgataatttgtttcttgtttcttcttggtgtctatgtagctttttctctattttcgggcttctcctttttttttggtttatttttctggtttgtttttagctggttctgttgctggactttgattttgtttcaatgaattggtgctgtttgttggcaccaccctttcataaaaaaaatggcccttaaatgatcaaacttttaaaaaatatataattttaatttgaaattataaaatgataaaattaatatttcaaaatattgtttttaaactaattattaaattaaaactctcatgggatgtttgggggtaagaatgtcctccatcatccattttctatctgcatgttgatcgtattcttgaaatataatctgtgtcattcattggcgtctgttgcaatgatactacccaagtttgtattattccttctagaattaaacaaatatctactgtttaaatttaaaatgcactgttcaggggttaagaattaagggttgtaaaagaaaaaaaaaatgtaccatatttaataaaaagaagctatttgttatgaatttactaattgacacagcatcgtccctaaattgtaatacaaatgattccgagtataaaaaaaaaacaaagaaaagaatgcacttgcacacacatccagggctcaatttgtttggcttggaaatctaagccaaaattaaacagtattaactaaactagaggatgagtggcctttctttcaaaaaaaaaaaaaaaaaactagtgagtggtctagcaatattaaatgaaaaatttatactttattagttccggaaacaaactaatcatacactc

SEQ ID NO: 382304 - DNA, 1826 bp, Cannabis indica
attgtctcctatttttataataaatgttattgaaattatataattttcacactatatatttatattctagttatatttacttttatttctattgaaataatacttattacactattgttgttgtccgtacttttgaaacggacacatatcaccatatgattcatctaaagagataaactaaatattgtcctaaattttgatcagatgacgtactagtgacttaaattacgtgttgctacacctaagcacaagtatagagatgcctgcttggtatacgaaattcataggtttgagcggtagtggagcaaaattttactcagacgtctgctcgacttgaatatagaatacaacatggggtgcatagttagatctacctgatacaaattgatgggtaaaacatgtctggtcggtatacccccaacagaaaattaggttaattcaagatctataattgcagttgttatccgtgttttcgtatgaaagacatgtggcaaaaattagataacaacctcctgaattagcacagattaaatctctttaatcgcgaaaggatagaagggaaatatacttgtccgggaaaggtctaatcctgaagaagttttcaaggattgctcccaaacaagccttcatttaggactcgaaagccttactgctagtttgagatgcgaagaagagtaacttacccatgatgaagcgaaagtcggatagcccaagtgacggttatactttttctgacacaagataagatcttatcccctgcattagaccatggtagtggcaccctcgcctctaaatacacccttttttctgacgacttgtctaggcgtcttatgttcaaagtgcaacctttaagcgaaacgtgtcttgtaccaacaattgtccccattgtacaactgcctcatcgcacgagaaagacctttcttgggggtccaatagtcaatattttatatgtattttaccccaatagtaggtttttttgtaaaaaccctaaataggtcaagggtacatccatactcgtattttagtctataaatacctctttattcttagacaaaggggggatcagaaaaaagatagcaaagctctattgaaatctctctaagctttcttcttcttcaagagaaacgaagagagtagacttagaattttcttgtaaacaccactttgaaatattatacgagccatttaaggccaatatacttactcgtggactagggcttatttatgcctaaaccacgcaaacctctttgtctattttgcttactgaaattattgtttcttatgctctttattcattagtttttaaaatctcggtaaatatttttatactttcattgagagctgaggaaagatctaagccacaatgttgttgaaaccatagtggctacatgaaaaaaatcacaaagaaggctcctcaaggcggcctcgacatcatcatgaaagatgtaaaccctctctctccaaagcgcacccagtcgagtaatgcgagagaaggggatgcatcaaaagctgacaaccaagagagaaacttagacaagcatcataaataaggtgaagaagattgtgatgtcaaagacgaaaaggaggaggatggcggatatgtcaaggatgggtactataaagatgggtattattataaacaagacccagaattagttcgagtgtcctaagagttgcatgagacacaggaaaagttagctctgttgggttttatgccctaaataaaactccatttcaatgtaatctattttattcaacatcaataaagaaacaaaagtatttttcattcatttgtgtatgttttggttcgctttatcaattgcttg

SEQ ID NO: 382305 - DNA, 2939 bp, Cannabis indica
ccaaaatgatatttaccctaatataaatgtaaagtttttgaaaaatagttaatatttgatgtaaatttttctaaaataaagagatatttaaaccatatactaatttttctctaatttatacttttttttgcttatttatttatttatttttttttttgaaataactctttttcatttattaaaagttttataaagtttttttttttgttagctaaaaaatattacgggcatatgatttcggaaataaaataaaaaattataattagcattgctctaaaaaaaaccaagaagaagaaaccccaactaaaaaataagtattctcgcacttcgcacaaaggatcaaaggttttagattgccaaattgtaagagcaacacctcaccatacagggagtaattgtcttgaaactcctttgggtttgacaaaatttctaaatgagtgagtatataactcacacagctaaacaattatcattattttggactttttgcaatcttacattaattgacgtgaatgaacgaagaaaatatgtagaaataaaatacaactttggatttaacaaagagacattaattcacacaatttttccaataaagaggaaaactatacatatgttcttttgcattttctttttatttcaaataacttttggctcctacttcttctagaaacaaagttatattgctgtgtgaagacccgccttcttcaacagttcttttagccatttctccaaactttttagctcttttccttctctctatactttcttctccttggttatccaacactttctctatagcaatctgaattgtctcactcttcaccattacttgatcctcttctcccggttctatatactttgaccccactgttacggctgttttcaaaacttgtgcaaccaatttctcattcagaaattggtctgtaaatagtggccatgtaaccatgggaatcccggagcttatcgcttcgagagttgaattccatccacaatgagttaagaatgctccaattgaagggtgtgacaagattaacacttgtggagcccaaccccggatcaccataccccttcttttaatcctttcttcaaattcatattccttaaaccatttctctagctcttcatatctattagttcctgattcccttacaacccaaatgaatggtttgttggacgcttccaaacctaaaccaagctctatcgactgtggaagtgttagcgtaaatgtgcttccaaaacaaacatatatgacagaagatggtttccatgaatcaagccatttaaggcactcatgttcatcaatagaagactttttacctctttcagcattatctaactcatttttgttgcataaggaagccggaccaacacaccaaagcttaccactcttcatcttcttgtactctttgacatatgatggctccaattcttcaaaactatttatgatcactccataggactccatctcagcctccttcatttgctcctgaaattctttcatttttgaggttcttggctctggtagctgagctttcatcacatcaattctatctggaaggccagggataccaatatactctgtttcgggaacacataacaagtgggaacataactggaaaaagttacatcttgcatggaaaactatccttggaatattaagcttccgagctatgttgatagtccaaggcatgtaagggtccgatattacacatgtcggtggcggcgtaagctccggcatcatagtctcgactggcttttgtagcaaagaagttgaacagaagaatttttcacccaaatcgggggaaggcaaggcgtccaagctctcacacccttgaggtaatcctgcttcaacatatggaaaattgagttgaattagattgattctaaggccggcttgcttggcccggttgagcactccttggactcgagctgcattttgtgtggtggtgaatatggtgatgattacaccacgttgagccaatattcttgctatgtcaaccattgggatcaagtgtccttgtgccaagaaaggaaacaagataaagtgatgaagctcttttgcttgaatacccatggtgtaattctagagatcgaagaaatattaaaaaccgaaaggtaaagcttcttttatttttggatgatataagtatactcttagtatgtttaaaagaaagggagtcaaagctagattgaactgctgtggtgtgagtacatatacatgggtttatattacttttataatttggaaaacttcatagaatatgaaatgtggtccatagtagcatagtgtaagaatgaattatttaaacacaaatacggttgtttgggttcttggactgttttgagtaattaaatgttcacgtggggtgtggtcgagctatcagctgtgacgtaagggcatacataagaaaattactatcatatatattggtaattttaatgtagtacccttagtttctacatcgagttagttttcttttgtcaataagattaaactggaaatttataattttacgtatattatactacttaattaaattatacgtgcataaaaattatttacaatttatcatatattttatttaggctaattaagatttttacctctcgaattttgacatgcgttaaattatacttccaaaacttttagggtcgttgaaaatgctcactgaactattaaaattgttggatttaagaacttttttcgatttttactaaaaaaaatctaacatagatgaaagttcagggggcataatctagtatacgttaaagttcgagagacatgatttggtagataccaaagtctagagagcatagtttagtacattaacaatcactgaaatagtaaaattgaatgaaattaaacaaaaatcctaaaatctaacaatctcaatagttcagggacaatttttaacggccaaaaaagttcaggggcatga

SEQ ID NO: 382306 - DNA, 3595 bp, Cannabis indica
aaaataaaaaaccactagtcaggttgagcggtttatttaggtttaattgttaagttagactttagtttttaaccggcccaattaacagattgtagtttttggtagagaaagcattgggaagatgccaatgctaccaataataatataagcatcacaaatgctaaagaagactagtagtgtgtcaatatatatatagtttttttttgtctaaataaatatctaatttcatatataatttaacataataattttgaaagtgtatcgttaaccaatcacaatgcgacatatgtaccggtagtaggcaccaatacccaatagcaatactcaaataagcatatataagttttcataaccaccgatggatggaggcgagtaagaccaaaaagctaaaagaaaaagaaaacgtaataaagaaaagcaacgtagtggcaaatggcatccttagagtcttcaaactctcctaattcaaaccagtcgtctttcacactaagaccaacgacaacccaaaacaacaagttccttagaagcacttcctccaaagaagcctccttctccgagtttccttacacgccgccgcgccggagctcaccttccgtctcccaaagcctccatgcctcccctgtctcctcccctctccactctctctctccgcgccctcactcttccaaacaaaataataatcagaaccaccagacgaccactgttggattggccgtgggtgtggccgttggggacccacacgccgctgcctaccgttgcatctcctctgtcctaaaaaaggacggccagatcttgtccattgccgcatccaacggcctcgtttacacgggctccgataccaacgtcataagggtgtggaggattccggagttctccgagtgcgggcagcttaagacaagggctttcatggtggtagccttagaggtgtcccatgatagggtttacgctgcttatggtgatgccaagattagggtttggcagagaacttgggacgatggattgaagcatgttcgcctagctactattcccaggactggaaactatgtccggagctatatttccggcaaggataagatggtaataaatacatcaatcaactcttctgaaaattaatttattatttgcatttatgctcagcttatgagattaattttaacaaaatatttgactccaatatttaagctgagtgcgcggctataaattgataagattaataaaaatgttattgatattgaacaaccaaatcttgttaattaagtctgcatttggtatatttattaattaagggagtaagttgagcataattaataagaagactatatagctttccctcatacatgtggtttgttggtttaaataatttttttttttgtattaattaggaaatatgtatatatataatatagtactgcatggaaaggcatagttatggaatcagaaatattagttgtggtctttatgaatggccattaattagttattacataagacagttgtaatacatatttatgatcgcttctatataatagacacacgaaactatatagttgatctttattgagtataagcctaacattttgatccatatttaatgtcatgtcatacatattaatatatatatagtcagcacatccgttatacctataaaattcaacacatcatttaattattatgacatttgtatcaaccatttatatatgcatgtatacatttattataaatatttttaataaattatgatcatatatacgatattaatcattaaccaaattaacagatgaagcacatggggcctataacatcattagccattaacgtatcagacgacatactatactctgcatcagtggacaaaaccgtaaaagtatggcgaatctcagacctcaaatgcatcgagaccatccaagcccacccggagcccatcaacgccatcatcgtcgccgatgacggagttctcttcacagcctccgacgacgcaaccgtcaaagtctggcgccgcaacttttgccccggagaccagccacactctcttacagtaaccctcccagccaagtactctccggtcaaagccttgacgttgacccaggatggtggaatcctctacgggggatgcaccgatgggtacatacacttctggctcaaggggtggtactcgggtcagctacaatacggtggagccctccagggtcacacccacgcagtaatgtgcttggccagcgtgtctaattatgtgatcagcggctcggcagactccaccagccgggtttgggccagggagcccgatagcggtcagcacacgtgtttggcggttttagtgggccatagagggcccattaggtgtgtgacggccttcgttgggaggtttggggaggagagtgaccaggatggttgtaccatttgcaccggtagccttgatggtgtggttaaagtgtggcgcgtgacgtgcgtgggaaatattaatcgttgttccactccaagtgggtgtgagtattttgatctctaataacagttacatagtattacttaattttctcttctagctagcttctaatttctaaccccagttagtagaaatatttgtatagataattagttataacatttaacaaacatgtatggggctcaaacttattattatgtatgtgtggagctactgaattaatgggtataatatatcgatcaagcgtttgaggtcttttaattatttacaacgagaaaataatataataatatacttacttgtttatagtgatcagctctttagataaatctagggacatgcaaggtggtggtgtcatgattggaggactgcatttctaaatcattgctgagattttgattattatgatgagtagtctgagaatttcttctctttagacaatgataaagggtataatagagaaggcgtagaccaaatagaatgcttatgatcaccaaaactgatagaacgtagattttgaaggaggaatgggaatgttggccgccacagaaaagtcccaagcacaccatagttataactaactatatatatatatgtatgtattgtataggcaaatgaccgccaatcaaattttatatacttcaatatgaaatatatactatacatagggttcctttcttgttcaagttatatataggattttcttagctagataatatataggttgatacatgcaatgaaaggatcatttcagatcatgtattcttgccttctacttagactgtgtacgtataatcacttgtctatcaagtttaggaatagtttatgtaatatatatatatatatatatatatatttatatagatgagataatatgatatatagaaccttttcagttttctccttttattttattcattgaaagctataaaagaattttttaatattcctcgtctattattaataaattaatatcttggacatcgaatgttttaccagcttaaaattactttaatttaatcaagatatcatatatatatatataaaatatacaaaaataaaataatgatggtaacactaacacgtgttattgattggtttgagagaggagagaatgtaaaagagagtgtaacattagaataaggctaaatagta

SEQ ID NO: 382307 - DNA, 4549 bp, Cannabis indica
atgctgtacgtttcgattttgaagatatatatgtatatttagctggcttgtttgttacttaatgtgaacttggatttttagtgacgatgaagatgtattccgggatgaaaatatggagttcgattctgggtttggtaatattatagttgtagataatattccggttgttcctcgagagaagtttgagaaattggagggtgtaattcgtaaaatttacagtcagattggtgtaatcaaggaagatggtttttggatgccaactgatccagaaactcataaaaccttagggttttgttttgttgaattcaatactcctcaggtgaactcactctctttgtttatttttttatttttttaagagatattgcttggaagaattttgattttgtatgtacgaatttaagactttaccaactcatgatattaaattgaattttgtgaacatcacttcagtaaatgacttatttcttttcttttttagatatatgttttatttgttctatagtaaaaagctggatgttttaaaagaggctacaatattcaatttctaaagacttaacttatgttctacaagtcattctaagaggacttatgttgttacttgtagcatttggtaaaaatcaatgatgatggaactgctagtttgttttacttttgtggctaggtagtgaactgctaattgtaaaattggcttaaaagaatcaggtaattgttgtttctcattcacttctctttgttattgttacctttgtaggaagctgaactagccctgaaaacgaatgggtacaagttggacagatcacatatttttgctgtcaacctgtttgatgattttgagaaatatatgaaagttccggatgagtgggcccctccggaagttgtgccttatactcctggggtaagatttttatctgtactcttggattatagcaagttgaaacgaacagtcataagtgttaaaagttgggccgttatgtctcgttgattgttgattgttcttgtgtctgctgttatatttttgcaggaaaatcttcaaaaatggcttacagatgaaaaagccagagaccagtttgttatccgtgctggtacggatactgaagttctatggaatgatgcccgacaaatgaagcccgatcctgtttacaagcgtgctgtgagtgattaatttgatatttactcttttcttccctcctgatttaagtgacctgttagtcagtgttgtaggaaattagctcttggtcaatcttactatttatgcaaatttccaaatggacaataaacttcgatctattaggacaggattatctatacttttggctatgcacttaccatttattgtttataacccttaaatattaaatttcattttgttacagtactggacggaaagttttgtccagtggtccccattggggacttacttagcaactgtgcacagacaaggtgccgcagtttggggtggagcctctacttttaataggttgatgcgttatgcacatccccaggtttgtttttggctcttggtttctatttttttctctaatatattatattttagtctttataatttagttgtaaactgcaggttggactaattgatttctcccctggggagaactacttggtgacttacagcagtcatgaaccgagcagtccagacgagccaaaggtgagcactctgctatttgttaattttgaatgttatttctgctgccattatttatgagaacttttggtgcagagagttgtcatcaatatttttgatgtaagaactggaaaggttatgagagatttcaagggcacaaccgatgagtttgcaattgcaggaagcggtggtgtgtcaggggtatcttggcctgttttcaagtactatatattttccctcttgatattgatattgccaatgttatttacaacattatgattgtgtttttttacatcatacattaatgggttacatgatttttcagatggggtggtggaaaagaagataaatattttgcaaggctggggaaaaatctgatctctgtttatgagacagaaaacttctttcttcttgataagaaatccttgaaggtcgagaatgtgatggatttcagttggtctcctactgatccaattcttgccctgtttgttcctgaattagggggtggcaatcaacctgctagagtgagtctagattttctcttagctgactcttagtttgacatatgaataaacgccatattaatttgtgtgctccaaatgacaggtgagtctttatcaaatccccagtaaagaagaacttagacagaagaatttgttcagtgttagtgattgcaaaatgtactggcaatccaatggggattaccttgcagtaaaggttgatcgctatacaaaaactaagaaatcaacatacacaggctttgagctattcaggataaaagagcgtgacatcccgattgaggtgttcgagctggaaaataagactgacaagattattgcctttgcttgggaaccaaagggtcacaggtttgctattatccacggcgataaccccagacccgatgtaagcttttactcaatgcggagcggtaataacacaggccgtgtttccaaacttaccactctaaagggcaagcaagcaaatgccctatattggtcgcccactggtcgttacattattctagcgggattgaaaggaatgaacgggcagttggaattttacaatgtcgatgaattagaaaccatggctactgctgagcattttatggcaacagacattgaatgggatcctactggaaggtaattctataaaaggcgatcattgttatccatctttatcttggatttgtttcttcgatgatctgaccagttctatttgtaacaattaggtatgttgcaactgctgtgacttcagtccatgagatggagaatggatttaacatttggtcctttaatggcaagctgctttaccggatattgaaggatcatttcttccaggtaatttcattattcccctaaaaactttcagaaatgaatgaactttacttgcgggttcttttgtctgaatatcttacgagagagatttatttgacatgattctattttgtatttgctacagtttctgtggcggccaaggcctccacctttcttgagccctgagaaagaagaagagattgcaaagaacttgaaaaaatacagcaagaagtacgaggcagaagaccaggacgtgtcaatgctattgagcgagcaagatcgggagaagaggaagatgttgaaggaagaatgggagaaatgggtggccgagtggaagcggttgcacgaagaagagagattggagagagagaagcttagggacggagaagctagtgatgatgatgaagaagaatacgaagccaaagaagttgaagtcgaagaagtattggaaacaaccgaagagatccttccattcgaaatttgatcagaggagtaaaaccagtattcttgaagtgaggttttcataaagaaactttgaagaagtgaagtctttttttgtctaggaatttttgttttctttgaaactgagttaaaaacaactttgattattcctgtaatatttttgttccaaattatttttgatttaatagacttagaattttgctgagtgttattatgcacagaacatgggttattttagaacacttgaaagagatttcacctcagcaaatgtctttttgttttacaaaatcctttgtatactttactatgcataaaaattactaacatggtcttttgcaaaatgataatgtatataggaagtgttttgtgaaaagcaatttataaattaattaaaaggatatttttgaaaattttctttagttgttgattgagtaacaattcacacaaaagaaaggaataaaaaaatcctaatttcaaagtgaatcaattgatatatagcacatagatttgacaatacaaaaataatattaacaatacctattaaagtattggtaatatgtatactttaatatgtattcatccaaaaaaaaaaaaggatacaggtaatatgtcgttccaaaaaaaaaagtaaaggtaatatgcactatagagaggtgtaatgaaatagaaataatatcaataaaaaaaaaaaaaaagaagaaaaacttcaaagagaaaataagtagacttagcctagctgaccatacagtgaaaacaactacataccaccaatcacgttaggaataaaataaaattttgattttggtaagtaacaatgtttttttaacatgtattaataattgtttatgtatatatttttttttaaagaaaatatagctttatatggtaaatgtgcacatttcaactaagtaaattttattttcaatttcttgttgggatgtgtattcatacatgtcacattaataaataaattatttaaaatttatattaaatgataatatgaataaaataggaagtaatattaagtatatatattaaaatgagatgagataattcaacaaccgaccttagctcagttggcagagcggaggactgtagttggctttaaacccattagatatccttaggt

SEQ ID NO: 382308 - DNA, 2009 bp, Cannabis indica
aaaatgcttcgccaaacaaaagagggggaatgacctagggaacaagtaatgaaagaagagttcgggtggtatctggctgcgaagattttagccacatctgagtttggatgcttgaggatgcgccaagctattttagcaagaagagcctgattgaaatgaacgagggatcggaaaccaagccccccatatttttcagacttacaaagcttataccaattttgtcagtgagtcttgggacggttattctcattgaagccccaccaaaaattttccataatcgattcaagagagtgataagtggcaatcgggagacgaaaacaagccatggtataagtagggatcgcctggataacagacttgagaagcgtttcttttcctcctttcgagaagactttgtgcttccagttattaagatgaccccacactttgtcatggaggtagtgaaagacttgctttttcgttctaccaatatgctgagggagtcccaagtatttttcaaatgaggtttttactaggatctccatgaaatcaaagatcagggtttgatcccgaagggcaacgttcggagaaaaataaagggaagattttgaaaattcacttgaagccccatggccctttcatagagactgggagcctctttaatgacgttgcacgaattaatggaagcctgacagaagaggagactgtcatcagcaaaaaggagatggaaaatgttcgggatgctgtgcgccactttgaaaccattaagagcccggtttctttcctgttgctgaaggattgaagaaaaacccttggcacaaagcatgaaaagataaggggagagggggtcaccttgatgaataccccgagagggagaaacatgaccagagactttgccattgatattaaactggaaggtggccgtcgaaatgcaatcagaaatgagatgtataaatcgagaagggaaatcaaatttccttaaaatagtcgagatgaaagcccattccactctatcaaaaactttggccatatccagcttaactgccatccaacctttctttcctttggatttaagtttaattgagggggcaacctcctgggcgatgatgatattgtcataaatgagcctaccaggaaggaaagcactctggtttggggagatcaagttgtttagaactaatttaagcctgttggcaatagatttggaaataattttgtaaatgatattgcacaagcttatgggtctaaaattcttgatcgaagtaggctgtttgaccttaggaatgagagtgatgagggtggtgttaagaggggcaatgtccccgttaccatttaggaagctaagcgccgcggtcaacacatccttttttatgagaggccagttagctttgtagaaattagagttgaaaccgtcaaggccaggggctttatccaaaggaagttgaaaaaatgccttttcaacttctcttccaaaaaagtttcatccaacaaggatttgtcgttgtcagacagggaataatcaatgccctccaagacaatttgcatgttagtagcggaagaattattggaggtgaagagcgaatgaaaatagatttcaatttcatgagtgatgtcttcatccgtcgtgataatgccaccactcgatgtatgaagtttgaggattttgtttctttctgtgggaggcatgtcagtggaagaacttcgtatttttgtccccctgagccagccattgggttctggctatttgcttccagtagatctcttccttgtagaggagggcatcaacatgagtagctaaacacttaattagggtctagaaggagattgtttggtattgttttatggttttaatgtgatttattttccctcaagttctatgtattctatttctttcgtacttaattaattttaattgcatgatcaccaattaattgtctatggttttgatgcgagatctgagaagtgagtgtcaattatgctatagtgaaatagaactgaatttcgataaaggacgagagtacttgtatggt

SEQ ID NO: 382309 - DNA, 1333 bp, Cannabis indica
aagtttgaaaataaccatgagaagagaacccaaaatctttactataaagtcattgtaattataatttaagaagttcattttgaaatacttaattccaaaatactatttttaagtgaccattctactaaattggtgtagaactattttactagaaagatatactaaaatttacataataatgatgttagattttgaatttatactaaattaatgtataattttcctttttattttaactctttttttaatttattttaaaaataataaccataaatattttgttgacaatatataattatataataattaattattatatcagctatattgatataaatatacagtttaaaatgtatatatttatttggtgttatatttaatgtgaattaggtgtgatttattagagttgttactaataaattatgcactaaattagtaatacattaaaagagtgcaatgtttgagattgtttaaaaaaatttgtaattcactcattattgttaaatcatgtattaaatttgtttaccaagtttgaaaataaccatgagaactgaaaccgcgaagatatgaaaaatggtgtaaaatttactttgtggtcagtcccacatgtaatatacataattgttcactaatccaaaggttatatatacaatacatgctttactgaggtaaagaaaaacaccccaaagagattcaccatttattctcttgtctctttttaatcaatatttagtatgatgattatgtaaaatgtaatttttcttaatattttattaaaataatacaagaaataatatatattttatagtgagctatagataataataaatgaatatctgtgacattatcacattaatactagtttattgtaatttaatatctatgtaaggtaataatatcttcttccaataatattagtttattgtaatttaatatctatgtaaggtaataatatcttcttccaataatatttaagtagtcattttatacaagtggcaataaaataatagacgtgtatacaggagagaaaaatgtcaacttatacacatcaattataaaatgacgaataaaattttatacttcagttcataaccaacacaactagtataaaaatcatatttacatgatttgcatcggttacacaccgatagaacaaaaataaaaaaaagtgcgtcccaaatctaaaacacagtaaattgaatacccaatattataagggaaatttaaatttccatacctacataactttataattttttccttaaatgcatacttattaaaatttgtaatgtatgattattttaccaattttccaaaactacccctcccattt

SEQ ID NO: 382310 - DNA, 770 bp, Cannabis indica
ggacaaaaatttaatagtttaatgtttttaaaataaatatttacacttaaatttatttagtacacatgggtaatacagattgagtattctacttacataaatataattatgatgagtaaacatgtttaattattggttacaacaggaacaagctaaaattaacttgaacgacagaatgcagaagtgacaacgtgggctcaggatcatttaggacttgaatcaaaataaatctctcaagtctcaactattattttagagtaatggtagaagggacatctctataatagagtatcatgatataagttgtactgcctaataagaatgatcattattttatatctctaacaaaatacaaataatgaaaagaaaagaaatctcagaggaaatgtcaggtcagttttgacttggtctattaaatatatatgttatataaatataatatttatattactcctcacatattaaatatatattatacctagctacttaaacatatattataagcttaaaaggttggcaagtggacaaaaagaaaaatagaatgaaatcaaacactttgaatgattgagaaagtttatgctagtctggaatcattacaagccatttatatatgtactagcaaaaaattacgtgcgaggcacgtatactaaatttatgctagtttttttctatattatatgaaagtgatacaattaaaaattaaagaaaaaatattattaattattaggtgggattattattatgtgtatctaaatattatattttataat

SEQ ID NO: 382311 - DNA, 2052 bp, Cannabis indica
agatagataaagtgtcagttacaataacagaataaatggcaagggacttaacaaaaaaaaaaaagaataaatggcagggggatttcacctaaccaattacaatcattatccaaagttaaagtttgtttagccaaactatgagcagcttggtttgcatctctacgtacatgaaatacacaaacattagggtaataggatgatagatttttaacatcaagaatgagattgtgaaacgaataacagcttgatgttaaaccatgaagagcttggacaagaattaaatagtcagtttccacaaggtccaattggatattcaaccgtcttgcccattgtagaccatgaattaaagtctttgcttccatatcctgtggccgaaagttgcctggtattttcatagaagtagcagctatctcatgttccgaagaatcgcgtaggatgtctcctaatccaatctggttcgatgaaggatttatagttgcatccacattcagtttaatttgtccaagagggggagctttccatggcactcttttagctactgttggtgctaaaccagtagcattattcttccttgaaacttgctgaaagtttgagagatatgccgatgagttggagaatattgcagcaggtaacttgtgcgaattattatggagaatattattcctgtcagaccaaatagaccacattgtgcaaattatcatttccagttcagacttggaatgtatcgttgacagatgaattaaataatctccatcattcatcctgcttgctacagcataatcaggtcgaaaatttgagtatctccaaattgatttagcatgcttacaactaatcaaagcatgtccaattgattcccatgcatttgaacaaaggctacaagcagaggaaataattattttcctcttgaacagatttgcagccgctggagtagaattgtttataactctccaaacaaatatttgatttttaaaggtaaattgagcttccaaaattcttgccaccacgatgcattggatagtgatgtggatgagttattctgttcctccaatgagcaagctaattgataccccgattgcacagaataatcacctgaggagttataatgccaaatctaaaaatcattattagcacttaatgagaatgggattttcaagatatgatcaaaattcacatgacaaaaatcttgctgcaatgatctgatatcccattccgagtttgtggtgatatagtgtgatactaactggtctttaggtcccttgtagtatataggagtaaaaacattgcgggcagggatccaagggtcagttgcacatctaatttgagccccattacctacatgtaatctctgtcctttcaccaataaatccctaccccaaatattcatttccaagttaatgaagagactccagccgatgtagctgaaagtatatctccattccaaaagtatctagccttcagtagtcgtgccaaaagggaagtgggactttgaaaaattctccaagcttgttttgctaacaaagcttggttgtaatgaacatgagagcgaaacccattccaccatccattttggacttgcacaaaaattcccatttcttccaatgtgtctttttttttttgttattagtagaaccccaccagaattgagacatcattgtatcaagttgtttgcaaaacttagctgataatttgaaacaactcattgcgtatgttggtttagcttgcacaacggctttgagtagaatttctttccctcctatcgaaaagagtttatcattccaagagcgaaggagtttccaaattcgatctttaatgtcagtaaacaattcatttttgtcatgctctgaatatgcaggtaggcccaaatacttctcatgacattcgcttatcggcatatccccaatatttgtgtgaaagaatgttttgtggccgctaatgtattaggagagaaggacataacaaacttgttctcattaacctgttgtccagacgcgcgatgatagatatctaaggcacgtttgattgcactacaacatctatcattagcttgacaaa

SEQ ID NO: 382312 - DNA, 2449 bp, Cannabis indica
aaaaaaaaaaaaaaactttcccttgaaaaatgatacaatataatattttgttacttgtgtgagtaaatccctttgtagcaccaatttctttctttctttcttttttaaaaaaacgagaacaatttcattaataaagaggtaaaatcaaaaatacccaaaaagaaagaacatacatgccatattttcactggtgcaatatacgcaccttcaatctcgtagcataaaagtttctcgaattcaatttttgtcacataaatgagccactaaatgagagacatgtactaattgcggcaaagagactaacacaacaccacatcaaggtggactaactaaatccataagaatgtgacttttattgaaaacataaaaaaacaacaaaataaaattgaaaaatgcaacagatctatgacctaaatcccaaactttgatcaccccttcaattttgaaacactaccatattgatgaacgacttctttgtaaatccgacaatacaccccaaacccgagaagacccaaatttgaaccataggtactattttattttgatttacatagttttttttagctcaaatgattttacatagttagggcaccgtattagtgttatgtataatagtggaccaaacctacacttcaacaaaatacaaacgacaaagtacccgaataagtaaattctttttttcccctaattttttaatgtatataaaagcctaaagctaatctaagtcataggcagttaaaaagtttggctagtcctaaagttatccaaattttctagaaactacatccattcaatatttctttcgaaagagaactattcaggctttagctactaaaaaagatttaatatcctaacaaaaactttttcctttataatttctaaaacaacaccctttatttttatgcaataaattgaagttaggtttctttttaattgtttttagataagcaattcattaattcaaatttcaaaatgttaattttccattaaaaaaccaaagttcgttaagaccatcttcaatgcatgagataaaaaatgtactaattttggcacaaaaaattaataaatgctatatttggaaaactttttgcaaaggaaatttcattaaatatgcttaaaagtttaccacatacctaaaaatattttccaaaataatttgataccaatctatccttagtttattttaagatacctattctacccctttcacttaaaaacatctctctttctctctctttagatctgaagagaacccccggaagccctaagttcccttcctgtcatcgtcaccaccaccaaaagccccccaccaaagctctaagttcttccagtgccacctcttcttctccaatctttctctcatcgaaaccccaaatgcctcaaaccttcaaaagcacagacgccccgtggttcttccatgtcctcactgtcgacgacccaccgaaccagagccttaaagggcgagaaccaccgatctttgttcgtcatcgcgaagacgaaccagaggacgacgatctgcaacaatttttttatctgtcgagaaactatcgaaaaagtcatcgtgaacacgaaatcctatcgataacctaaattaattaaaagccaacatcaaagctatcttctattagaaacttattgaaaatctatcgaaaagccatcaaaaatgtttgttgaaaacaagtcgagaaaccattgagaataatctatcgaaaaattgtcaataaactatcgtgaaactatcaaaatatgtcatcactgaccttcagaaagcaaatttaggaataccatagagaatcaatcaaaaagcatcgagaaactatcaaaatatggctaaacaacaaaaagatgtggaaaaccaaatctacttagtttatagataaaaaatacacaaaaactaccaatagtataaagatctgatgcaaacaaaccatatacttgaaaaatacaataccattcatgattttttttttacaaaaaagaattactcattaattatagaggtttggtcccaactttgacaatggggtgaaggtgctacactagtttccttgtaatgtcgaacgtgtgacgacaagagcgacgaagggatggtgccctttctgtttggttgaggagagagaaaagagagaaagagaatgggtttttatgaaaggggtaaagtaggtatgttaaagtaaaataaatataatatggtataaaattaatgaggggtgtttattaataattgaataaagttttaagtatgataactgaagttctctacttacaactgtgctccagtgcataatgagaaatttgttggaaattattttaccaggatctagatttactaatatgtatgttgattataatctataatctaacaccctatatatgaatatcctaatacgatgaacaatgaaataaacacatataaagtttagaaaaccttacattgatggtagtggaa

SEQ ID NO: 382313 - DNA, 1570 bp, Cannabis indica
ctaaaacaattagagatgtatcgatgtattattttaagggggttggcattatattataaaatttttaaaaaataattttgaagaatgcaaaaatatcctattgggaagtgcacgatagctttgtgtaatcggttgcatttctcaataaaatcctacattaaatgagtgtcgtaattgctataaatcatagaaaacagttttttttatttgattttattcttcttttgtcggtgagcaatgtttctatggataatagaagtgtcaattttatttatttattattattatttttttttttgaaagaacgacatgttcattaactaagagcattcaggtgaggttaattagagttttagctaagaaatttgttgttgtaaattgtgaagaatagcttgattttgtaaattgaaatgtgaaacattgagtagtcgcctgcatatataatgtacatgctttgcctctttagacacttccaaggtgaacattgtgatttgtgaacatattactcacgtgggtgactcggtaggtataggtaagtatttgaaaattagtaaaattgaaacaaatgcaatatatattatttattattttgtttaagttgcgggcccggttgggttcaacgagttataatttggccaatccattccatttacgaacgaatacatacgtgttactaaaattttaatccaaactagtttcgctcccactttttattgggctgttcggcctataccgggttgagttggagagaaaattacattacatacttcttttaacttgatgattttaatttttatcctctcttttaaaatctcttatgtttactttttttttttcaatcattctactaattttactcctatcacttagttttcattattctctaatcaaaattttgtcccaacttccccacaaacctacacatccatatgcaaagaacacaaatctaattcgcttgaaattatgttttagttatatgagtgtatgaggataatttaagtataatattcataaaaagaggtatatttaaattaaattttatttaagggtaaatttagttaatgtataaaaaaaaagtattttttaatttctccttgggttggatgtgttggtcggcccaacccaataaatgtgcagccctacaaggtgccattaaatcaccaaaataatgttcaaaacttctccaaattactactattttttgtaccaataattgtgcactatagcaacagtaaacttttactttttttattatatatttattaggggtgtttattgaacacatctaatggatttgaaccaatccgatccaatccaattatttattgggcttttttcataaatgtacaacaaaaacaaaataattatacaaaaaatatgcaaaaaaaaattattttaaaaatttatacattttgaaaacttattacatgaaaccatacatttttaatatgtttattaaacctcaaaataaacaatttcgtaaaattaattaaacagttttataaaaataaacaagttaaatattttttattaaaagataaatgtttattatctattttagtatgaatta

SEQ ID NO: 382314 - DNA, 3834 bp, Cannabis indica
aaaagtatgattttttgtagtgaagaatcaaatcgtgcatgagtaaacaaaacacattgatgtcaaactccattcaaaacgcgttgttacctcagaagacaaaataaaacttgagaaagtttcaggacactgcttcgacgtgttacatgttgtgtgattcagctattctgacagtctttcagttgcatctcaacacttagtagttgcatctttaatttctgttatttttctgttataacacctagtgttaatctatgtactgtaaatagaagtctaacacccccatccattttttaactgaacaaaatattgtatttgtgtgtatttgagggatgttaaagagtgcattatactttaatttgactaatgtctctcatgtgagctaaattgaaagtgttttagactaagctcttgtcttggattgtaaagcacattggtgattaataaaaaaggaaactattgttgaaggttgtattgcttatttcagttcccaactctcttctccttctcttaattcagtttttaatttctttgtatgtttgattcttattgtctttattgtttatcttgaattttgttcttttattggtgtattaatctacaacaacaagtggtatcaaagccaatgatctcaaattcatcaagaacttggtgaaagaattcaagaaagtatcaagaatggctagtgtgaagttcgaagttgatgatcacaggacacaatgactttagtctttggagaatcaaaatgaagggacttttggtacatcaagggcttgatgaagccattattccaaaagctgaagtaaagaatgaagaagatgttgatgagaagttcaataccattaattgaagtgaagactgcaatgctctgccttggagatgaattacttcgagaggtgtcaaatgaagatacaattatttcataatgagtaaatggcggtaaaactctcaatactttcgttttggtttcactaaacccccaaaatccaaatttcttcaggtaaacccctaaaaccagaaaactgttagcaatttaacaatgtttgggttttgggggtttagtaaaaccaaaacaaaagtattggggattttgccaccatttgcgctttcataattggtttatgggataaacttgctgcaatttatttgaagaaatccctggccaacaaactatgtctgatgtagaagaaattgtacaaatgaatgaagctatagagaactcaagaagcatcttgatgattttaacaaaatcgtcttggaattaaacaaaataggtgtcaaacatgaagaagaggatcaaggtataactttacttgtacaatagcagaagttaaagctggtttgaactctaaagaaattcaaaaaagatcaaaagctaggtctgatccaagaggtgagggacttctgatagtttgaggaagagctggtaatagagaccagatatatgggaaggggaacaatggaaacaaaggtcacaagagccacaaaataaagtcaaaattaaagccaggaaagttttgcaattacaataaaaaggaaggcattacaagtctgaatgctactacctaaagaataagcaaaacatagagaaaagccaaggaataggagaagttggtgtggtgtctgatgggtatgattcagcagatgttctggtggtatcaagtgaaaattcaggtaatgaataaattcttgattctggttgctcatttcatatgtgtcctaacaagttgttgttccaataacaaggtatgccaagtaaaaggaataggttcacaataaagatgcatgatgaagtgatcagaaccatacaatatgtaaggtatatgttcctgacctaaggagaaatctcctatcagttggagtccaatggttgtatcatcaagattgaaggaaattcaatgaaagacatgaagagttcgttgctagttatgagaggagagttcaaaggtggcctctattttcttgctaggaaatcaataactagtaatgcatcagtggctcacgatcttatgatatgacacaaatatggtacaaaagactacgacatatgtaagtgaggtagaatttgttttaaaatatgtatataatcattaattgtatttgttgtaatatgcataattataatataaattagttattattggttgttaatataaataatataaaaatgtgaaatttataaaacaaaatatttttattatttggtgttaaaccattgaatttgtggcacaaaaaataatagattttgtaccaaattcgtgaaaaaagtacaccaaaatgatacaatttgctgaacattaattgtggctagggcttaagcgttgcattactttggtttttttttttttctttctttaatgatgctatagaatatatttaatgatatgtatatacctatatataaactatgagaaatgctaaaaggcaccagtggtgtcaagcaccctcctacgtgtcaatatcgctattggtctaatttagtatcgggtcacatatagtttaatataatagctttttgggagtatcgcaaggcgacatgtcttaagggtgctaggcaccactggtgcccaatagcaatgctcataaactatatacaactctgtttcaatgtgttgagagacctaagaaaaaaaatttaaatgagactttttctttttacaaaaatttaaaataataaatattatttaaattttgacacaaattttaactcatataacaaataattttttttaccacgtaaactaactctataatgtatatttaattattaatagcatctctattgatgtgttatatattttggcacttcagttattataaaaaaaaaatgtatgtcaaaaattatgtcattttttttaccaatttgtactttgaaatactactgtatattataaattagagtaatttcataaaaaaaatgtactaaacataatatttgttctttataaaaaaatatatgggaaataactgtgacactcaaattatatattatttttatacacaatgatgtgtaactaatgaagagtctatcacgagattttggaagcggctctgggctttgaagattccaccaaaggttaaaaatatggtatgtcgagctggtactaattgtcttcctaccatgtgtcaacttttaaccaaaagggtggttgtaaatgccgtgtgtcctatctgcaatgtggaggaggagactatcttccattgtgtagtcacttgtcaggagattaaatgttgtcgggacagagtgggcataggcacacatctgctacatggtcacaacttttgggtttggttgaaggatatatttgagcggttggagcctgataaaagaggtttaatagccactctctgctgggctatttggaacgccagaaatgaaaccgtttggaagaagaaaaaggttagtgctttggatattgctgcttcagcgaagaactatcttaaccaatggagagatgctcaaaattttcaaatagaaacaccttgccccgatcttcaaaagggtgatggtgcggagcattggattgtccacctgttaatagtgttaagattaacattgatgcagcaatatttgaagttgaggctcggacgggaatgggagttgttgctcgagatgataaggggatgtttctggaaggcttcacgaaaatttacaatgaaaagctggacccaacacttgtcgatgctttaagtatgagggaggctttgagttggctcaataataaaaactggcagcatgcctttcttgaaaccgactgtcatactattgtaaaagcgattcgcagttatgtagaaattttatcttgttttggtattgtaattcgtgactgtaga

SEQ ID NO: 382315 - DNA, 3798 bp, Cannabis indica
gtacttttatttttatttatatttattttaagaaaaattaaaaacttaacagacgttacgttagcttaggcattcaaaattgttaaatagtaattggaataaagtcacccaaaaactaaaaattctgttatatagctacattttatataaaatagatatatatataaaaattaaatcagaaacaaattacaaatatcagttcaaatattaatgagatttgttttatttttattttattattttattaaatataaataaaaagtcacccatgaatttctcataaaccaagaaatttagttatataggcacactttatatagaattagatataatctaacccattctagaattgaaatgaaattcagcattttgtattataattagctccgatatcaaaagcaagagaatgagaaggtgcgaatttagacgttacccaaatgaatcgtagacgtttcttgaaatcttcatcttcttcttgatacctttacaaagatcctccaaactacaaggcaacagattctccaccgcattggccttccgctgagccccagacccaccactgccatgaacggaaaaatctgaagtaccattggtggccctaaagaacccatccctataacccctccccctactcgaactcctcccagaacccgagcttgccgactccgatccaaagatctcagcgtatatatcctcagcgtcccgggggttgaacctgaaggaggagctggggtgattatggttgttctgccggaaatgggaggcgcgtgaagaagacgatggcgtaaacgagttggacgaagaagcaggtggcggaggagggaattggccggacttgagagcctcctcgccgtaaagatcgtagatctggcgcttgagggggtcgctgaggacgtcgtaagcttctgagattcgcttaaactttgcctccgcctccgaccgcttcgtcgccggattcttgtctgggtgccatatcatggccaatctcttgtaagccttcttcaggtcatcctcgctggcgttccgattcaccttcagtatgttgtagtaatcaacccccatttcttctcctctctgtctctgtctctgtctctcctgtttctctctctatatgtatatatattacatatctgtcaatatatatgtcgcattataaaaataagataaactaaaataaaaattaaaaaaaaaatctctaaaaataaataatgtgatgaacctcatttataattaagattttctttttggtgaatcggtgatagtaaaattgatgttaatagtaatacaataaaaaaaaaatatattataacaacaattaatttgggagatttagtaattttttatattttagtaatttactactaccttaatctaacgtgattttttatttattattattgtagacatctatttacataatataatagttatatgaaaaaaagaaattaaaaaattaataaaagatttgccgttaacttataaccaaacgactccctaataatttatcttgtaattctgaatcaaccgccgcatttctccttaatcaatcttgacgtttcttttttcttttctttttaaataaatcaatctttacgtcttctccaatccaatttattatatataaaaaaatataattctataattaatcgtcatctaatttatttcacaacctagtttttgagttttatatcaaagtaaaaaaatcattttatttttcgttcataaaatgattcagtcaaacatttccaacctgtctcggtttcatggcattcaacaacttttcaattcaaattttattaacgttatgtggcttcagttcagtctcatactcattcattttcacacccaataattacaaaattaaggaacaaaattaatcttttttaaaacaaagtcaaacatatatataattttatttttgcctttaaactctaatgacggtacggtctctaagcaaagcctcgaccgctcttcgaccagagaccaaagcaccatcaaacgtggcactcgttaagtggtctccgcataagtacaaaccggatcctaccttaggatctttcattagattagttggagggctctgattgggctgagcatatttaatcctgtaagtcttcaagtgcttccaattccttaccgttgatgttgacgaagttgatcccttaaaccactcggagagctctcggacaacgtcagccgttagatcctcatcggagactccatcaaaggtcccgatgagtgatacggagattaaagccttgtctggtgggccatacgatggtgccacgttagtggcgaagaacatattattcacgattccttcgcccgatccgtttataaagagaaccgggtcccgaaccgggatttctgctcgatcagctgtgaaatacaaacacaccgtgctccgactcggtttgttttgggccgggtttggcccattgtctcgcaaaagcttatcggcttcgggtttgtctacagccactataactcccagttcacttctcaatatttctcccgtttgtaatattaccgccggtgaatcgaatccctcggaatcgatggagatggctctggaattgaagcgaatcgagtcggacggcagttttgctgctaattgtttggggatttccccgatgcctttggcgggaatcgtgttatctccgagggctaggctcttgaagatgaaatcgaacaatctggaagtggtttcgagatcgcgatcgaagaaaattcctccaaagaatggtcggaagaatcttccgattatggattcagaaaatccgatgcttctcagaagctccatcgtagatacctcattcgcagtcataatttcatcgtctgatttcgtcaggaccccaagtcttgtcgacgcaatgcgcaatttgtcaagaattgaaccaatagggttcgttagggactggagggagtccacgaagtgccgaatgggatcagcgactatgtggaattcgccgttgtagtaaactctagctccggagtagaatttctggagatttaacgcttcgtaatcgagaagcttcttggcttcaggatatgatgtgatgaagatttgaaacccgcggtcgaggatgaatccgtcgacgtaatcggaccggactcggccgccgacctcatctgaagcttctagtaaaaggaaggggacgttttcggagctgagtcgagtggcagccgcgagtccggcgaggcctgctccaactataatgacgccggtatcgtgagaagattgtgtggaagtgacacgtgtctggacgggaaaagaggaggaagatgcactgggtttgaatctgatgcggacgggtctaggcttgggggacgagggagagaggaagaagatggtggaggtcgggatcgggacgagtgtaagtgtcatttttttctgtattattatttttctaatatttctttttaggatggaaacttggtattggagcgcagaggaacgaaaatggcttatccatattgttttttttttttgacataatatccgtttgtgtgtttttgttttattttccttcttttattattattattattatactagtaaagatattaaaaatgaataatttaaaatttattttttttttttacacaaaatattaaaaaagataaatctatataaaaattgtaaagaattttaaaaaaattatattatattattcttatatataataataaaaaaaagccacacaattatatgtgatagtcaaaaaaataaaaactgagtaaacgtcacacaaaattgaaaaaaaaaatatatgtgtttttttatttttacacttc

SEQ ID NO: 382316 - DNA, 1300 bp, Cannabis indica
gcatggaaaatccttgaagattacatctctgcttataattatcttcattcttccttgatcttttatccatattctataccttttaacccctttaagatatcctagaaacactcctttaactgctctaggttctagctttccaatgctttggtgtgcatatgctgcacaaccaaaaactctaaggttggttaggtctggtggttttccagaccaaatttcttcaggtgtttttaggtttatggaactagatggacacctgttaattagatatgtagcagtgacaactgcttccccccaaaatcccttagacaagcctgcactaaaaagcatacacctagatttattcagtaaggtcctattcattctcttagccaccccattctgttgtggtgtgtgccttactgatttgtgtctcataatgccctattctttacagtagtgattaaacaaataattacaaaattctaagccattatcagttcttaacaccttaacccttttatctgtgattttccattaaagttttcccgtgtacaaacttttggaaagtatcattcttattcttaagtaaatagactcatactttcctttagaaagcatcaacaatagataggaaataagaatagccaccatgagtgttaactttttttggcccccataaatcagaatatatgtattccatgacacgttttgatttatgtgaaccagtattaaatttcaatcgatggtgctttcctaaaatacagtgttcacatgaatctaccttggatactttgtcttttcctagtaaattgtagctaatgattatttgcagtcctctttggctgatgtggcctaatctcctatgccacaaggttactttgtcatcttcagggactaaaaatagtgttattgcagcttacagtaggctctccacatagatagtacaaaccatcttcctttttctcctttcatgatcaatatggatcctttacatagctttatttgcccatcttcaatcttgctttcaatatgcaaatcatcaagcacacttagggaaatcaaatttcttgacaggttaggtacataccttactccccttagtgatctaattaccccatcaaacatatcttgaaactcacagtgcatatgccttctattttacaggtttgattatttactagtatgacttttcctcctctgactttcccgtaaccacataataaacttttgctgttagtcatatggaatgtacaacctgagtctaggatccattcatcctttagggtagctgcagccacatagacttccccactatcat

SEQ ID NO: 382317 - DNA, 1228 bp, Cannabis indica
tataaaactctgaaaccattttgtttataaacaaacgcaggctaccatatctgatgattctgattctttatcgttttcaacattaaaaacagaacaaaaaatttaataacaatgaaaccaactagcctaaatattaaataataaatccacagcagaccagtaaaggaaaaaaaaaaagaaaagagagcagcattgaggtaagctgtcatgagtaaaattttataagttaaaactagaaaggtaaacaaatattgctactatagtatttgccgcaatccattcttaagggagtaactgaaaagcactacagatggtttttccgctttctcattcttcatcgtcggtttcatccccgatctcctagaagacaatgcagaagtcaggacacatgcacgaatcaaattctaaacttccgaaacaatattagaactgtatattttaacacaagttcgtaatgaagttaacaaataaaaacggcttaaattattaagaggaccagatgtgataaagttcgtcgttcgttgttacctcttcatcattttcttcatcatcagaatcctcttcatcagcctcctgcaacgattaatgaacacaagaattttaagaaggttggtatgaataagaaaagattcattgtcaactaaaacttttgaagagagaataattacattattgaagtacttcaaaggattgggccataaatcctccttaattatctctcccacctgcaattccatggaggaaaaggaatttaaggagttgaagaaaatcaaaataatcattaataataaatgcaaagtcattaattgaaggaacttataagagcacctgcattagatgtagatatagctaagcataaagaaatacattaagacatacctgatcctgaagctctattacttctgtctgatcagcatcacaaaaccaactaaagaaactgcacatattaaattattctgagttagttatattgttctgattataagagcacctgcattacatgtgattattattacacaatgtaaataaatgggatttttatttacacaaacacgtttttaaagtttcaaacaatttcatgataactataaatcaactacaaaacaaccaaaaacaacaagaaaactaacctcaactataaataaattataaaacaactaaaaaagaatatcaaatagtttactgaaattcgtatttttgtaaataaaaaagttcaaacagtaaaaat

SEQ ID NO: 382318 - DNA, 4331 bp, Cannabis indica
aaaacttataaatatatatatctttaagttattaaaagctcttgtttgactgttctacttttgattcttaaaggaaatgatctcgtatcttatggtctctgcacttgtgtgattacgatttactgtgtcaggtcacacttttattgaatagaataaattaggaatgaactaattcttttttctacattgaaacgagtaatctctaaattatttatgtgtaaaatttagagctaatcaggataatgatgtaccataaaaacacaaatgaaattaaatcagggaatctgacttttcttggtgttacaaatctgctcaatcatccctgtggatttgattactagaatcatcatagttctaatttccaacagttattatgatgaaatgagcactttgatatctatcagtatattaacagttgatatctacgataataccaaacatatcctctccaacaattaactcattatactctgtttccacaagtccaaaggttgcaccttctattgtgaaaatgatgaaaaactaatcaaataaaatatcttaaatgcctttaaacactatctagtttacactaagcaaacaatagatcagaagttattactgcattttgtttgactgggatactagtatgtaaatgtccactttaaatatttgagtcatgattgcatggacacaatttagagtaaggaagttttttttttcctctctatgcttttctctctgttaagtgtgcactgtgcatgaagtaaccttagaaattctatgggtttgaactcaggcaggccatggttgggatgtgaagagtgttgactggcaccctacgaagtctttactcgtctcaggtgcgtacaacaattttcttgtgaaagtatatgtacaggtctaagttctaactgtaagtccaaataacatcattgttaactttcctgtacccaggtgggaaagacagtctagtcaaactatgggatgctaaatcagggagggagctctgctctttgtaagtaaacaatttatactttagcatgagatattttgatgttgaatttcttaagcagtgaataatttttgttgcagtcacggtcataaaaatgttgtcctttgtgtcaaatggaaccaaaatggtaactgggtactgactgcttcgaaggatcagattataaaggtgacaatttatctttaccctagcttatattcaagactttagaaaagacttgattatactttctctttccatttttaaatctttttgtattgacaccactttcttgttcttttatctcccctctttttgtagctttatgacataagggctatgaaggagcttcaatctttccgtggacatcgaaaggatgtgactagttagtgacatttttcttctgagcattatatagcattattatgagaataccacttactacccactttcctactgccaaatgagatgcttggtgctctagacttggctaatgatctagtaatcaccccatcatggtcacagctacaatttagacccgtgtgtgtgtcatgcggaagcacgccacacaatgcattatttgagaacttaagaaaaagaacttattttagttcatgtgatggcagtcatcaaagcattagttttgacctttattaaaggaagccttgttgggtgtagtaaggacaaaggatcaagcatcccatttgctctaaaaattatatgtttcataatggaaattatctttataaagttgaagttgcatattggattttcatagcatattttcataatgtcttagcctctctaagggtgaacattgaccaacatagtcagtcctttatttgctaatacttccccaggtgttaaaattaacataattttccattaggaagaaatactgctaattcttatatgtgtatatatgatttaatgtggttgttttgttatatttctagctttggcttggcatccgtttcatgaagaatactttgtcagtggaagttacgatggatccatgtttcattggcttgtggggtaaagtcattttcttgtcaaaatttgttcagaaatctcactgtattgttaaacgttttaattcaaaaatggttttgttactttatagtagtttcctgagtaatatatttgaacaaacagcctactgtctgcattggtttccttataaggtattatatacccgtttagctagttgaatgtgatttttttagggtgcgtgcttgcatgtgtgttagtgtggcattggctagttgaatgttaaaactgctagataagcagtaaatactataaattaaaagatggtgaatgcttaatgaactatcagtttttttgagattctaaaatatgtttgagacagaataattaattgactcatttagtttataccctctagttgtatgatcagatatccaaagttttcactgtgatattctgagaatgagtccgacacattttgggtagcaaatttaggcggccttttcatgtaatgactcaaaacttattctgatccacaggcatgaaaccccacagattgaaattcctagtgcacatgataacagtgtgtgggatcttgcgtggcatcctattggatatcttctttgcaggtaaattctgtctttcattttgtttgctttaatacgctgttagtgtcgcttgcccatctctgcagcactgttgaaatactctatcaccttacattgacatgctttatacacgctagtaatttatcatgtactaacttttaatgtatttaattgtcaacatatttggttgtgtgcagtggcagcaatgatcatacaacaaagttctggtgccgaaatcggccaggagatacagctcgtgataataaatttaatatgggtcaaaatcaaggttttgcacaccctaccaagtcatacataaattcttcatgtttaactactcttgagtttaatttgtgcaataatctgaagattctgaaccaattgggagatgaaggctttttaaagggtctgctgattttggaccagtcaaatataatatttaccttttcatgtgttttacaggttatggggagcaaaatcctgctcttgctggacgctttcctggtaacttcccagtttctgatggtccaacaacacctggaccatttcctccggggttgactagaaatgagggaaccattccgggtgttggagttgctatgccattatccattccatcacttgatccatcagcacagggagatcaaaagcatcacccaatttcaatgcctcttggggctcctcctcttccacccggacctcatccgtcccttatggctgcaaatcagcaacaatcgtaccaacaaaatcttcaacatatgcctcaacaacaacatcagcaacaccaccaagcactccctcagcaaatgccccctatgcccatgccacctaatatgcaacaactgcaacctccttctcatttacctttactcccacatccccatttaactcgtccaccacctcaaatgccccctcatggtatgtcatcctcaatacctggatccttgccaatgccatcctcggtcccctcacattcgatgcctggtcccatggtaagcatttttgtgcaaaaagaagtttgttatttataatattgtttgctttagttttctaagggcgcttttggaaagtcaccttgtaattgggattcagtgtaattccgagtaattacaagattcggtgtgttagttaattaggtacacagtagccatgtaattggagggtaattgaggggtcctcgttacactcttcaattctcataaccctttgagaaatgggtgtagttacactattaccatttttagataattaatgttatttaactatatgattactaactcatttgccaaacatgaaaataagaattcatatgcagagaatatagtggaatcttgatttatgtatggtctctcttgcattatgatcgatattgcataatagggcaatttttatgcctttgcctttttaattaagtcatctgtccttcagtgtagaagagaatgaactttccactttctttgattagtttttgttttccaatgtgtaattcagtgttttctctacattaaaagtttgattcttacataaaatatatatatatatatatgtatctgtatgtagtataaaaataaagcaaagaattcaagaattaaggtggcgtttagttggaggtaatgaaatggaaagagaataatttacattccattcttttgtttggttgcatattaaagtattggaatgttattccaatagaatgacctttctaccattttggtggaatgactattctatttttgaaatggaaggaaagactatttcaa

SEQ ID NO: 382319 - DNA, 8558 bp, Cannabis indica
gaattctttcttgtggtttcctatctcaaagttgtcgcaatgttgatttctcgctatattttagttattttcttactttttattgagcaaagtgtatttttatagttttaaaattttacaatatatttttgtaagggaagttctatttccaccctataaaataataattacactccttattaaaaaaatcttaaatagtttttaaaaattactattattatttttaaaatttttcccctcacattattttatgttaatttcaatacttatttcagttttatttttatattttttttataaaccgtaaaaaatcaaataatttttatttaatttttttatcataatatttaatatataatttatttttatttgatatgtatattttttaaaaattatgaattggaagaaaaaattaaaaaaaaataagtacaattaaacatataaattttttataaaataaaaattattaaaatagagcgtctttaaaaatttgtagagtgtaatcaaaatgtttattctgtaaataaaaaatttatgccttaaaattgtaaataaaacatttgccttaaaatttcatttttgaaattttcatttaattaatccttttcttacaacaaaacgacgtagcgtttaacctttgcattgaattgagattttgagaactgagaacgacacgtcgttttcacatctggtttctttctccatccatagcagcgcaaaccattctctctttctctctctctccaaccagagcatcagagctcaacaatggctcctcccaaactactctccccactatttccatggctaatcatactcaccattttccttcttttcctttactcttctctcctcccatttcaatcacctgcttctacttcttcttcttcttcttcttcaaactcacctcttaccaagatccatactttacccacctgcaatttcttcaaaggccactgggctacggaccccaatcgaatacccatctacgatgaaacatgcccttttcatagaaacgcttggaactgtctaaggaaccagagagccaacgtgggtagaatcaattcctggaaatgggttcccgaaacttgtgatcttccacggatcgacccgtttcggtttctgagtctgatgaagaatatgaatattgggtttgttggtgattctttgaatgagaattttttggtgtcttttttgtgtattttgagagtggctgatatgggtgcaaagaagtggaaaaagaaaggagcttggagaggagcttattttcccaagtttaatgtcactgttgcttaccatcgagctgttttgcttgctaaatatgagtaagattgtttagctcttaattcatctttcttttaaatttgagttcttttatgctattactatagattgtgacagtaatggattggtaaaggtgaaaagttttgctttggcatatgatagaattgtgtgttattagtgtgtgtaaaatacttgttagatttgttattgtggtgaattaatacctatcaagaacaagaaatttaatactctaggaatgtaaaaaaaaaaattgaatataaaaaattaaataagttttttttttttttcatttacactggaaaggtttttccttcgatttcaaaatagaatagtcattttaccataacgggcaattcattggaatgatattctgatactttaaaatgcaaccaaacaaagtaatcgaatgaaaattgtgtacaatgagaccttatatagacaaataatgaggtctccaaaagggtgggaaaacagagctagacaactaaactagctaactgtcaaaccgggggcctggttccatagcaaatcttacaaccggcagtccatttggcaggtaagttagtttaaaatcttctacagttgtcaatgaagtaaatattggggaacatatatctctccttgtaaacctgaacagtggcttcaaaactggtttgtccttggttgaaggactataattggtattaatttttgaacctgaaggaacactgatatgttatattttacaataatcattttcattgttatcttacactttttagcttggtgatttcatttcttcttttgtgacatgtttaactagttatgctttcccgttgttttgttgtgatatttctttttcttgatttagttgcataatggcaacctcacatgctcattactgattaacctaaggtggcagccaaaacaaccctcagatggtgaccaagatggattaaaaggaattcatcgggtagatgtggacactcctgcagctgattgggctagcattggtgatttctatgatgttcttgttttcaacaccggccattggtaattttctttcctttgtctaatttgcatacgattttatgttcatcgatgcaagttagttttattaatgacattatgaggagatttgtttctcacttacctaattagttagaagtcatatctataacacagtttgtcagttttctcattcttacgaggtttttgtactcttaaattagggtgattctacgctagttttcatttttacaatgctgatgtgatgtgtttgaaaatcatgctcatcttttccatctttgacatctcaaattgctgcatagctcctttctctatggtgcaaacctggaatattttcaagagcgtaaaattactagtgctcgtatattgattgaagaaagtgtctaggattttccatagtacttgatgtctggcttagtcttccctcatcttccttatctatcctactaacttaatcttcaccaggtggggttttgataaattccctaaagataaacctcttgttttctatcaagctggtcagccgatacatcctccacctaacatgctggatgggcttaaattagttcttgagaatatggcgtcatatattcaaaaagatattccccgcaagacactcaagttctggcggttgcaatcaccaaggcatttctatggtggtgattggaatcaaaatggaagttgcatgttcaatgatccacttgaagagcttcaggtatgaattaatgatagctctctctttcatgacactccattttcatgtatcaatgacaatcttaacttttgattatgttctttgaaaatatggtctttgcatttcttaccttttttccaagtaaaattagattctgatatctggacagcttgactcatggtttgaccccagaaacaatggagtaaataaagaagcaagaattctgaaccgtctgattaatgattcagttcaaggtaccgatatccaattgctcgacttgactcatttgagcgaattcagagcggatgcccatcctgctgtatggttgggcaagaaagatgcagtggcaatctggggtcaagactgcatgcattggtgcttaccaggtttaccagacacttgggttgacatcttatctgaactgattcgaatcggcttgaagacaggatgatcaacgaggaacacgaacaagtagttttacaggcttcaaaagagtatatatatagcagagtttcagggaattgggttgagaagattatttccattcatggagtttggcaaagattttgtcattgcattcttgagttgagtgctacagccatagccatagccatacatacaattgattgttctccgaatccaagcatggacaaaagagttaatgttactctacattttctggtttgttattgtcaaattgataaatcatttaattgattatgttatgtatagctttctatcattagttcatttttagttataatctcttaattaaaatataatttttcttgataataacaaatgtattcttagataaaagttccactgtaatattaaatttaacctcatcttatttaataaattcaattcttgagatattttcaatctattttttaaaataaatcttcaattggacacaattttcttaattagttttgagtttaaaagaattaataatttttaatattttacatattttcaattatattattataatttacaatacactttttattatatatgatttctctaaaataaactttttctttactttttaacaaaatgcatgttaagcatgataatagtgagaatataatgttaatgcttttattaatatactgttaatattttattaaggttttattgttaaaaatattatgttattaaataactaataattttatacgttaattttcttaattccatagcttttgaccaaatcaaaagcttattcaagaagaaattagcttcttatttgttaattaatttatattagtctaaaatttaaacttttttattttatagacgtataaaataaaattaaattaaaaaatcctaaaatgcataggagataataggggttgcgaattttcaattttatatagttgatgaataataatggaactacatacagattaagagttttttgtcgttaaatgtgaaacgacatgtcgttgaaaacctacactgataaaaaccagtgaccacccttcctcctccgccattgatttggtccatcattcctctgccctagaaatggctctgagagttcatctcacccccaaaatccccacattccaacctccatctccaaccctcaactttcatctttccccttctgtaataacattctctagcaaccgaaccaaaaccctaatcaaatgcacctcatcggacctcagctcgggagaatcagattcagagtcagagctggctttaaatttggcaagagaagtggagaagatgaacaatcttttggtgcagagagcggaggccatgaaaaagagcagaggactgttgttcaaggaagtgtgtcagtacctatcgatggattctgatgaggttggaagccattggaggaagatggaagaggaagacaagtgggttttggttaaaaggtttgtatctgattggggtgtgaattttcatccactttctgctaaatcaatcaaaggattgattgaagaacatttaactgcaattgaagatgattatcaacaaaccaattctttaaaatcatcatcatcttcttcattgtttccttctttgaagaaattcatgtggttttcacaagagtagaaaagttaatttcaatttcttttgtttgtgtacaaatattcaagtggaaacaaattgctagttttataagttgttgaatttaataatacaaagagcaactatgatttggggtgcaaagtctattatttacataattatgattttaacaatatcatcaaatgaatggttcttttgggaataatcataataaggagaagaaatctttatatacaaaaaaggggcaccaaatatttcatttgagaacactttttgattgtgatgatgatcatgatgatgatggtgagttagtagtgtgtaacaaagagagagatttgatcagaaagatatctgcctgcactgagcaacagaagcctcggctgggcaatatggacatttaaatgttcgagtgctattctttgacagcttgatgattgattgcttgcatagaacatgtaaacatggcatcaacatgggtggattctcttcactgctttggtctctactcacagggcatacaaatattgaatggaactgaaattccttccccaagtcaaccggaaccggtaactgcttcatcgcctgccattcttgcttctttgcagccatgacatttgctagctttagcagagtaggcaacccttcgaatccggccgctatcaccacaccaaatgggctatgctgtgactgtcctaggacactacagaactgctggatcagctcctcggttgatttctcccaatgggttggagacattaagtctgcgtatggagaactcgtgagccttcctcggtaggcaaggcaacccataagcttcatgatctcattctcgtagaggaaagcaaatggtgcaaggtaagttttggcatagttaagtgcatcagcttggcttccggtttggagcatctcgacgtattgcagactgtgaagtttaagctcaagattagaaccgttgtgcttgagcttttcgcggttggcatagacccatctaagagcaggctcaaggtttttagtcttcatagcctcgagtatctgatacatttcgaaaaattgtaactttaaattggctgcttcaggttctccagcctcatttataatgctatctccaagatcaaaccaaccttgctggtaaaagtggtttgcaatgatttgattcacagtatggtgatcaaagtcaacatttctgtatgctttggatatgtcagtattgaatgctttatcaaggagttttgggtatttgctaaggtttacgtttagctccttctgagaaccttctaactggtggagtggggagatcgcattgagcttatgcttaagctccagaagaatggagttatgatcagcaggtgagttgaggtcatgaggtgacacaatttgtgcaagtgcttgttgaatttcattgccaacttgatcaattgcttcatgacactttgaagatgatagcttttgcttcttgacaacgcgatcgaatgcatctttcactgtattcagctccatttttcaatccaatattgagctcctgcagcaaagtgatataagaatacttagtgtgatttccgaaacagtaaacactgctaaaagtatgcatcataaattgaaagttgtcaaaaaatatgcatcataaacaaaaagcacttcgctataataaattagaaaagccaaaaccttatgagcatagatataaattagctataataaaatgaatacagaaatttgcagaaaatgtttaacaaattgaaagcaacttgggacaacacattctatactgatagtgaatgtgaaaaaacattacactagctttgagagctcaactgatttctaccttaatctgggccaagcaaacctacccaaaagaatccctacctaatcttatctgaaaactgcaactgcattaatgtggcgcaagagagatgtatgagacccaaagttgttgtcatgactccaaaaccacaactaatctgaataaagcacaaaccaggctctagacttatgattttgacaagtaaaattcttcactttatgataaggacaccctctagacaaaagaagagtatggattcgaaacagaagttactctattttatttacaaaaatagtgaaagaatctttcgcagagtattgcagggaggatgcaaatggctaggtgccaaggaaaaggcaggaacacgatgcattaaggtcaatataaggcagtgagcaaccaagtcaatctccatgggcaccgaaaaatttatattcataccatgcaagggaatgagcttgcactgagatctagagatgatttcttgatataagatgattatttctcaaccttaaattgaaagacaaacatccaaggtatacaatcacgtattcatcttggacccctataaatcccattgagaaagcttgctctaagagtttactacaaaatacatgcaggatctacctctaaaatttgtacacttattgaggacatttttccacccaattcacctgccagagtcaaacaatgagaaaatgtgttcctcaagagatgaaagaaggcagataagggtctgacagaagaaaaaggcttatatagcaactagaaaaagaaaaagagaaaaaaaaaactggctgtgacgacatgagatgagaagtgagagaaagtccaactgcaccatggaaaaggaagaggatattggactttaagatccaataatggacagaaggcaactaagggtctgacagaagcaataaaaaaacatagaaaggatcaaaaaagacaagttagaggttacttgaaataggtaagttttgtaatcccagtacactagctaaaaattgactgttgaatttagtatcaacaagtatcagtccaaaggctataaggtacattataggctaattttgcatcgtaaataactaaattgggtgttcctatccaatgcagaagataattctctccactaattaatgttccttctttaatgaaaaaaattcaggctacatataagtgagtctctattctttaacattctaaaataatgaactttttgtttttgtcaacagaaggagaagggactcaacaagtatatggaaataatgtgtagaatatcgcaattagtacagatcggcaattttgtttccaaaatgccatatgttacaagatttggaaacacaagacgtaacacaccaacctcaaaagtcttggtgactatttataatccaaattatgaaactaacaaaaattatacaattatgcagataacattttcaattgttttgaatagaaatgtcctacaaacaattgagctaaacttaagaagattttctaaacaaacagatgcaagcataatttcaaacaagtcaaaccttcagggtgtaatggtgcattacatttcatggtaaacttgagaaaaatcaaagagaactttcactgctataaaagtaattcatcaaaaatgactaacattcctaaatttagtattatcagcagaaagaaaatgatttactttaggcttaagctataaaa

SEQ ID NO: 382320 - DNA, 2724 bp, Cannabis indica
ttttatttatataatagcagtttcttcatgatctcacgagattcatgacagattttcttttatgtagttgccacagatccgttaagatcagggcaaggagacattcatatcaatgtttatgtttgaaaaggctagtttaagcctcaaggcgttttgtcttggcaaggcaaggtgtaagcctcacatcttatactaaaattctactttttttttcttgaaaaaaaatctaaacactattaatcaaaactaataaatcataaaaacaaatgatagttgataacaacagtacaaatttgggaagaaaattaattaaatttcagaactatcaacctcgagtgctttcatgtggtatttcctaacgaatgctaggattttatgtatatagtactattctaggcactattgttaggcccaatacttagaaagtcacttttgttgcactaaaattaataatgtaactgttattggctagtttggttggcacatagctttaaacaggccaaaataagaaataataagtgaggttaaggcctcatgataatgttgaggcactagtttttcgggtgcgtcaaaatgagaggcttatgcctttcttctcttgcctaaggcataagcatcaaagctactcctgaatgcctggctttgaggcaagccttgcctcaaaagagctattttagacattgattcagatgccgctaacagcagagcaaaatgcccaacccaacatattatttctagtgtctataatgagaaaccggagcaacatttgataggcatagctatgatcaaatattcggctcttcacaccagagataatgtagtttcttttggagaatgcgtgacaactgacaagaatactttttcatatttttttgaaagctatatatgttcaaacagttttggtgcaattacttgtctttattaccgcagtttgatgttaggtgttgcacttgcacaggccaaagcatgtgctggctgtgattatgaaactgttgcccattatttaatttcacttatatatatgtgtgtatatatacacaccatggcatgtgagtttctgtataatgcatgggacactgattcctgtataatcgacgtttcattcaaaagcacgggacgcattctttgattgtagtagcaagagtccataatcacaatgattctctaatctttgcaactacagatttactcatcttcgtttattttattgtgtggaccagttaaattatcttcaaataaccatgatgaccaatcctagatcccaacaaaaccttgaagcaaggtcaggtgggaagattgttcgaaataggcgaattgttggtgctagggctacaccgtatgagcggcctagagtgacaaatctggaacccgaaagccctaattggctttccaagatcattttatctccgactcgtatgattgcgagcggtgctggaaagcttatctcgtctgtctttaatgtggattcttcttcctcttcttcatcatcatcttcttcttccttgggctctgactccaattcaggtaagtaacgttttattattttaaggattgttgaaatggggattttttcttggattggtttctctaggtaattgagagttcatgacctttctttttttcttaaagatttgagctctaagattttctttttaatgtttacttagtttgggaaaatgaaaaggagagaagtatcattattttactttatatcaaagtgtagagaattcagtcgaagcggctgtctttaacagaattatttggagaatattgtgttaaagaagtgctgatccacttagggtttgggttttgagtggttcgcttggagtttggattttgtatggtgccatatcctatgcctgatattttaagttcactattgtataagatatctgtttaatgctattttaatattagtttgttacttcttggagacatttaaataccttggtctacattgcctctcactgttttggccgaggatcttgaatgctgtagctagtaatatattatgttttaagtgacaactgagaaccagtgcttatattgacatgttaactgtatcatttgtatatgtctattttaatagttagctataagaagcatggtagctttgtacttcattaaagcaggcaaaagtttgcatttgctttgggtctcttttcaatcttctcacaagattatgtgtctctatttacacagagggaaattgcgacaataatcacgttgatgatatctcatctcaaggagctgatatcttaaatgaggtaattgcggatgttgaacatttttttttgctcttttggaagcatgcttgtcttctttgaattgatagtggcatgtttggtgcatcaaacaacttgtcactttaacagtacttgtcatttacatctgtgtttgtatgttgacaacacaactatcaaactaaaatttgagtttctataattatattttatggtgcgatggtgggttgtttatttgattattgtgaactgcatcagaggaagggaacatcagaagtaatcaattactttaagaaggatcctgaaccaacattaagaaaaagagacaccaagcatgcaatcgaggcgctacttatgcaggagactttcacgaggtaatcaagagcatgtcttcaggtttttaaaattaatgtcggaatgttttcatcccccctcctctctctctctctctctctctctctacacacacacacacacacac

SEQ ID NO: 382321 - DNA, 2592 bp, Cannabis indica
accactagaccaaatgcccacatatgtttattttcaaaccaatatatttatgatttcttctgttgctctgcttaactgacatattttatgttccatttacttctctaccttttttttaaacacagtgcacggtttttttgttgttctgtaacacacgcacacacacacatatagactagctggtctagaaatttgaaattgtacacacacacatatatatagactagctggtctagaaatttgacattgtatcatacaagcttggtgatgactgatcatatgaagttatcaagggatcaattttttcgtaagtagagattgttcttgtataagttttcaaagctgatctggatgaaaacatggtctcttttcatttgcgagatcctattaaaaaaacaagaagctgtttgctgtcttcttagtaacttgctggagtagcattttagattgaaaaggaatactgcactagttgccagattcatataaaaggcccgaccaaaaaaaatgtaaaacatgtttcaagaaaattggggcattccgagaattgaactcgggacctctcgcacccaaagcgagaatcataccactagaccaaatgcccattgatgtttatattgcactccaatatgctaaacataattgataggttgatttctttagttcaataatttcttttgtttctatgcataattaatttctttcatttactttgcttgttttgaaattcagtacggctgagtttttaccttggtgttgtcaaatacaaatataaaagaaaattttatttactccaaaggaaaaaaaatggttctctatttaattaacaagttggagcaggaattttgtagtgtatcatacttgctttgtgatcacctgtggtattaccaaggattcagtgtttattgtatcttacacaggttaggtttcttttgtatggcttttcaaatctggtctggataaaagcatggtctcttttcattttcagatcctaataaaaatttaagatgtgtgaattattactattgaataatgcaatcttttgccaagtcaggacaaggttatgcttaaagtaaaatatgaaatatggtagctgtgtgctgcagtcttcatactaaaaaattgatggagtagtattttagacccataatagaaaactgtaacaattagtagatttgttttcaatgactgattaaaaattaaatgtgtttgagcaaaattggggcattccgagaatcgaactcaggacctctcgcacccaaagcgagaatcataccactagaccaaatgcccactgatgtttatcttgcacccagtatgcttaacatagattgatttcttattttctcttgttttcatgcacagttaacttctttcatgttccatttctcttccctgttttgttttgaaacttaaaagtgcagcttttggcttggtgctgtaaaactcaaatataatagaaaatcttattactccaaaggataaaaaaatcatacttgctttgtgatcactaatggtgttaccaaggattcaatttttattgtatcttacatatttaggtttcttttgtatggcttttcaaatctggtcttggatgaaagcatgggctcttttcattttctgatactaataaaaatttgagatgtgttcattattactgttgaattatgcaattttttaataagtaaggacaaggttatgcttaaaatatgcaaaatattaaaactggaagctgtttgcagtcttcatattttaaatttgatacagtagtaatttagatccaaaatggaaaactgtaatagttattatattccctttcaatgactgataaaataaaattaaaatatgtttgaacaaattggggcattccgagaatcgaactcgggacctctcgcacccaaagcgagaatcataccactagaccaaatgcccactgatgtttatcttgcatccaaaggctaacataggtcgatagattcatttctttagctcaataatttcttttgtttctatgcaatgcgtaattgacttctttcatacaatttgtttgttttgaaactattgacttctttcatataatttgtttgttttgaaacttagtgcagctttcgccttggtgttgtaaaactcaaatattatagggattttttatatactccaaaggaaaagaaaatttgttctcggattaataagcaagtttgtctaggaattttgtggtgttaccaaggattcaatgaattatatcttacatgggtgaggtttcttttgtatggcttttaattctggtctggatgaaagcatggtctcttttcattttcagatcctaataaaaatatgggatgtatgaactattactgttgaattatgcaatcttttgctaaggcaggacaaggttatgtttagagtacgtaaaatattagatatggaagctgtatgcagtcttcatattaaaaaattgatgtattttagatccaaaatggaaagctgtactagttagtagatttgttttcaatgactgattaaataagattcaaatatgtttgaacaaaattggggcattccgagaatcgaactcgggacctctcgcacccaaag

SEQ ID NO: 382322 - DNA, 3974 bp, Cannabis indica
aatagtatttacccataaataatgaaagtgcttgaaatttatgaagcacattgtattgtatagtcgccaatcgccaacggaaagcaagcaatggcatgctctcaaatttgacccgtaactaacaagtcacaagaatttgcccaaagaaaccaagaattgtcaaatgattctttaaccaatgtattataattattagggtcctacttaaatttggaattaagaattgtgagattgacaatctaatctaacgagataaggagaattggattgctttattacaaatttatcccaaccttcaaaatgttcataacttattattatctatttacatattatgatttatttcaaaatgaaaaatccaaatcaattgaatacaagtctatccaattactagtgtgaatctccatatacaattttgaatattattcttcaaatattttatggtgtctaatatgatatattattattaataatagagtaaatagcggtataagtactcaaagttttaagtttataagcgatataagtccaatgatttttttttagtgacataagtacctaatatttgtaaaattgtaatttttctcaattttcgtcagtacttccattttaaatttattaaaaaaaaatttgcaggtaactgatattacatattttcgtccagaccaaataatctaaaatttgagtcttatatactatttacccttaataatattatgtaaatctgttagaatttagagataaaataaatgaggttttagtcaaaactaattgactatgagaaaagtagctcattcatcttatatattctatcatctttctacacattagtattacgagactctctaacaaaatcttacttacttttttctttagaatgggaggaaaaatttattcatacatattcaaagctaattacagaaacaagctaagctaccaccaagtggatcactctagctttaatagctatctttacatttagactcaagctcttaccattctataagctaaattgaataaacagttatttctattgcactaaactgcatatatatacacacatatatatttatataatagctgagaaaattgcattcaaagaaacctctttcaaagatgaaatacccttcgaacagaaatttctccaatcttccatgttgctaggccaaaagattagataaatcttattttcattcatattaaaatatgtgaaatataatatcacatttaataatatattataatggagttagattgtctccaaagttatcaataataagcggattgacaattcttagaggactgtcatcacctattttatctttcaagacatatcactaaaatttgatttattttattttatctcaatatttatattatacaatgactcattaacatggttttatatttttattgttaatagataattggttaaattaataagttttatattaattttagtttccagtctattttattagatattcattctttattaagttactgttggtgataattcttgcaatactattctgcaatcagcgaatagtattactcatacatctaacaacctctattattagtttagaaaattgtgtttgaacaaatacttgtctttgatttttaagttcttctataatagtaaatttttattaatgaattttacaattctttccccaaaaaaaaaaaaactactggcattataccatgacactatatggacatctttttcaaaatacaccactaatattttattttttcaaaaaaaaaataacatattatattcttttcaaacatacaatattaatattattaattaaaataaataattaaaaaatacatttaaaacaataaataatattatataaatatagaatatgaattataaattttaaaaaattttaaaacaaaaaaagtataatataataactttgagagacaatataaatggaaaaaaaaaatagtttaaaacttgttggaaaccactaaatttgctaaaaccacgagaaattagtaagcttaaatataggctgctcaacaatattctacaacttttgatccgaccttctgactattcatcaaaaacgtgtcattttgttgacaaaataaaaagcaaagaaaaaaaaaccaacaccaaaacacaaattaatattacccaacattttattctctgacaaaattataacaaaatcatgtctatgagatccatttctggaaagagggtgatgtcgtcgtcgagaattgaattggaaacattgatggaggatgaagaagaatacagctggagagaagtgaagcttccatctctgatcccagttgttccagaaccagaactcgagagagaaaccggtgagagaagaagaggccgagatatcatcgtagccgtcgatcatggtcccaatagcaaacacgcctttgattgggccctaatccatctttgcaggctcgccgatacacttcatctcgttcacgccgtttccagttatctatttttttttcttcttccctttctgatttctgttttttcttttatatatgtttttaaattatattgtcgttttatttgttgaaggtgtgaataacgacgtcgtttatgaggccactcagcggctaatggagagtctttctgttgaggcttttgaaatcgctatggttagtgctattacttattaattattacaagtttatttgagcgttatttttttatttattttataagcatattaaataattttttgaatataaatttttatattgtaaattattttaatttttttaaaattttatagaatattttaaataattataatatatggttataaaagtaaattgaactattttttttttcaagatgcatgtcaaaatagataaaaagtgtgttagtgcatattgtgcattgtagaagcagcctagtgtatattatttggtgttgtttattgtttgagagatatgcatgtaattgatgtagaaacaaattttcgaatgaaaaaaaaagaaacctatataaaatgagaattaaaaaattattattaattgtctattgtaattgttgaaactttgatgaatattttaacaaaatataaaagtgttttagtatgtatgaagtagaaagaacctcatggaatatgaatttttatttacaagaatatatagagtgcaattttgatatttaagtttgggctccaaaaaatactcagttttataaaaatgggtagagactcacacacttgacccaccacaggcgtaactaatttcaataaaagttaataaggttgagtaatattgttatgagacacatgtagtctaacatcaccacatgattcaactccaacatgtgttgattaatgggtgtaatatatggcattgtgatccattgaggaagattaattgggttgtgtatatgtttaattattaaatattataggttaggtctgtggctcggattgtggaaggagagcctgggaaagtcatttgcaaggaagcaataaagcttaagcctgcagctgtggtcatgggtaccagaggcagaggcctcattcagaggttattatctttctatctctttcaatatttatacagcaatgctatacatccccatcaccagcactctcttgagccacgtggctctttctgattagttggagcaaccaacatcagctttgtaggcctctacacttagaaatatgttaagtagtatcttaaagataccatcacaataaggggctgatatattactatgagcttattctaatatcaaatttgaacaatgaagtttaaaaaattagatatgaccaaaatttgaccacctcctgaaataaattagcctaatcaaactgcctagagttaatttcttacagttgtgccgtggaaaaaacaattgtacccgtgatttgagaagaaaaaaaacagctgtagcataacacttttttaactgttatcttttataaattcttcaataagctattttttaactg

SEQ ID NO: 382323 - DNA, 3217 bp, Cannabis indica
caggaggtcttcctttttttctttcacggaccttcttccaggcagtctcacaccagtaaccgccgtgcatatttctttcttcagatctttataaaagcaccaaaatgtttaccgaatttttcggcaatagaataattataaagcttaagaaagtaataaaatcgtaaatgttaagaatacagacaacaaattttaatgtagttcaagcgttaattatccttagtccagaagtccattttattaggctctttggccggtgactgttgatacacatacgtaaaggatggacttttactccgatccaccgtgttcctcttgaagaagaggatgcttagtaggaacattgtggagttaataatggagctacggtaatgtgtttacagagaattcatcttcggtctcaaggtgaagagtcgaagggatcaaaggagaagaagtttactatccgatcccctgccatatgtgtctttcggggtattaataggccaatcccttcacgaggaccgacattgatagatcttcataagaatgaacccccactatcggattggtaggtgacatattttccacgtggtctttaccgacgtcagatggtactgccagtgctttggacgcttgtcactccatgacctttcttgtttaaaataatcttgctcctaaccgttgcatcgttttgcacaatacacaaggacatgcacggtctatgtggtgtgagagacaacctccaacatcgaacataggaaaagagcaagcggtgggccctcagcctggcatgtgcagaccgagcctttacgagtaaaaagagtaccccggatcaatacctcttgatggaaggtccatgatcttcgcgggagaaaaaggtcctgccttccagatgggagagagttgctaaatcacggatatgtccctcgtggcctacatttgggaggacttctttcgcggtggtctgttctgcaaggttagggcctttatcctttgggagcacggagcgaggcccttaggcggcttaatgatttctcgtctctcctttattaaggtccacgtattgtgcaggcaaaaatacggataacagtaagaatctaaaaaagattcttttaaatctgaaaatataaatgatgctcacacaatgatctcgaattcaattagaaaaacaatttgcatcttctaaaatgtgatttatatatatacgtgatggtataaattacagattcatatacaacattacttggaaaaaaaataaatctattaataattctctttaaattttaatagattcaacgtagttttagagtttttttttaattatttaactatactgtattggaaattatggatatacagaataactgggcacccaaataaaagttggactactataacaaaaaagatagtcgtgcatcgttattttactattgttttcagtatgttataatgttaatttgttcaaattctatcaaaatgtaatagggcatgaaatctataccagttctcttgaagagcaatggatgatgggaagaaggaaaaaattatgtcaattacgaggctagtggagaattcaaaccaaaagattgcaagtatgagaaatttatatagattctcttctcttcattggcgtgcgaatccataaaaataaccctacaaatccagtaccaggaatgggttgtaaaagagaaaagagtcgatctatcaggggagaataaagagccaggggttgataaagatggtttcaaacccgtatctaagggttggaaacagaaaaatcaagtctatttgattgatcctgaaacttctaatacatttaatgtgcttgaggaagttgctgggcacatactagaacatggggaacttgataaagaagaatggcccaaaattggagaaacaagagagaggagaagatcctcctctcaatcaataggatcaggagccggaacgttcggaaaatccacagaatgcaaaagtcagcaagaagcagcaagaagtcaagcattgcaaggcaaaagcataagactggactggttctcctcctcctcgagacgagagtcaaggcttctaagctaggggccttgtatgtcagaatgttcgctaattggtgtttcactttaaatattgcttgggaaaaaaggggaaggcttattgtggcttggaaccttgggagcttcaacgtcaatatcttgttctattcaagccaattgatccatcttcatgttacaaccttagacaatcgaaataatttctatgtttcttttgtctatggttataacaatgttgatgggaggaacttgctttggaaggaaatgttaacaataaaagtgaaggactcctggctcgtcctcggggattttaatgacatattagagaagggggaaagaattgggaaaaaagagagttacagtcattctaagttcaaggaatgtgtgatagaatgtcaattggaagtagttaaacaaagtggaagcttcttcacttggagcaacatgcaaataggggaagatagagtttattcaaagattgatcggatcatggcaaaccagaggtggttggctacttttctgaatgctgaggccatgttcattaatgaaggtctatttgatcacactcttgcattattgacggtgtatctgttggaatttattttactaggatcttagatttactaacaaatatgttatttaacatcctaaatatgaacttctaacatgatatgaaataaacacatataaagtataagaaaccttacagtggttgcagcggaatataatgtctccttccactcagatctctaacccttgtatcctttctgtcgcagagtatcaccaagatctgagcccgaatgtccttctcttgaatctggattcttcacaatcttccacactatgattgaggtaccacttgatgtgtgtgggcactcactcactcactatagggttcggttttcagaagagaggaagagagagagaaggtggcggctaggtttaggaagaaggctttgagtttttctctgaaggaatgagatgcatcatctttttcctgaagccatcactacctatttatagtaaaccacctagggttaggttagatttatttggcattaaaatattgaaaaaataaatgataaataggctacataagtggccggacatgtataggataatgggccccactttgtaattttgccattttatcattttttacatctcattttctcaaaaacggcaat

SEQ ID NO: 382324 - DNA, 800 bp, Cannabis indica
ttatgatcataattagaaaattataaaataactcaaggtttattagaaaatagagctgaaagaaatataagagaataaagcattaaaaaaagatggaaataaagatatatttgtgttttaattgtttggtatgttggaaaaaattcgatttactaaaaatatattagtatgaacgtaaattaattattaatatgcgtctatatatacttttaaaaaataatttagaccgtaatctcacacttactttcttgtaaaaaaattctttccactttccattttcttttttcttctctccacttctgtttttgatacaaaacatctccctctttttctttctttattctctcttttctcaacttttctcgaagaatttgctaaaagacattcttttacagtctaaagaccttataaaatgaaatatcatcttttctttgatacaatcagatttcttatttctaatttaatataaaatatatgagattcaataccaataataataatgtcattaaaaagtattagtattttcgagcactgattttctactctatttattaaaatatatcattaaaattacattttgtctattttaccttaaatttttatattatactatacccgagtctctatttcttttacatcactaaaatattatattttagaatatatatatatatattttattttaaaattatataatattaaggagaatttttaaaaatattctttttctatattttctttataattttacaacctaaaacttttaattacaaaaatactcttgtaaagttttaaaatta

SEQ ID NO: 382325 - DNA, 2114 bp, Cannabis indica
aataaataaaaaaacttgtcacattgtgacaatatcaatcaaattaaaactttttaaaacttaaaatataataaaaaaattatattaaaccatgggctgccacgtgtgattaaaatggaacaaaaattttttttcaacaaaacacagtataccgggtataaactagagcagtaaaaaagtaataaataacttgcaacagtaaaattgtaaaaaaaaaatagaaaaaatagtattgggtgtaaatttcccttttttagggataattacataaaatacaattttttgtaaaaaaaattacattttaatgtttaaagatttttttacatttttacggttttctataaatcaacacgaaaacaacacgaaaacaacaagaaaactacataaaagtaacaggaaaataacatccaaacaacaagaaaaaataacatacatataacaacaaattaacaagagtaaaacataaaaagatcgtattttctgtaaataaaattataaaaatcattaaaatatttaaaattccgtacaaccatatatattttttaaaaaaaaaattttgttgcttttgtatatttgtgaaatattcctttttttgtttgaaaaatgtaaagtaacttcctagatgaacaaggagaatccaagttacgagtacattaaccaatttggagagaaatcattccaaatgacctatctattttagcctaatgattactgacaagattgtgaggtaatacattgttatttctagaaacgtgactgagggaaatattaggaaagaaagataaagagttgtgcaccaaataaacaagatcaaagagagaaaatctatctttccatttatgtttgattttgttgtccaaaatttggtaatctgtttccaccaactctattgggaattgcacgaccacacaacagaataaggcagtatgcaatgccatggcttctgcataaatgggagtaaagatttctgcataggaagaacataaccctgcaacgatagcctcgttactatcactgattatagctcccataccaatttttatacctttgacatccaaggaagcatccacactcaatttaaaattctcagcagaaggcaatttacaactatcattacaattttgataaacgcaaggggtttgagccacataattctgatgcaaaccatgattttgagcctccttgtaaattgtagtcttgcaaaaaattaagcacaaagtcttccacatccaccaagttaagagcaggtttattaaacacagagttatttctttgattccacaccatccaacagataccaaagaagaatggaaagttgttcatgattcaatttggcaaaggctcttagctgaatagaagctctctaaattagtatgtctccaaatagatttagctctggaacactctataaaggcatgtgaaatggtttccttttttccattgcaaaaggagcaaaaaggatgggaaagaatcattttttggaaatggcttaaagcacaaggtaacacatgatggaaggctttccaaacaaatttaaagtacttgatttttggtgggattttcatggactaaatcagcttccaccaatccttaaaagcaattggattagaagaagagggacctaaagaaaaagctaaagacttagcaagatggtagacagagttgacagtaaaattgctaaagggatgacatctccaaatgagtgtcatccatggcaggacaaataggaaccttcatatcctcaaggaaatagagactaaggctttcaatattccactttccattttcatgaataaagtacgagacaaaataattaggaggggataatagaattatttcataaagtgaatattacatatttttcagttttttttacgaatttatttttttaaaatatatatatggattattattttttaattcttctaacaaaaaatgttatttttacattgcggcaacatattataatattgcagtaacgtaaaaataactttgttttctctctaaaacaataatcctctgtaaatatttatatttatatggatgatttcttagtcggtaatacctattaatgggtactaaaaaaattgatgaggtggcaatttagtgacttg

SEQ ID NO: 382326 - DNA, 5179 bp, Cannabis indica
ccaaaaataaaaaataaaaaatagtactagattatagaacctttcactacactacatataatttacgtaccatttacacacaacaacaacaacaacaacaacaacaacaacaacaacaacaaataaataaaataataagtaataaacaatttacaaacctttagaagtaaaaaataaaattaagaattaagaggaaaacaaaaaaaaaaaaaaaaaaattaaaagaaaaagaaaagaaaaagaaaatccactgaaagccaatcgtccatggagcttccttcaaaccatgaagattgttaagagggaaatgatgaggaaagcttggatgatactcagtcaatttgtggatgcagtcactaacaaaaaaaaaaaaaactgtttttagtgacaatattttagtcatattataaattttttgtgattaaagtgactttttgtcatgccaaaaagttatttgtgattaaaacataatatttaaatacaagttactttttagtcacaacatagaaattattatttataactattcataactttttttttgggcattttacaattttgtatacattattttaattaattacaaaataaatcggacagaaattgaaccattttgatatcggtagtgcgagggaggaacgttcgactgatgaaacattggctactgatttgttggagaaatcgaaggatcattgggccaagctcattgagaaagtctaatacactggagtgaggttgcactatacctctctgatagcaaaaaatggttaggtgtttgctaaacttgatctaaatgaattgagagtgaattgaaatactggaaaataatcatattatgtttggtgatgggagctaatcccccattgaatttttttgagggctttgctaaatgtgtctgagaaaacatggggctagaaaggattgtgaggatgaataatggggttgctctagtgaaattttcttacgaagcaaccagagactttgtgctagaggcaggggtggtacattttgatgataaaccagtgactatgcgaccttggagccctgatttggtgatgttatgaagctggttaaaattgctctcgtttgtataaaaattcacggtttggggttgcaatattggagaactaactgttttagtacatttgtaagcacaaatggaaccccaattatggtcgatcagattacgaaggatcatatgtcaagtttgtccgcgttttagttgatatggagattaaagaagatttgtcttcctattattaattttgaaaatgaatggggtgttttagattacgttcctattgcttttgaatataacttccaaccaaatgctttaagtgtggaggttatatatggtcaccaaaaggatcaatgtagggccacaaaaatgtctccctaagaagcaaatggtaagtgatgaagggaagaaacatgagactattgagtcaggcattaagacatcaatacaaatggttgagacaaacactgctcaagtggttaattcatccactggttgtacaaatgataatagcttaaatagtagtcatggagatgcttctatctcttttgttgggagatgatacaaaattttatgtgaatatgattcttgccaccaatttggaattaatcaacacaattagtgggcttgaaagctttaatttaagataaaaatgtgaagtgagaagtacttaaaaaagtggcagagttcaacaaaggacctttaaaaattgggataattcgtttggtgtattgaaagacgcctctcttctaaatggataattgcaactcattatcttggaaaattagagtgctcaataaatgggagaagccgttgaaagttaatgaaatgttggaagaaaataatgtgggcattggagctattttggaaactaagattcgtggtaaaaaagttgttcagatgacgaactctagctttcttggctaggagtttcattctagtgctgctatataaggaaaaaattattttgctttagccaaaatcctttgtttctatggatattttagaggagtctaatcagtttattcactgtgtaattagaatgacttgtctaaataaatctttttgcataacaattgtttatggcagtaatatgatagttgaaaggtaaattttattgagtaagcttgctggtttgttaaaacaagtgaaaccacatctaatttgtggtgattttaactcattcttgagttatggagataggttgggaggcaaaccggttcgtgcctttaagattgttaatgctaatgcttggttagcattgggtctagcagatgaaatgaagagttcaggttcccatttcacttgaagcaaaagatgatggggaacgaatctattctaaaatttattgggtctttaagaataaggactggatggatattcatccaaatatagaagccttttctgaatggaaacaagaatcagaccactgttgttgttttgtcaaaaatttatgccttggtcatttgggtgtgcaaccctttatgttctttaatatgtgatctgatcattctgatttcataagcaaagtgttggtgagttggatccaagtggtcagaactaaagatctatattccattatgttcaaattgaactggttgcaaaaagttcttcgacttcttaacaaaagcaagttttgagatgttcgtgaaaattataagatggctcaatctaactataatcaatcacagatggatttacagtaaaatcctcattcaaaggagctcctaattcaagaagatacaaacataattgctttgactcaaaattgtaaaactttagggagcctcctaaaacaaaaagcaagattgattggctgagatttggggatgcaaactcactttgttttcatgcaaaccttaagaagaggatagaagagagcatgattgcctctttcattaactcgagtggtcagattgtggatgagtaccctttggttgttgatcatttcatctcttatttcaggtcttttatgggcaacccaagtttggtgtctcaggtactaaactaggattgtattttagagggccctagatcatcattggatcaacaacttcaacttcttagaccatttcaggttaaatatgttaaggaagccatgttctctattcatgagctgaagattttaggttcggatggttatggttcaaaattctttaaaatcatgtggaaggagttatgaggggagatatcagccgtcattttaaagttttttgatcaaggtactctcctgatcaaataaacaagacattcttatctcttgttcctaaagtggatagtcccaattatgccattgactatcgaccaatttcttattgtaatacacattataaatgcatctctaagatgatatgtacaatattggctaatctgttacctgtgttagtgaattatcatcaataggcctttatcaaagacaaatcacttgctcataatgttatgatattataggattaatgttatcagaggaactttatttccctaggtgcttattaaaaattaatttgagtagggcttataatactattgattgagactttcttgagaggcttgtcaaagcatatcacttccctactcggtttgttcaatggattatggtatgtgtgcggggtacgtttcttaagctttagtgctgaatggtagaatacatgatcaattcaaaggtgttaaaaaggccccaaacaaggagaccccatatctcctctactttttattcttgccatggagtgcttaactcggctgctcaagcttcattctaattctattagagtattgcttatgctcttcgaggttactacattgaaaatgtaggtagccactacaagtgtgtatccccataagtttagtggcagtgatgagtaacactccatcgatctaaccatgtctaacaaggtctgatttcttctctctacaacaccattctactgaggtgttctaggtgttgtaagttgggacaagatccattcttccaaaaaatactctttgaatttagaatccaaattctctccaccacgatctgatcgaaatgtcttcaatgatttacctaattacttttcagccatagctttgaattctttgaacttcccaaaagttttagacttcttagccattaggtaagcatgaacatatctagaataatcattaatagaagtgaagaagtattcataatcacctcgagcttgaatattgatagctttttgcacacattagtgtgaatagtctcaatttgttctttggctctattaataggtcgacagtagtggaaactataacctacagttttaaaccataagatatagtgtaaaaaaatggttattgtatcacccaaatcgaaaactcacccgaagactagactccttgtgatgcttttttttgtcccattcattgtacttcctgatgccacatgaagagtgagaaacaaagcaaagaacaagtttagataggactcttttcctacaataaaactgaacgaatcaaccgagaatattttagattagacgaaaaaattacggtatgtctcaccccgtctctcgagctagatacttctttggataacctttgttcaactctatgcatcactaaatatttgtagaactgtttcagaaataatacaaaactatgaattaccgggatcaaacaatatgtactactcattattatggattcaattagctaagcaatttgatgcttacaatcatatcgagtctaaaaaggaactccatgttcagttgatcgagaccacctcatgctcacgatcgaagaacaaattttgttcatttgacgatggaggggcttgtggtggctcgtggaccagcgtctatgagaaagagcagacgagaaataaagagagatgaggacagggtggctcgtggtggttcgatcattgagagagtaggaatgagatagagagagcgagagatgtttgaaatgagatatgagcaagattggggtttgtattaataagggaatccttgaaggtttaaatcgtcgactatagtatccccgatggttttatattgtcgagatgccctttaaaatcctatttcattttttggattgtaactattttaaactgtcaaaaaatgtacacgagtgttcaaaatcgtcgagaatagtccactattgtaacaccctaactaacttaggcgtattacgtgattt

SEQ ID NO: 382327 - DNA, 2020 bp, Cannabis indica
tcaagataagtgaagcaacatcaaaactaccaaaactgggaattttttttaatgggagtgagacaatagtgatattacatgtcccacccacctcaaaatattgtattgtttatgcaataaaatcctttttaggatatctcacaaaaaaataataaataaataaataagcaagatctcaaatactcttttttttttttaaaaaaaattaagaattaaaatcattgatctcttcagacaagaataggttagtctcttataaaaagggtattgtaagctggtttggtctgtctaagtttcttttgggcctcattttttttttttttataaggccttgcttagaatttttgagtgggttatgtaagaatattttgtgaaaaatatgcaaataatgaggacaaaatcttcagttccatttttatttcggctgttgcataggtagtagttttcgaggtttaaatttccaaagctgaaaaagaggaggtcacaaaattagtcaccatgtaccaaaactagctcctaggtaatgcttttagatgttcttaacagtttttattttcttttttctttcttttgagagaatgttcttaacagttctacttagtatatttgttatccaaattaagtaatattaactgatatattctccaataaatctaaatttatttaataaattttatccatgattaaactgcactaatttatatctaattaaataagtaaatttgactttaaaatttacttccatataagttaaatgtaaaaatattatttcttagtaaaaaaaaaagtcatttataaatatataaattacttcactcattaccaattaattttaaaataaaatttcatatatagaaggtttcaataattacatcaaatatgtaaccataataggtacatttattgttagccatttgatcattaattaatagttctgattaatttacaaattaaataaaaaataacttgtaacctatagcctaatactttatttccttataaagctttaattaagattaattttttttaaattaaattaattgtattttttttgtaatttattactaaacaaggttcttttagcaattaattttcttgctcttaaattattttaatatttgtagcaaaaatagtcacatttttcgtatctattcgtgttagaaattgtcttaaatttagttatattaaaaaataaaattcttgaaaattgagcttagggttctatttttactattttagaaaatatagagtctattttgtcatttaataaaatagaatgtctaattggtaacttttgcaaaatacaagatctaaaatagtatttacccataattatataccgcttaaccaatttattttagaaggggtagaagtctactttttataaaaaataaggttttaattttattgtaaatattattatcaaatagtttgaatattaaaaaaaattataatagggatttaaatgtaaaaataaaattatttataaatattaattactaaaaaaaattctattaaatatattaattaattattattttataaatatataattaatcataattaaattaattttataaaaatattagtaacctgctagtaaaagaatagtcattaatatatatatatttcaaaatctacgtaattgagaacagtttagctataatgataaaattcaatcagtttttttatttttactttttgtattatctaccaaatctataaaataataaatatcttgaacatatatttattcttagcaaaataatcgataaaaacacaaggctctgttgatgttattcaagtgttttgtttaattatttatagggaaatttgcgacaaaagtctccaaatagttaaggttgatgcagattaatccccaatctcaaaaattagcgataatagtcccaagatcatattttctgtaagtccgttggtcttcaagttaactgatccgttaaacccaattcaaatgccatatgttaattttttattggtccaaataataattttaattaaa

SEQ ID NO: 382328 - DNA, 1614 bp, Cannabis indica
atgaaaaatgaagttatcaaaagtttgtatggcgtatattaagttttattgtatcatcattttgtttttattactcccaatcaaaccaacaataccttggtgtagattgtcagatgaattcaaggtctcttttgagtttattgtaatgtttttctgaagaattcaggtcccttcagctatggtagaggacactggatttatgtattaatgtattcggtggtggcattatggcttgttgatgtaaattatttaaaaaatttattgttcatattttggtgacagattcttaagttgctttcacgtacgtgtgcttattaatgggtgaatcaatgaaaattcatgcagtattttatttaccacctgcgtgcaatgcctataggctataatgatgaaaatggtaagctttttaaggtggtgttatagtgcaaatttttttttgcttagaaatacatacagtctcgtatgtatgtgacaggtgaatctaattcctagttggaaaaagatgacgtgtcagtaatagttcctgtaaagctatcttcacgtgattgaaatttgctaaaaggtgtgtctgagacaaagtctagttgcacactgtgcgtagcatatgcttacatatcagttatatgtgaggatcaaatgattctctcttgtgcttcatgtaaagatcgtatctttacaaacttgtggttcgaataactaaagtgtgcgacaattcttcttgaacttgtaaagttcaatgttgtcagtacatgaacactcaatataagattagtatagttgtaagcgtttagtcttatatatgaccctgaggttgtagtctcgagactatatgcaacctatgttacttaggaaagtggtgaatggtcaatatgcgactcttaaaattgtatacgttcgagtattaattaagaatggttgaaatcgttctcttatttattttggaaacgttttatgttttaattaaatttagttaatgttgtaacggtcctgtctgaccggttatgtaatttaaatgatcatttgtcttttatataaagaagtgttataagtcgaaataagaataatcacttactcttgcaaaagtggactaggcagattaagttttgattgaattactataaatctcgatctccctttacaatttacatatacgttgtttttgttttattattcgctattttactttgggtattcgctcttttaggtgaacactcgcagttttgtaagtgaatatttttatttatctcaaatatttatgattttttgtgttgtctattttctttcaataacatcaggtgtatacaatttataaaagcagtgtgattttgttcagctattctatgggaaaaaatgcttatttttttttttaagttttatcttattttttttagtatcaaataatgctttagagcatcttcaatggtaacatttttaaaagtgtcaaaaatttccacatcacttaaaaatatattattctattctcttccacattatattattatttaatatatattaaataaataatttttcttactttatgataaaataataataataaaaggtaaatactattttggatcctgtgttttgcaaaagttacagattggaccctgt

SEQ ID NO: 382329 - DNA, 2500 bp, Cannabis indica
aaagggtggaaaatattcaaaattatttcgctattttatttgcttaagtagtaggcttctattttgtaatacttttaggagatttcccttaatctttgtaattcccaaggcatgacttttcatttacttgaagatttcaattcctggatgtgtactttttgtagggtcctttctgtaaccaaaaatgataactgtcatccttttgtaattctctttatattattaatatcatttcttctgtttcttattaaaacaaaatcttggtcagtgttttacaaacaagatcaatataatatacatatatatgtaaaagaaaaatataagagaaagacacatataatagaagaaggcctctagtattcgtacattggtattagaaataagacaaataaaagaggagagatgaagatataatttcataggaatgatgggaatacctctaaagaggactgctcttcatgtttatgtacaatgtaccaaaagtggtctcagttctttgatatgttttgaattacaacttttctagaatttggaaatcgaatacaagttattgtcatttaaaaaatttgtcagagtaggaaatcatagcacacatcaaaacctataaatgtacgtttacttttaaatttttgagtttattgttatatgtatgtacatgggcctttgtgcacaacttggtcccgaatccatacatagacacgggcatgtatgtacagttttgtgattatgcatatatatttgttcctacactaacagagaagctttgtagcttttgtgaaagcatatttgtatttttactgtacttatacttgtaattataaattcattttgattgtcttattattcaggagtctttcgggtcacaaattgagtgggtctttgtcatccgaccttgggaagcttgggcaattgaaattattgtatgtgtcctcagatatttaaattattctcttggtatgtatgcagtatgtttgaaatcattggatttcctaattctttttatttctatattgtagagcacttcataataacaatttttatgggacaattccgtcagaattgggaaattgcaccttattggagaaaatgtaagtaccaagtgccattatttgttctctagtttgagtatttgctcatgtttactatcaaaaactggtgcacccctcctctctctgggaggaatgtagttcttgatgtaaagtcagttgtttccatgttgacaacttgtcatagactatcaaagaagatgacatttcatgcaaaaaaaatttgttggctgatcaataaagagtcatagatatatagggagaaaaaaggagtcttaatttgtcaggtatatttgatattaattgctgcatgaattcatgttgtcattttgccatcttcgccgcataccaatgatttttccaaaagttctagcatacaaaggttctcttctagtttgtttgattgagcacctaatctactaatacctttgtcatcttacgcaatgatctctattatcaataatatatattatttgtttctttaccaaaaaaagttacctaagacctttgacatggattcttggttattgttttagaagtatatagtcagtagaaattgtatgcaaatcaagtttgatgaattgaaactctgcgaacaaggatcttttcttactcttttttttttttctgtagattttactatttttggcattttacgcactcatatttggctttaatataaactaatcatttaaccttgtgctttattgtagtacaacttgtaatatttttattttacttttgcactacgttgtatttatttcattctgtgtgctttcatcttattaatatctgtgatctacagatacttgcagggtaattatttaagcggtttaatacccagtgaattgggaaatcttcaggagttgaaagaattgtgagttatttatttttctagtgaaataagatatttcatttcttggaatttgtttttggttaatctgtagctgaattctcttacacagcttctgtcattcattgtttgtgttatgcagtcatttttttaaataataattgatgtttataataacttgtttgtgtagtattaagcagttatgtgtgtcaaggttcaattctgttcagcatatatgcaacttcatttaaatccttaggaatgaactactgtactgtacagttctgggtgaaatcatgttttatgcagtgtgcttggtttagattagagattctttgaatttgtttcccagcagcaacaatattaatttttgaaagttgcagaaatttttgctacatctataaattttgataaatgtattaagtgtatgaattttagttctcctggcttttattagtttgatttatgatgtcatttgtaggttaaatttcaagagaccattttcctttctattggaagaaaaatattaaatgtacatatatatatatataggaaaattctacaatgcacacccttaaaatagatatattgatgcacccct

SEQ ID NO: 382330 - DNA, 1767 bp, Cannabis indica
tgtggcggaatagctttgggtacttctttcagccacaaggtagccgatgcaggaaccatgagccattttctcaaggcttgggctacaatatcttctcgccaccattctgcttcttctgatcaggatggtataataaccggccctaactgctcccacgcgtccttggttttcccacctttaaactcggtgcctcaaaaatacaaaaccacgacggaaaagatgtggttcaacaagaaaagcttagtgacaaaaagagttgtgtttgacgagaacagcatcgcagttcttaaggacttggccaagagcgaccaagtccttaggccgtcgcgcaacgatgtgctgacgtgtttcatctggaaacacgtctcggttgctgcagcgacggccaaaggagggaaagctaggccttctgttgcaggcctagctgtgaacctgaggccaagaatgaaatccaaattagctttggacaactctattgggaatctcttctggtggaccagatcagcaactgtcccagacgtccgtacagtggggataagtgaacttgtgagagtgatgagggaatcgctggtgagttttaatgagagtgtgaagagatctgaggagagcgatgatgttggtttggccatggtttcggagtactacgatgcaatggaaacttggtttgagtcgagggaaacggactattatatattcacgaactggagtgggttctacagcgaggtggatttcgggtggggtaagccggtatggatcggggcccatgggagaattggaggtgagagatttatgaaagttcaggtgttggtggagataccaggtgggaagggagtggaggcgtttttgacattggaagaagatgaaatggtagttctggaaaaagatcccaaatttctggagtttgcttctttcaatcctcaatatgttcctggcggggattaattatatatttatcatcatttgatgactgatttaagaagaaagtattttgttagtcatatataattaactaaatagcctccaactactgtttgtgtgtggtatcatgtgttttttttagtggaaaagtgtggtgtcatatgtttaataataattccatgcctatgtatgaatattttccgtaataataacgttttcctattgtaaaacggaggagtacacatggaaattgaaatatttgccaaacatgtgcaatttttcaaagaaaataataatattaataataataatttaatttgtatgggctgtgactatcaaaaaagcaaaacaatttaggggtgaaaagggttcatcgtgtgcatttaaaggaaagaatggcgaaactatgaggctactgatcaagggagttgatattagagacaaatagtaatatggtgaagcaaaaaatgaagagtttcataacacagcagcagcaactgctaaattgcaaatattctatcagctatgattatgagttgttaaagaccatggttgaaaaagtgaataggcatgaatagtagggtcgggcataggtataagcgggttaagctcgtgtttagagcccatactttttaggaactaaaataaaaaatgaaaggtcttatatttaagtaaaattaagtctattgtaaacaatagatattctattaactacattacaatagtgttagttcgagctcactgtgacaatcagtagtcccgtgatccgtaaggggaaacaccgggtaagctgtgcaatctcacaccgcctggggaaggtcaagtgggatgattctgagactgtgtagg

SEQ ID NO: 382331 - DNA, 2104 bp, Cannabis indica
aactaagcggtctttacacaatagctataatttatatatagaactagaaatctttatttgaattcctcttagaatttgtgccccttagtgttgaatcattgcttactcataataaagaaatacttagcataatgtggaagattgtgtagtcttccacatctagaaagagaatccaaattcagttcttgatcacactttgtgacagaaaggatcaagggtgagagaagtgaatggaaggagtcaataatttctgtcgcaacccaatgtaagatttgttaatctcttatgtatttacttttactgttttaggaatccatattaggacgttatattagtttaatctaacatacttgaatagaaaataagatcttggttatacaagctttccaaaaacaggcctcagagccatggtatcatttattattcatcaaatatgaattgaaaacaattttttatgtgttttatgtaagatttggatgtttcatgttagtgatatatgccttgatgaaagcaaggtgacggttattacaattatgaaagtgagaaagcgatcatggccgctatgaaagaaaagtcatgactattaactggaaccattgttaggttctctgcttgcgagttaattccatagatgacggtagtgacgtgaatactaggggtggtatttgggttgctacatgatgaacataagccagatgaaggaacgggaagacctagtatgtagaagatcataatatgattgatttggaagattgggacaggcgggaaaagtaatgactatacagtggaacagttgttaggtccctacttgcccattatcaacacagacaatgacactaacatgaataccaggggtggtattttggttgatccacgtatgataactaggaaaagtaatgactataaattggaatcgttgttaggttttgtacttgccggttatctccatagataacgatagtgatatgcatactcgggatggtatttgatttatcctgtgagacaaccgtgaaaagtcataactctaaactgaaactattattaagtttcttacttgttggctatcctgatttggtagcagcagtgacattattatcgacgagcggtatttgggttggctaatttgacaacaatagtaacatttggataccagggattggtatttatgtttcctagctcagtaataattttgatatttagatatcaattttgagtatcatggttgttttattaaacaacgataaagacatcggtatgctagtttaggaattagatttgttttgttaagaaaatagtgtgactggttacgttatgaagtaatagttactttatgaacatacaatcatccattaagcacataaactaacatgaacacattcaaatcatcacaatcatcattttaaatccatatttcatgaaagtaaatcattactatggctctaaggctagtttttggaacttattttactaggatctagatttactaaatgtatgttgattattataatctaataccctaaatatgaattttctaacacgataaaataaatacatataaagtttagaaaccttacattcatggcagtggaataatatgactccttctattcaaatctctagcccttgttccttttatctgaacttggatcttctctcctatagtttggttaaccaccatctttcccacagtgattgagtacttgacttgctatgagtgggtatcgcactctatcaataaatgttcaaatttgatgaagaacaaagaataaaacctaactttttgataggtttgatgagaatgagagcatcatgttccctttaatagtatttcaattaggatttatgattttaattatatggattaaaaaagataaaataatagacaagtaattactttagtggctggccacttaatgagtctcactagttacagtttttctactttatttcaactattcatcttttctttcaataatgcgatattttgaaacttcaatcatataaatgtcaaaactatttatttaataattataattaattattaaataaaattgccatttattttatttattaattagacttaataaagtctcttaattaataa

SEQ ID NO: 382332 - DNA, 3070 bp, Cannabis indica
atatatatatatataaaattactttctagaaccatttgatttttattaaaacaaataagcaaaataaaaatattaaattatgccccctttttttaatatttatttgattggttttttgaaactctaagttgcaataattcaccaaaaaataaaaatcttgggcttacatgttcacatttttttaatggaaatatataaatatttgggcctctttgggttagaggcctggggtagtgacccttgcttccccaccctttaggtgacactgtataaataaaatgtatgaactactcctcttattgccaattagtttttgttaactcaaatattccttaacaataaataaaacattttaaataaagaataaatatttataattaataaatatatgtagaacacaaagagttttacgtggttttgtagttaaatctttatactacacgagtcattcttatttttgaatatttcttgggaaagtatattaattacaaaggaataaatatgaatatttactcaatctcacagagtctctacttccaaaaatgattgatcctttttctttagattccctttttataggaattttttatgaaagttattcattttgaccgtatctagataactgttcgtgaaacgtgaacaatcttcacgtttcacttttacaacatgtacaataaaataattgttggtaaccgtcttttagtcttatcttgaagcggtttgcttttacatgacacattcttgttgtggctcgcattacttgacagtgtttaaatgatagtttgttgtattctgcgagacgattgttaaactatttttttaccactatagcctttcaagggaaacttttagacttagtcctttgaaaaaagttatattatggttatttccctaagtctttcaacttacttacaagtatgcatgttaataagctgcaagctcttaaagaactaattatctaccttttccagcgatgtaacttcagtctgttagacctgagaagacttctattgctatcatctcactatctgttgctcaattcatagttttattgccaacgcataatgcgagattgatattgcttgttattttagtatctctccaagacaattaatttattactgtaccataatttctgtgtttaaacttccacatatcatgtctatatgtatggttcgaaatatcggcataataattaacccctaaaaatctcttttgggaataaaaaaggtttcattatagaagctataaacagaatttttggtcttttctctttcaaccatgagtactctctttgacggtttcattttatcaagaaaattaaattgtgtatcttttcaactgatgagctttttaactatccttttgctttaccagtttgtccaaacgtaaatctgatcaatggttttccttttcaaatataacaaggattttttaccattgccttcttcttcatctcattcgatatacaaatcaaagagctaaaaaccgtttttttttactcccgaagttcttgcatgcccagattgtcgttgaactttttctttcgtgtgatcaatatcatttttttccaacctcgttcaagttatatttttggatcttggtattggagattcctagttagaaaccttcaatgcttccagaaaaacccaaaaaccagtgagtttctacactttgccctaaattatcttcttgtcatatatttgttttattattggttttttgatacactctttatattatttttttcttagaatatataaagtggttcttgctttggcgattccctttccttaattatcttctccaaaattcttgaacttataggatattttctttatcctacaaagaatgtttatccctggtttgaaacttttgagttcagattttttagaacaggaaaacccaaaacttcatgccttacctttcaaaccgggactagaacattcaaaaataaaattagaaataaatgacgagagaaaggttattcaatgagaagattgatcgagaagaagcctttgcttgatttagacgttttatagatgaggttattgatgggaaatatcattttttgcgagacgtggcttggcccgagtatcctagtttaacaaagccattatttttacccgagtatcctagaatattaattatgatttatcattttatggagatttatttgaattcagggtgtattatttatgtcatatatgaaattttgcatttttgcatgttttgtgcccggtaacatttaagcgcgacgtttggccaatagaatcacatcttagtattttagtagtagcgagaccctggagtgcacccaggagtcttaagggactcaagttgttgagtgaacccaggagtcttgagggactcaggttattggtagagcccctactcctcctacctctatttatggtaggggtggtaatgactccaccaccgattagaaacgaaacgcaccatttgcacccggtggcttaggtcagactaagaggttctgagggaaccagggttgaggcgaccatcaaggtggttctaaaaaccgaatgcacttactcggaatgtcctaattgtaataagcatgatttgggtgagtgtagagggcgaggatgtttccagtgtgggttgccaggacactataaaagagatttcccgcagcttaagaaagaggaacaaaagacaactacaaaacccactccagcaagagtgtttgctttaactcaggctgatacagaaactagtccctcagttattacaggtcatccctcgggtaacaactcttacctctctatattgttagactctggggccactcactcttatgtggcagcaggatttttaataaattggatggaacgcatgatagttttgataaagggtttggaaccctactgcccagtggagaattagttatctccaaaaggtgggttaggtccatgccgatcagaattgaggatgggttgctgagtgctaacttgatagaattgggtttaacatattttaatattatacttggaatggatttcttatccaagtacttggctagtattgactgtaaacgaaaaatggt

SEQ ID NO: 382333 - DNA, 2020 bp, Cannabis indica
catcagataataaactaactcccatatatcattttctcatggagtcaatctcatcatccatagattttatccattttgaaaattgtggactattaagatttcactataagtaacatgatccacatatgactaataccacattctccttttccaaggcacacaatttttttaccaaattataatcacacttctgctccctttttgccaccaatcatgaacacaacaactaccaacaacattaccaccaacactactgaacccaacgctccatctccaccattttccaccccacaagcagtaccactggagtagcgtttcctcatcacattactcaaaccaaaacgcctaccacctctaaaccagcagtaacctcgtgcactagtccccccattgctgatctctcacacatttacatgcttgatcttggaccgcacaacacatttgctacctaccctccactcacaaattcactccttacaaacccacctctctttgcaactctcaccagcagtcatccgggcccctgctgcattaccactccagcaatagtgattgtggataacgaaatcaatcacctaactcaactgttaagaggtcaaatgatactttctccatgagaaaaatgcttaaaagatgttgtggtatccaaggaacattatcttctttattgtcaagggaagaaagttctgagatactagtttctgatgttgcaaactctggtttctctaatgactcaagtgcggaggttgctataaaaccccacaaatcaatgtgaaaattcttagttggaatacacgagtcgagtgcattcaaacacctttgattgcttgttcaacaaaaatcaccccacattttgttttttatgaaaacaaactcagtgtaattcaattaatagtgtctgacaatctttgtatttgaacaacgggatagaagctcctagagtgagccttagtggtggtcttatgctcttgtggaaagatgaagtggatgtcactttactaaattacgtacgaccccaatttttttgattgctatatgtagaccgatgggggaccaaactttcattttaccggcttctacagggcacctaaaaccaacaacaaatcagcctcttggatcctttttcaatattttgcaaatgttgctccactccatccatggctagccattggagactttaataaaattctttccaatagtaacaaatcagtggtactcttcggaatgaatcacaaatggatgcctttagagttgtcttagataaatgttgtttacatgaagccccctatgatggtgatccttttacttggattaaaagtcacacaattgtggatataattaaaaaacgcttggattggtattttatcaacaactattgggagactttttttaacacacctcaagtgcgacatttggacttttaccaatctgaccaccgagccattactgccacttttgtaccactctcatcacctaacactaaggagaaatggaagagcgggttttgttttgagaagttgtggttgtctgatcctgaaagcaaggagattatttccaataattagattacttcaacttcaactgacctgatttctgcagtcctttgcaacctaaaatcttgtgccgaatctcttcaagattggcatattagaaaatatggcaaaatgaagaaaaacatcaatgactgtcaagctaaagttgctaatttaaataacacaatagcttgcacaagcagccatctggatgacctgcaacaagctgaagatatcctagaagacttattagagcagaagaaatctactggcaacaacatttacgggttgattggctggcctgtggtgaccgagataccaaaattttccatgcaaaagccactgctcgcaagtccaacaataaagtcaaattcctttataatgatgcgggtcaaaaaatgcattctaaggctgaaatctcttttgttatacataactattttgctgatatatttaatgttagaaataatagagagattacaatggaa

SEQ ID NO: 382334 - DNA, 4705 bp, Cannabis indica
aatcatccaattctgagttgtatcgaaggtattatgaccaaaataataatcaagtgacagaaatttttcggcagcaagtcgtggccgcaaggaggaggtgatttttgggcaaaatttcaaatttttatcttttttaagtgagatatttttgaagattataaatagaacttttaaggtacgaaattttagtcttgggattgtggtgatgagttggtcaaagtgaggttctatactcaagggcggtgccggtgacgggctgcctatgaacctcatatggcagagacattagctttgttgtaaggatgattctttgttgtgtgcatgtcgatattatctaattgtccccgttttatgcaagctactttgagtaaagaaatttgttctactgaatttggcgctattattaataatattagaattgttcggtaatctttctctagtattttcctttctcattgtaagctttctctagtattttcctttctccttgtaagcggacttttaattcttattgctcttttatttggtgcagagccttcccttggcaattagttttaaatttatattgatcttttgatcgactttgtgccttttaaatggaaatgttcatttgtttcaaaaggaaaaaaaaaaaggcaaagatgagcttaaattggtgtcacgactcactaacacagttaaccccattctctggactgaacttgctaaatttcttgtgccaaaatctaaattgccaaatttgttggatacgtaacagaggatttgtttccaccttatgatacaattacaaggtgcaaatctagacaagaattatcatgtaattagagaatattaattaaagtaacggtggaaacagaacagaagatttctctccactttatgctaatacaaggtaaattttagacaagaactttcatggacttaagagaatattgaagttaaaaaaaaaaagtgtatactaacataaaaaggatgaatcttttatatattctgagaacaccatgaattatttagcatctacaggataaaatggcaatttctattttgtggtaacaaaatctgaacagatacattaattaatgacagtaaaaagaaaaaggtaaaaaagaatccatcaacaccaaacacaaggcacagcattgagacactgattgctgcatgatcagccctttttttaagcctgaaacaagacaaatatggtaatcaacacattatagccagaaaaactcaaaaacaagaactggctcaagtattattaacatcagatcctaccttgttagcaatattgttggacagccaatccagaccctcgtagagtccttccccagatgtggcacatgtgctctggatgtacctagagaataatatgtgaaagttgtcagatccaatctagagaccataaaaattaaggatgggtgagacatcaagagagacttgaaaaatatatatataccagtgacgttggcgaagagagtgaagaccgagtttgtctgtgatctcggctgcattcatggcattcgggagatcctgcttgttagcaaatacaagcagaacggcatccctcaattcatcctgcatattcagataagtaatgtaaatatgagaaacaattccaagggctattagatttttaatttattaaaaaaaatgctagagagatataacataattccacttttgaagttctttatgacaaaaatgtacctcattcaacatacgatgcaactcatccctagcctcaacaacacggtcacgatcattgctgtcaaccacgaagatgaggccttgagtattctggaagtagtgtctccacagaggtcgaatctggatcccaaaagtttaacgagtgagaaattaattagcatgtgtacttgtaacagtatgaatatttagcatgtagtcttcattgactagaaaaaagaaatataaatatgaaacgcaagtccttcccattaaatctaagtcaacagtgattatgatagtttagaatggcaacatgaacccaatacaagatcatacaaacaaactcttccaacaggaaagtaagctagaacaagtacatacataaacataagattatacatgtctgcaactgcatgtatattatctccaaatatagaaaaaggaaataaatttaatacatgatggcaacaacaatgtagcttatgattatgttatgtgctgatggatgaatgactaatcagcacgagaccgtcaataagcacaaaaataatacatcatcattatctgcagcagtgtggtaaatcaaaatgtctgccaccccattaatgatttctcatacaagaaaagaaatctctaaaacacaaggaggctaaaataatgttgcttatgattagtgcgccaatggagaacatctaattggcacaggaccatcaataagcacattaacagcttaaaatccagagcatatgcacaggtatgtgaaattatgccacatcgttgatagcctttcctcgtattatgaaggaaaaactgaaagacaaggtagctaaaaatatagcttatgattatgttatgtgctgaagtggagaattcgaaacagcacaagaccgtcaataagcacatgtaccagaatgcacacctacacacgttatcatattcgtttataactagtgtgccaaaggaaaacatctaatttgcacaggaccatcaataagcaccttaacaaaacttaaatgctgagtatatgaaatttaagccacatcgtggatagcatttccctatattatgaaggaaagcctgaaagacaaggtagctaaaatatagcttatgattatgttatgtgcagaagtagagaattcgaatcagcacaagaccgtcaataagcacataatttatcttggtgaaaagaatttatcaaacaaacatcaaaaaaaaagataaccatatatatctgttagtatatatctacacattttcacatatatggagttgaaagaagaaaaaaaaattatggtaatgaaacaaaccttgtcctgccccgacatcccaaacggtaaagctaatgttcttatattcaacagtctccacattgaatcctgggtaacaagaaggttgtcatgtttagtctccacaatacaaataaaaaacaccaaagaaataatgatggatataagtacactgtggctactctaattataaaattaaaataagcataatgaccaaatataaattaagaaaagtgaaatggcataccaattgtaggaatggtcgtgacaatctctcccaacttgagcttgtacaagatggtagtcttaccagcggcatcgagaccaaccattagaattctcatctcctttttggcaaaaagccgactgaagagcttggtgaaagacaaccccatctcttaaactcggctgtaaccaatacacaagcattagaaactcaaacaagtaaacaacacgttaacagctagcagatctatatgcatttgaaaatccaaaatcctaattatcatatgattcatatcaccaaataaaagtgtaaagtatcagatctattcatcgaacacagtagagaacaaaccattattcaaaacctaaaaacagatataatatttcacatgcttgatttctttctcattacatatttcgtaacaaatcattctattcatctcaaattacaaactcatttccaacagatctaaaaacccagacccagatctagtttgcaatgacatgaaaaacgcaacactcaaacaaagagattcaactaaaccaagatccattccactctaaaatcataccgatctacttacatgataggaatccattacatatatacatataaaaaaatatacaaaaaaagagagggagagagagaagttacatggttcaagcgaagaagacgattaggagagaagaagatgatgagaaaaggggcagatctgagaagctgcccaggagagaaatgaggcacaaattaaacagagattacacactcacatatttatatagacataaaataacggccatttgacgacgttggtgacgtggaagaagggtgagtatcagacgttatctaccgttagggtttgaatgggtttgagtttgagttagcgatccaaggagtagtttctatgagcgggaaggcatatggaaacaacgctggactacaacttcatttttttttatttactagtaattaataattagatttgtctgtaattttttttaaagagatttgtgtgtaattaaaattaattatacagtttgatatatttatctcactaattgtataattaaaagtaattgaataatttcaatttatatatctatataattctcttgctaagcaagatgacatggcatcctaattattttcatatgattgtgtgtaattttttattttaaaaactttctattttaaatattaattactaaaaaattattttctaattactaataattatgccaaataaaatatataaatttatatgtaattaccacaccatattcaaacacatcttttatttttaaattatagtgtaattaataatctatgtaattaccagtttaataattacactacctagtgattgagtgtaattacattataattactaaaaaatattccaatttaaacattaaatatttaaaaaaaaaatgattctttcgtgtaattattaattattttgttaaacaagatattaaaaaattatatgtaattaccatctcatattcaa

SEQ ID NO: 382335 - DNA, 814 bp, Cannabis indica
aaatttctctatttaaggatatgggtacttcgtgggttttacaatatctttaatagcttcctaatatgttttaagttttttttgctcaaaatggaaaaccttgatcttaacctttcccataatctagcacttactgacgaggaaaatttagtccatgactttgataatgttttcctgggttctgggttttcttctgattcttttttgttggttgtaaaagtcatatcctctaaaattcttaagtcaatttggattgagaaagttatgcaggaggcttattagacccttcgcttccttgtgtgtttttttgagtatcattcaaggatttttttttttgggttattttggttgtgaggggaataggcgtagagttctagaagatcagccctggaattttgatcagtgtctcatgttgtttactaatcctgaggggttagataaccttagttctgatcaacttaggtatgtccctatctgggtgcaagttcactctataccttttggcaataaatctcccaagcttgctcattttgtggctgaggagattggagaccttatagaaatctttactctttcctcgtatgagtcttttggcccttttcatagaattaaagttatgtttgatgtcactaaacctctttacagaggtatggatgtggattttagaaaaatttctagtaccaagtagttgggcttcaagtatgagggtcttcaaaagttttgctatttctgtggtatggatgatcatactgttgaattttgtgccctaaataaaacatatttcaatataattagatttactaattaataaaag

SEQ ID NO: 382336 - DNA, 1391 bp, Cannabis indica
tttctttttaaactaacatcattctacagtaaaaatataaaggattttacgagttccattataaagcaagactcacacaaagaaaagtaaacctcaatacacaaagtactaattttatttaacaaagtatatatgattgactaaaagataaattatctcatgagcttcatgatatacaaaagaaatcccagcaatattctgatttaacaataagttttaaatatgctccaatactccatctatatctctacaaccatcctctttattctagattaattgaataacttcaagattaattggaggcggtcgaggaggtcaaaatcccccacatccctgtggacgcaacaaaggttgtggaagatattaaaaaggtggttatgagaatccaccacaggctccttaggattgagagtaaaagtttgtagaaatgcaatcccaaattgatcaataggatgaggaggtctagagattgagacaacaaggtcctcctgctacgcctcctcaactggtgccagccgctctgggtccagtggttctagtaaaacaatttgttgctgataactgcatagagcctctgtatgaatggtttcgcaaacaaatgccttcaacctttttgagaggttcaaatgtcatgaaggtcgagcagcgacacatagtgattgaaagaatcccaaattttacgagtaaaattggtaatgatagcgtgacttatcccacattacagttcaaggaggatgccctcgtgtggtggaaaatggtgtccttcactcgggacatcactacaatgacttgggaagagttctaggagttgtttaattctaagtactataatgaggtggttcgtagtactaagagaaaataattcactgacctggtttagggagagaacatgtcaataacaaagtatgctacaaaatttgaccgacttgctaagttgtctttgggtatagtacctacggatttcagtaagaagaaaaaatatttggcggttttgaatgcctagagtagacatgatttggtcattactaaaaataacacaacaacttttgctgagttggttgagaaggctcttcgagttgaaggtgcaattaaatttttgcaagagctctgatggactccaagtgttggtgggactaccactttttctgtaacgcccccgcttcaagcctccattgggtccttacacccacggaatgaatggctcttatacacgagtaagtcactctggctgcttcatggactgacgactgaccctacagaccaacacgagtgtttccagcatgctttgtcctcactcgcacgcttcctgggaaaacttcccaggaggtcacccatccttaaattaccccaagctaagcacgcttaactgtggagttctttcgagatgggct

SEQ ID NO: 382337 - DNA, 1602 bp, Cannabis indica
tttttttatttttataatttaataaacaaaaagctgattaaaaaaaatattagaacaaataattctttgatattatttttttacgaaagaacattcattaatatatttttggatgtaatattcattgatatttgacccttaatcaaatggaaatttacttgcatcaaaagtgaaagtgttattaaagatgggatcagatcatagaaaataattttatgcttttttaatataaaaaggggaaaattaaggtaaataattctaaaatgttaactttgatgcacataaatctctaggctcaaaaaagaacgataatagtacctaaactcgagattcttgtaagtttgttagtcctcattttaacatattcgttagttgttccgaaaataccacgtgttgatattaaaatacagtataaatcttcaaaaagtttactttaatgcaaataaatatccaatctaaaaaaatagtggtaatagccacaagctcaaaattatagttagctcataagtatcaaatttaactgctctatttgttactcccaaaaaatccacgtgttgatatttcaacaaattatgatggggaataaattgatttgaaaggggggtttgtctaacgtcatgtttgattacttttatttcaaaaacaaattcgttggaaacaattaaaaataaaaggtaaaaatagaagttgagatctttcctttccttcaaaattatcaaaaaacatccaatttccaaatatattcatatatttagaaaattatactcaaaataccatcaataggcatgacaaggaattaaagaaaagttagaaattaatattgaagaatgatctttttccgtggcatcgcttgttatgtcgctctatagtgtaaatgctagattatgagttttgcgacaaacatcacatgtgtaatgcttcaacggtactaaaaaaaatagatttctccacagtttaaaactgtcacgtgttgtatagtcgtcgatttttatgactaacgcctatttgaccaatgcaatactggataaaataaacttcgatggaaatagtcagcaactagatatatggacacttcaaaagtgttggcaatggaggatgacttgccgacggttttaaactgtgacctatcactattgcttacgattttgtaccattgactatagtgttattactgatgaaaaggttagagttggtaaaaataggaaggaaacgatttgtttcttctttattgaatctcaatgtgatctccaggcataacttatgcaagcggtgtgagatgtgaagatcatgaggagtatcaaaatgtggtgctttaagactttttcatggtacaccatttgtataactgcaatcaaattattcaagaaaagttctaaatagtatctaaaaatctctcaaatcacacaaacagttaaaaaaaaaaaattagtagcaacctcagatccaaacattattcacaaaagagcataatattgtaattatcaacatatatatctattctatataaagtgtgtctataaaccgaattcttggtttatgagaaattcgtgtgagactttttatttatattaaaaataaaatgatttattattaaaaataaaa

SEQ ID NO: 382338 - DNA, 4534 bp, Cannabis indica
ctttctattctagtgattcattcattaggtcccctatactaaataagaggtcccaaaacttttaagactagtcaatttaatttcttagatgatgaaataacaataaaacataaagaatagagatataaaatacaaatcatgctatcaaactatgcaactcatttaatatttctcaattagttaaaaaaaaaaaaaaaaacataccatttgtgttttctttttagtatcaaccaacaacaacaaccttcccattaatgtgtaccaaaaccaacaaatctaacaagattttattagttttgtattttgatgaaatcaatgtaacaaacaaatactcaaatagaggagaggatgagaggaaggagaattaaagaattagcccttttaagaaatagtaatttctttggatcaaaatttggtatccaacagtaaatttataatattttaaataaaattgataaaaagggtcaaaggtattatagaagaggggacagttgtgagaattgactcaaaatctttaaaagaggcaaacccaactgtcatcttttggtaaaaaaaaatgtagaatgtctgattcttctgacaaaattctgatacccctaatctcctacttctctctcttagacaatctaacaaagaccactctttgaccaaatcttagccctccattttctgatctctctctccctttttaagctaaagcactttaaatctacttattcttctttcatatttaggtagaagcatccccttgttttggataatggggacacacacctaaatacccaatttttttttgttttttctaaaatcccaaaaaaataaaaaacaaatctcactttctttcttataataacacatcactaatactataatacattatttttatataatttatattcatcaaaataaattatgagaaattgagagctttgttcttctccaggaagaggtccagctcatcccggttagatcggatctattgttcagccacttttcttttcttcctttaatttcatctgacgccactagtttttccctttctatcatcccaagttttttttttcctttttatttttattttaattatatatataaataaataaaataaaataaaaataattaaaaagacccatgttttattcatcatcaaaatccattgtctgaccaagaaaaaaacaaaccgaaacgaacaaaaacagaaaaaccaaaaaaataaaaaaacaaaaaaattctttgttctattactacacacctctcttttaagattttcttttgtatatgcctgagattgaggttgaggttgagtcagagccatttttggttgttgggtaagttcttatagctaaaaagaaagtatttttattaacaatggggaacgtgacggccggtgtggctgcgaaattcgccttctttccgccggacccggcgacgtacgatgttttccgggaagaggatggaagattggtgttttccggtgtgacggcggataagaatgtggacgttcatttggttgagacgaaaggcgggaataagattgttgctactttctggaaacacccatttgcaaggtttactcttctttactcccatggcaacgctgctgacttgggtcagatgcatgagcttttcatcgagctcagggctcaccttcgtgtcaacattatgaggtttttttcttcttcttcatttttcaaggtttttgttctgaaaaatggtttgatttctgggaatttctttttgggggcttagaagggatttggtttaattgccatgtttagagattttgatttttgcgattattattattataataatttatcatatttttttctcttttcaataattggaaatgggtttgtttattacatgtttttaagtattattatgagtattaattagttttgatgataataatacttaaatggtttaatgctttataacgtaattacaacattgttttgtattcaatatatcattctgattcaactttgaatttaaatcaataaaataagaatgtttgatattattagctgtctttaacaaggactgcttgtaaggaagatatattaatgaatattgtctactcctattaaatgtaaatggtccattgttttgattttttatccataccaactctctctgtatatttttaccatatggtaaagataattggtggttttggcctttttttttattgactgaagattggattagacctcatactattgagatgtttagatggttacacagtcattccttttcttttaaaggaggctaattttacactttttgaaagtgtcatacattattactctcctaatagttattacagtttttatctaataatataatgataaggaaccttttttctcttcttcttttgttcctttatgactcacttcatatcttttttatgttgtagttatgattattcaggatatggagcatccactggcaaggtaagagatgaagcttcatattggtatttttcttttgctttttaaaatgtagttttgattatgaacaatgaaagctttatggaaagttaaagtgggggtgtttcacttgggatttggcagtaataattttgtttttcctgctccttattgatctatttctgtttttgataattggttaaaattttctctttttgcaatagccgtccgagttcaatacttactatgacatagaagctgtgtataactgtttgaagaatgaatatggtgttaggcaagaggatttgattttgtatggtcaatctgttggaagcggaccgaccctgcacttggcttctcggttacagaagttgagaggggtagttcttcatagcgcaatcctttcgggtattcgagtcttgtatcctgttaaaatgacattctggtttgacattttcaaagtaagttataagtaagatggcttttaattctcctataacttcactctttcctttatttttaaaaacttggttttgtattgattgaaatgtcctctttgtatttccagaatatagacaaaataccaaaagtcaactgcccagttttagttattcatgtaagtaattttctcttcaattcacatgctggcacttttcttttaattagttcttcatggcctattttgatgtagctcaaagcacatttatgaaaaactgaaaaccaatctttatgtttttctttttgagttttgattctaaaattttactgggattttcaatcatattaataatgtacttagtaaagaaagaatttgacctggttgtgtgttaatgcaagtgttagatatgagaacatgggggtttgtgctttgctaggctcttctatggacccatgcatttgtggtcctttgtatttttgaaaagaacaactctaagaacacatgtgcagacaatgaatgctgaactggttttgtgtccatacttggagaaagaaaaacgcttcttctctcttctcatttgtcgagtctatttccttcgtttcaggaaatgtgtcaattgactttctgattatcttccacactatgatttttcaatacttctctttgtgatgtatacttggcatggaccataatatgcaggggacgaatgatgacattgtcgattggtcccacggaaagcgtttatgggaactgtctaaggaaaaatatgaccccttgtgggttaagggtggtggtcactgcaaccttgaaacttatccagagtacattaagcacttgcgcaagttcataaacgcaatggagaagcacaacttgacaaagcaaacaaagaaacaactcactactaacacaagtatcacagaagtcaaacataacaagtgcttaagatttgggaaaagatagccgtctctgattgattgattgattgattgattgtttttttctttcgttgttcttctcctcgtctcgtctttagggaattagacgaccgaaatggagctcttcagccataactattgcttgccatatcatgataatgtaatcttaagtgtttggcagccaagctagttaggtggcttggtaatattttctgaagatcaagaattaataaggaccatatatgtgggagcttgtttgatctggatctgattctgaagaccattttttaaggtaggaatttaatgcagttaccagtacaatgcacatggcagtagtgtgttcctactattcttccttcctcatctgggtttcatgtataattattgctcagccttgtgtaaaacttttcagcttaatttagaaaaaattaacaaaaaaaaaaaaaaaagttatgttgggttgcctttcttttcatttttataaatttgcttctttttttttattattttatctcaattataatattctttttttcttataatacacgagtgactgactaatatttatagcattggaagaaaaatgtgtacttttgcaaacatttttggaaaataaaaaatgatatttagaataaatcgtgagcggcaggattcgaacctgcgcgggcaaagcccacatgatttctagtcatgcccgataaccactccggcacgctcacaatttg

SEQ ID NO: 382339 - DNA, 1149 bp, Cannabis indica
cgaaggtctccaaaagtcggaacaacaaaagaaattacctagaaagtatagttttgtgacatcaacacaaaatttgcaaaacacaaaacactttagttaataaagcatgttgggtcgatattgatcaaagtctatggataccattgaatttttttctctctacttttccaaacattagacttggtgtactccttttacatctattcgatcaaacaacagaactactacaatttattaattccatatatttgtaaatagtagagctggccatatatatatatattatattatatattaggtactaatggtatgagaatatataattgtgaagacacatagatgtattaattaatatataattatcaaagagtttgctttatggatttatcattgagtcattgacttcattatcaagtcttctaaactcaaacctatttctaccccccacaccacacaccctcattttattcatgattccaaaatcccttaattttatatacatattttatcagctccctatataattaactagctagccacacactacatacataatcatagttcaaagcatagataattaagattaagaaaacaaaatatgattcttaagaagatcataatcaagtcgctcttgccttcatgtatgaagcctcagaaagttacagtcccaacagagaccagatttccagcttcttcaaaagatacaagttctcagagattgtcactttccgatttaagtaactcatctatggtatctctcatgagtgatctatcgagtacactttttgggtcaaatattcatatttttacacataaagagctcaagaacatcacatacaacttctctaagactaactttcttggtgaaggtggttttggacaagtgtataaagggttcattgatgataaggtcaggcctggtttgaaagctcaatctgtagcggttaaagttctcgatttggatggcaaacaaggccatcgggagtggctggtaattactaattagtaataaaatcatgcaccaaaatattcaattcaattgtttattttatgtgattcaaaattgcttatatatatagatgttttgtttttgttttggggcaggcggaagtaatttttcttgggcaattaaagcaccctcatcttgta

SEQ ID NO: 382340 - DNA, 6043 bp, Cannabis indica
tttattttttattttttgttatcagttttgtttgttgttctattttgttacactgaataattcgaccaaggtgaaaattgttagttgtgatctatgtagtcagagaggcattagttagttaattcgtttattcccaattgtttggacaaactataaataattgtaaactcacttccaagtgagtaacttgtatccatattcatcaaattagactaataaaacatattctttcctctcaactaaaatttttcttctaattctggttcgaggaactgttagcagttcaaagtataatcatgcatgagtgaatgcatctgttagaaatcgattgttttcccaacagtatattacttcttggcttatatatttgttattatgtttcaaataagcacgtgcaaaagtctggccctaataatgaggccaaaacaaaaattatctttaagctaacgttaacaccaacacgttccaaatttcaatctaaattataatgctataattaggttcattaagtttctttacatggcaactgaagggagataaacttacgaacttaaaagtaggcctaatttgggtagcaaaacacgtacacagacagtattatcatgtacatggtatggtgaattgtgttaggagataataagacaattcaaccacgctaaagatgaatagcacataataagttacacaaatgaagacaagcaaagtatcaaatcaatttttcttacaaactacaggaaaactttttttaatcatctacagcaatcagatagcattgtgaagaaatctcccttttccttttctgggtattggatctgtaacatggaaatctattttttttctttctgacttttctcatcttcataataataacattcttcttcatcataatattcctcatctgtctcatcatcatcatagtagtattcatcgctgttctcaacatcatcatttccattttccagcagatttgttgcgtctttttgaccccgtaaactctcttgaatgcgttctctgatggctgtgccctgaaatgaaaaggaaaacaataatgaaaaaaataaaagacagacatgataaatatcaatcttgtaagtaaaatggtttaccattttatggcacccctcttcaaacatctccaaaaacccagcaacccatcgatcagcattttccacccactcgttgcgatgcataccagcagtttttgcaacagtttgaatctaaaacaaacaatcagcaaacataaaacagaactacagtcatcaaagatgttatgcgtggtttcatggctgactcaacagtatgaacaaaatgtaattacaagaagacagctcttttctttagcaaaacttaaaactgagatctgacatgaacagagaaaagagaatcactaaaaagatactaaaattgacagaatgcaatgacatacaattttgtatatatatttgcctgactttaaggtgacccaaccctatattcacttttgaaaaaactcggatcctaaaattacaaaatgttacttcataagtactagacaaatagcatcagtcataaccacttgggagatcttataaaattctgtaaagtaacattgtcctaataaaaataagtaaatcaacatgttcacttagagaatttgtatgtatacgtccacatgctgggacacaagtatttaaaaatggtaaaacattaatgttttttagagagatagttttgtctgtgactgtgactttaacttctatataaataccaaataagctacagaaatagtattattctcaaaagaaacaaatacaagtaaatagatgaatagaatattaccaattggaattgaaaacattttatatgacacaggtagatcaatcttatcatgcatttatctggtattaagaatctatattagcaaagtatttttagaaaaaagaataagcaaaaagaaacattcttcacttctagacttattttcagtgtagctgagttgctggctaatgtctaaatcaactaagcaaaaggaaatgtgtccacctaaaagcaccagacttgtaacataacaacataactgtgccccaggtgatccctcctactggaaataaaaacaaattgtgtacctatcttcttgcactgagtatgggctgaggttatttaatagggatgatgtacagtgcaattattaactgaattccacatttcttcttgcattaagtatgggctgatgttaataaatagggatgatgtacagtgcaatgattaactgaattccacatttcaaggtcattaattacagaacggtatgaaaatagttgaatacaacatacatttacttgtagaaaggtcatatggccctagggtatatctagcattatacaatttagtagtgcatctacccatgtattacaccacagaacccccaaagtccctccttcctcctgcaatcccaatttctcaaaaaacataagatgatcttaaatgcaaaatccataaaagaagcccctgattatttttgcaaagtgttttgattttgaaatactttaagccaagttgtaacagcacatagataaaagaatggctaggccaaaatcacatgtttttggaacacgaaatatgttagttatattatccttcctacttgtacaaattcaaccatcaatgttgactgtattttggttggtcttagtacattagaaaacttttgaggcaacacagatttactgaatatgatcacaggtaaaacagaaacacaagtccacataaaattacataataatgaacaaattaaccaactcaatattcaaaccatacttataaagtataagataaaacagtttccaagttagacgtgatatggtgctaatttgactttcacatcatagctaaccctattggtatatcttgactttaaaactcttcatgcattattttccaaaaaataaaaaattaaactcaagaatcaaattcaatgcggaacaaatgtacccaatttgatttgacttagcatggtatggaatacaagcatattctgcctagaaatctacaggtacagatacattctggaaaatttaacaaagattaggtttatcaaatgaccatatcaaaatcaagctccagcatttcactttcgtgagccatcataagtagaggcactctagtcttggcataaatattactaataaacaagctcactaaataacaaataccagagatatagtttggccaacaattggatggataaacttcaacaatgtccacagaagtttaaagtacatctcacaggcatttacaaaagagaaatgtcaagattcaccacaatggaatacttcatgaatttaattatattatcaacaatatgtctctgtaaaaaagcttgtaacttttacgatccaaacaaacaaaaaactaatataatctaacactgggattcaacaataaagtaaacgggtcctttctcactctgttattgcataaactacttagagcatcataatcacgtagcctaaaaacctgacataccttttctcctactttctcttgttgttccttcactttctcttgtaatttcttcaatctcatgttcactcttaatcgcttttcctgtttgtgttgaagaaaaataaaaacaagttctttcacatgggaaagtaagcccattttacaaacaaccaaagaaaacaacattcagctgtcagaaaatgaatgtaaaagacacaatgagagcttaccttcacatagctaacaccaagctctttccttgtatatccacgatctaagttacgcatcacatactggttataatctttcactatcctcataataatatctgatgtagagatcccatctgttcgttgtgtttccttaaacctcccaacagatttaacctacaataatttcttttgtaagtaattatggttaaataataaaataaaaacaaataataagaacaagaactgtccaaaacctacgaattcataaacatcatttgcagctccactagcatcagcataactgtagaagattcatcaaaaaggaaaaaaaatattacatagcattccagaacgcttaactcacttgatagcagcaaataatgaaaaatatggaatgacagtacatctgcagtgcttttgtatgtataggattctgagaaacaccaagacaaaaaataaagagcattctttcatcatctccgaattattttcacaaaaaacatatcacggattgtgggactcaagtgtgagagtttgagttgattatccttacggaagtgagtcatgagccacatagtcaatcttgttcttgtcaagaaattcttgattaatcacccaaggtgcatcgggaatgacttcatctacccacctgcataacattatcaacaagagtcacctgtcatttacatccatatgaaaagacacattccctgatacacaattcgcatcttctgaacaacaagacactaaaccaacactcctccagtacaaaatggtttagtgtattagccataacataattagttgaacagataggacattttttatacaaaacttaaataaaagtaacaaaatcactaacaataacaagtaattataacaaatcatcttacttgcaatgacgaagagattcataacgttcagcttcagtcataacagtttttcccttatacttatgtgttgtttcatcgttgcagcatccaacaagcaggtaggtgtttggaaacctgaatttacaattgaatcataaaggaagggtgcaagtgagtaggatttccaggaaacatcacacacacaccatatatgtaaatacatatagctaaatatgccaaattagctctatatgaatattttattacaacttaatcgtagaatcaaataaaaaccactacaggattaagattaaacattatagaactataagaagaagaaaaaaaacagctttatacataaaggaaagtaacaatgatgataataataataataaaaaataaaaattaatcctcaccaacactgattattacgaaaatttgaaggcacaacagaaaaaatatcgagagaaactatgaacaggaaagaggattagattattaacgacgtagagatacaatccaacacgatttcataaactaaaattacatattaaaaaaattgtgtaaaagaagaagagagagaggtacgatttcttggcttgttcgagggagcgagcgtggccaaaatgaaagagatcgtagatcccatcggcgtagactcgaacaggacggtcttggggaggaggcatcagatcgggtttgggcttggagtgagtgttgatgggggcgttactagtatcgttgggcttgacctccgccattggagctctcaatcaaaaccaccgcgatctctctctttttttcctcttctattcttttgctttgtttcatatcaatactatttactttttgttttttcctttttttttacccctttctttttttttttttggtaacaatttttatcccctctctttctctttgtcttactcttaccattttctaattttcttttctcaggttctcacctcagaatatgcggtaattccgtttacaatattctcctctctctctttttcttttttttttttctaattaagatttttgtgccacttgaacttttaaagttgttaaaaatatgaaaattcagaggtcataatttagtacatgtcaaagttcgagggtcatgatttagtagatattaaaattttggagcatgatttaatacataaacaatctttgaaatagtaaaattaaatgaaatttaacaaaagtctttaaatccaacaattttaatagttcaggaggcatttttaacgatcttaaaagttcaggagacataatttggtacatgtcaaagttcgagggcaaaaattctaattagctgttttttttttcttaaagtatataaatatatatatatttaaaaagttttttttactgtaaaattctttcaagatatcatttagggtttgattggtttgtgattcaaaaattgtgttttggaaacaaaaatttaaatttcgtaagtgaaaa

SEQ ID NO: 382341 - DNA, 2067 bp, Cannabis indica
tcccatttgatgtttgcagatgataccattctgttttgcagagctaatatgaaagacattgattcgcttgtcaactgtatgacgatctatgaaaactggtctggccagcaatgtagtaaactcaaatcgggtgtcctcttttccagaaactgttcaaaggcgcttcaaacttctatcatggacaaactaggcatcggtttgatcagaggggaggaaaagcaccttggtaatccttttattttctcccgaagtaggaagaaggactttaattttcttaagtccaatctctgtaatcgacttgaaggatggcggatgaaaactctgtccaccattgggaggatggtaacaattaattcattggctatggcaatgccttcttacactatgagtacgtgcaaaatccaactacttcttgtaaggagcttgattcattagttcgaaaattcgggtggaaaggccgtttagactgcacgagatttctggctacgaaaacatgggattctctttgtcaacctaaatgttgtggaggcttgggctttaggaaattctttgatgtgaaccattctcttcttgctaaattagcctggtttttggcaagcaacagtaacaggccttgggctgattctctcagagctaaatattaccctttggacactttttggagtgtccaggaacgcccttctgatagcccggtttggaggggaatactggatgctcggaaaacaatttgtgatggttcccgcactattattgctactggtgaagacactaacctgtggtggcaaccttggactccttggatggaatatgaggagtttcgtgaaactatggagatgattcgccccaaagctccttctcttcggtgtgtggcggatttgatgttcagaaacaataaaacttggaaccgtgggtttcttgaatttctgtttggtcatgaattggggagcctgattagtaccatccaaatcaactctattgctgagaaagacatgctcatttggaagaattcggatactggtatgttctcggtcaagggggcatatttatgcagccaaaggactcggtttgctgagaaaaaagagttatggaagtggttatgggatagtaagatacaccccaggcaaagtatgatgctttggcgtgcgatagcaggggcacttcctacagcggataaatatgggggcagcaataattatgtttgcccgttctgtgggtctgattctgaaagccctctccatatttttgtgcgatgtgcgctggcaagagctatctggtttggtggcccattacctatcaaaactgagataattttgggtaactctttatttgatttctgttattcagcaatgattaatatggacacttcctctagacattattttctggtttggtttgcctcaatactcgaaactgtgtggctgtggcggaatagattgtatcatggttcccaggtgctgatttcgatcgacaccatgatttctgatgcctgcaactgttttcttgagatgagggatatcaagaagaatcaccctgagaggggacctgtctccatctctcgccaggaatctcctggagtaacctcgaagatgattgtgacggatggttcattcaaagatagtttttttgggggtgctatggtggccattgacggtatcactaatcaatggtttattaaaacaacctcaggaaaacaggactgttctattgctgctgaacttgaagctattaaattagctttacgctggactaaggagaagaattgggaaggagtgagcatcttcactgactctcaaatcgttgtgaactctcttctgaagaactcttgcccgaattggagactcagatctttatttgattctgttgctgctttgaaaaacaccttagttaattgttcttgtgtttttatttcccgagatattattacttttgttgatgctttagcaaaagatgctagaagttcctccaaggaacatctgaattgtcaaggggagggatttccccctgtggatcccatgaaccttttctcggtttaatttgaactttcgttctctttcaaaaaaaaaaaaa

SEQ ID NO: 382342 - DNA, 6760 bp, Cannabis indica
caaatgcttttaatatatatataaaattatgaatggtaattttgattttggtggaaagtgaaaacacaaatggaaggctaggggcttatcccatattatctcatactgaaaaagtgatgagtagagtagcttgagattgagatttgagattgagatggagatatcatatatatggagatatagatagatagcattgaaacccatcatacttggcaaaagtaggtttggacttttctccaactttcatgggaagccacatggcaaacccttaatcatacaactcctacaacacataaaaactccaaccatccatgcacgctaacaaagtacaatctaactttgtttttctttttatttttttatccccaatttcttttaatatatatttatatctataaatatatatatagttgtatgtgattaataatattcaccaccaccatccccacgaaatttaagttattatccatattaaagttggtacatgaagaattgcattaacgatatgttatacaactaacaaacatatatatttactcatttgtctattatttattgtaattataaattatactaattaattgaaatggaagtcatggcggtatatgctaataatgtgaccaaacttcttattgaatgctttaatatccttataaattattattttttaattataaatgagtgatctatcaatattattaattgcataacattaattttacatatgttggttcctttttttcgttttgaaaggtgcatgcataagttgtaattattaaaaaaataaaaaaatatatattaataattaaagtgtcaacgaaataggaactacttctagtcaccctcaattgaaaaaaaaatacttctagtgatcatgatttgtaagttgatatgtagaattgggtacataggtctaggtaatattatgtaaaaaagaaaagtaaataataaaaaaggtattggggttcttgaatgaccattgctccaaaagcaaacgccaaaggccaaaataataatcattaatgttgcgcgtgaaaaaccctggtcgcagtcatacacacaaacacgaaaacacacacacatatatatatttacattaatttgatatttatatatataaatatatttatggctacattccaatgcattcaattttcctcaaaagcatctcccaatccctatcaaaagcaaaaaccataaacccaaaaatacaataaacaattattattaaatcattaactctgaaccattccatctccctttttgctttgctttgctttgctttggctcgggaagccaaaaacccaaagtttgtgacttgtgaccaaaaataataaaaagcaaaaattactcacataactattttgttcttaatcgtattattatttcaaaaactttttgaagtttgagctgagagagaatggtgaatattggtgattgtgattgtggttgtggttgtggctgtggtgtggtgcatttgcttgtttctaatatatatttgtttcatcgtaatagagaaaaggtcttcagggaatatacgctttcagtatttgtatgctctactttagtgagttcacagcttttcttgcagtaaaaaagcaatgcccttaattatataaatataatataaattactttttttttattattatttttgttagggttagggttagtttattcggctggaaaagataatatctttgtgttaagattttgttaatatgcattcaagaaagtaataaagtgtagatatggttcttattataaccttgttcttaatttgttgctttagtctctatatattaattaatattgatcatattaatacatttttaaaaaaattaatttattagggtttttatttccttatttatttgaaagcggattatttatgtataacgaatatgttttctaaaactataccaccatgacaatgactttgtcaaagaaaaaatataaaatatttttaaaaaaaaacaaagaaatataatttttttgtaggttaatataatatagtaattgaattgtatatatttctgcgaaaatatatatatattgtacgtataataagacatgaatgacgtatttttgatggaaatagtaaattactacttaattatggtcatgaatgtacgtaaaacattctcctaataactttcatccgtataaattataataattattcgttattattattgactatagtataatgacaggtgaaattataatatacatagcgacaaaaacgtacgtggtgtctttgaataaattcgtacatctatcccaaacataattttactttatttaatttacatgatacaattatcgtcttgtttacatcaaatttaagatcagtttttttaataccaaaaacactactttaatttctatttatcaaataatcagtatagaaatttcattttcaactaacatttcagatgaatttataattaaaagggacaaaaaaattaattaatattatatctaaatcctgttatatagtgtgaatttttttgtttagaaatacaagctacagcctcctaataaattgacacgtgaattcacacttttagtgataatttttagtcacaacatcaattttttgtgactagctaaatgtgactgttagtcacaataaaaaattatttgtgaaaaacataccatttagacacaagttgtcactaatttagatttagttacaacaagtattataactaaaaacacatttagtcacaacaaattgtaatttttgtgactaagtctaatatctttagtcacgaaccttttaatcacaatataagaataataaattataattagtcacaacttttttacttttagtcacaaattttgttgtgactaaaagtaaaatttttgtagtgccatgtacccgatgaaaaatgatgacgtgtttaataatatagctctcgcagagccatcctcacatgattcaaacttgcaacaagatgcgatcgagatagggtctagtcgcatactatgcccaacatagttaaaagataagcatgatcgagagaagttaatattggttgtgcatatcgattatatgcgatgagcaagtaagtctctccaacaacaagtaaagaccgcttctttacataagtatggtttgaatgactgatgtgttcgatgattcattaagaactcgaatgttctaagtcatcaacacatggaatgtccgaatatgcgatcaaggatggtcatagaaattcatgaactaaaccaaatgggcccaaaagcccattatgcgagtacaacgctatagatcatatgagtttgtatgtttgaaatatgaaaggacagagtgcgacttagtaagttggatatgttgttgtcattaagttaagaatggacgaaaatgttcctatatttattcttcaaatatttatcttaattaaattgtgcaattattgtaataacagtcagaccagttgtgtaattttaatggacacttactttccacataaagaggtggtccaaaattaataaactaaactgaaattattgcacaaaatagattaagcagatcgagctctgactgaaccactataattttcttgtctactttatatatctatttttgtttttttttttgttcattttgtagctaaaattatgagtactcgctattctaggtgagtacttgcataactgctagtgagtgtttttatttcactcgaatattcacactttttagtgttgtctaaattcttccgataatatttgatgcttgtgggaatcattttgtataaacccttttgagatttgagaggagaatcgaaatggctacaaaatagacaaacacaaacaacaacaatgaaactatcaacattggcactatcaatgttcttatcactatagcagaagaaccactccagttgacaccgttattggggagtagggcgtactgctaccatctccctcaatctatttcctctattttcaggccatgctggagaaatctcaatgttgccactgtgggcaagtttccactaataacacttgcccatgcttctaactgtatcattcaactaacaaccgcacaatacacagaaataccataatagatgcagacattgcaggcaaggaagagatcagactcgtgcttagtgtcaactgcgagtcccaacacaatatcacacaagtaatcatgtaactaacgataaaaggcgtcatagtgatcgtactaatattcctcgtaaccgtatggaatgctcagatgaaatcaaccttgatgggcttgacttggatcagcctattcgcaaccttccacgtggcaaaggacctattgatcctaactctaaccagtgatctagttggagggaagaaaggtcacatgaagaggaggataacgaccagcgcaacccacgcagtcgtgcacagttgcgtcttgaggtaaatgatcacaagatcttcatcctcgagatctgacagttgtaaccctagcatttataccaagttaggtttggtgtgaatgcatcatagttaaaaatttgcttgaagcttcaattttgattttcgatcacaaacaaagcgtgttgagcatcagaaacttagaattttttaccaattgtatcctagttgtccaaattctatgataattcaccatattcatctcatttaacatatttattctcattttcaattcacattatgaattttcccatttaaacttgaaacaaatagaaaacaagcgtaattctgcacaaaataaatataattaattgaaacacatctctaaaatactttataaaatgtacataaaactaatctatcaatgttaaaatttcattatataaatatgatatttttacgttattgtcaagttttatttacgctgttctcaattacacttgcatttgccccatccctaaagttgagaatgcagaccgtgtgaaaagttttcaaccaataaatctttgtaattttggctataaaatcatcacaaggattctctctcacatgattaagggagttttggataaaatcatctctccttaccaatatgctttcatccctggcaaatggatagtcgattcttctatccccattcaggagattgtccgcaagatcaaaacaaatcagggaaaaggagtgttgatggctgtaaagatggatcttaataaggcatttgacataattgagtggtgcttcctggaaaaggttctgcaagctcatggttttcacaaacattttattcatcttgttatgaaatgtgttagtacggtttcctactccatgttgctcaatggtaaacctcagaaaaaaattccacctagagagggataagacaaggtgcccatcttgccattgcccttgccctttctctttattctttgtagtgatgttttatccaggctactcattcgtgagcaagaagccaaaagaattaatggcatcaaagtctccaaaaatgccctgccataaaccacttgatgcacgcggatgacacaattattttttcccttacaaatgattctgaagcccgtgccattggagaatgcttaaaatcttttgagaagtggtctagaaaaaattttagcaaagagaaatctgccattcttttttctaaaaattgctgcactcagaggaaaaaagacaataagggctgcttagaatgtccacaattgatcagagttgtaagcatcttagaaactcgtttatattctccaggaaaagaactaaagactttgaattccttgtgtcaaaaacttcctactcgtcttgaggattggaagataaagtcctggacggctagtagccattaactctatagccttagttatcctgatttacactatatccaatcataaactcttgatctttacttctcacaaactagacagtattcttagaagattttggtggactaataatggggcggcctgggcttttgaaggtttgaggattttaatatgacactgctctcaaaattggattgggagattgcttcaggttttcaaaatggttctcaaaagccctggctggtttctctcctcaagaagtattgtgttatagagacaaatttattgtagttcactagattgacaagaatgattaagtaataagtaattataagaaagatacaccaaatttatagtagttcactccatgtatcacaacaataacaaagttacgcctacttcaagtttttatttctcaagagatggtaattacagaaaaatactaagtgttagaagctccaatttttagagagagaaactagagagagaagctctgatcttgtaggtagttttctaaacttaaaaaataagcttacgaagctatccttttataggtgaaggaggcccaaaaaaaatacaaatgagatatttttgagcgttgatgatttgatgttgaaaattagctcatggtggtgatggccattttttcggagcccagcgggtctcgctgtaggtaacccaaagcttatttttgtagttctcttggggtgaatttcgacgatgatattttttgaattacgtcttgagtatgagacatgacttgatagagaaattaattagcttcgaaatgcaagtttaattatgtcaattaaatcaaacttaagtgagttatgactattttattgaaggcagttcatgatccagtgcctaggttgatatatgacgtcaacttgaacgttgggtaagtgcaaaaatgtccaagggatgtactttatgatgcctaagtgataattttacatcacttattttttgtgttctggcgaagctggtcaccaatt

SEQ ID NO: 382343 - DNA, 2038 bp, Cannabis indica
gcatgactcggtgggagttgttcgagagacggaagtgtgcacgaggcacacggtcgcgcgaaaaatgagcccattgttactgggatggttggaaggctgaccttggcttagagaagttaaggtgttgcacgggtgttccgttgcctgaaaaggtgagccagtgacgccaagtagagtatatattatgcctacaaatttcaaaaaatgagaagggtcactcttattcataaggatattagcgtttaaattactcaaactacacatttaattacacttaatctcacaaatttaattttgggatttttttttcatttttatacttcaaaataattttttatatatatttttacggaattctacaaagaaatctctatttcaactaacggaacaaacgaaatcgcaaccaaaatccgtatagaaacccacatcgaaactaccggagaaaccaccttagaaacccaaacagtaaatttaaaaaaaaaagttaaaaaatttagtatatggggtaatttcgctttaattttttatggtaaaactttcttaactccattatgttttgctcttcattattctgttacctctcttccatctgattgtcacatcatcctacgtggcatcccaaatatgtatccatgtcagctgttaggggtcacgtagatggtgacatgtacaaaagcatacacgtaataaacttttagtagtacacataatattaattatttaaatattaaaaaaatttatgaataagaaaaataattaaaattataaataataataaatttaaaaattattataaatttagacaaatatgagtaataaactttgtattcgtttctgctctcacttcccttttcattctttaccagttacactgacacatatatatatagatgaatacatacatgtataatatacataatcaatatacttgctactgctacaagttgaatactattactattatttagagaatactacctattctatacgttatgatcattcataacactccctcttagtatactctacattttgtttataattaatactgtctcgttgaaaaaaccttattaggtaaaacttaatggatatagtaagaaaaaaaaaagagtacagttgaataagctcccccttacaatgacattgcgagttactttttataaattttgtagatgacccattctaataccatgtctcaacttttttaaaattatagtaagaagtgactttgtaaaaagatttgatagattctcactggatctggatatgatgtgaaacaaagacctagaagtttctaacatagaataagctggttcattaaccgatcctgaggagtatatatagggcattggtccctttgcatgagcgtgtttggttgtttcgaaagtaattgtctcataattcatacggtgaatataaagtgtgaagtttaataagtgctccaaagagttgtgtatatatttaagtgtgagtgctaagtattagtaaaataaaaagtaatttcttagtgtgtattatggtctagtctttagtgtgtattgtggtctagtattgtatttaagttggtttatttatttttgcaataaagtaattatgtttttttttataaaagtaattatgttttaaaagggttgtgttatctaattaaataaattaaatattataaaatctgaattaacatataaatactaattatatttgttacttttatcattttagagttaatatatgctattattgtagtggaattcagtatatggtaatgattttaagttttatcgttcaagtttggcaattcaaatcttagaacaataaaatcattttaagttaaaaactaaagatatgactgttatagaaaataattttgttcttatctaataattgtagtggtaattaacaagtggcaagtagtttttttaaacctgtgggttgaaccttgttttattttcataactgtagattcaatgtatttataatcataaattttaaatagaccatgtatatatgattttttttttttttctataaataaaataaa

SEQ ID NO: 382344 - DNA, 1583 bp, Cannabis indica
gttgtcagttttatacacttatacactatatattttttcgacggattaaatattatatattgcgtttttgctgcagttgatactacaaattttattaagtgttgatttgattaagtgaaataccacatgttaatatattaacggtccagttaattttttattgaaatatcgagaaaaagaataatagaagcatttttatctattttttaataatagaataattattgcttttactttttttttttttttaatttgaaattatttaataatgtttttttaatgaaagtggagaattaattaattgacgcgtgttaatttagtcagatttaataaggtacaacaaaaacataatatgtagtatttaattcgtcaaaaaaaaatataacatataatatttaatatatataagaaaataaaattaaaaaaatatagtatagaagtgtatgaaaggaaaaagataaaatatttataacacaaatatcaaaacgattgaaagataatcctacaatattaatgacatgcattcacatgatcctatttattatttttcattaaaaaatcacttaaactttatatctgttatgttcccaaaattaatgtatagtgtgcttataatattcaacataatttatgtattaggaaaattgtggcatataaatctccaaaaaatttagtttggggtagataagtccctaattttaaaaattggcagtaattattctcaaactcctaattctcgttagtccattagtacctaacttaccagctctgtttattgtgctttaaattactatgtgtaaaaaatttattggtgcacgtcataattttaattaaaaaaataaattgtttaaaatcataaaaattattatttttttttacctttttttcttgtttttcttcttcttcttcctttccatgtcttgtttattgtccagtacccattctcaccattgtttttttcttttctttttcttctttagtcccattctcaaccaccactgctacattaccctcatcactccaaccatcgcaaccaccgctattgtcacaaccaagccacggtggacaaagccctaaatacaactaagtcccaaatctcaaatcaaaatcattcgagacaggcatccaaacagaaaagaagaatagggcgacaacttagaattttatcattgtccccgtcgcttaatcgatctcgtcgtggtcgttgtaattgtcaacgaaatgtaatagatccagtactcgacggaatcgtgggtcgcatggtagcgatagaattttgtccaggtttaatcggggttcatgactcgatgcatcaaagatgggtctggcttcgtggatctgttccaaagcgtgacttgtgcacctacgttcgttggctggagtcatgagaaacccacgacaccgagcaaaaagaggcccaccggattgttcttgtgcctgacttgggtgctcagcattaaggagactccttcgttggaacactactacaaaagtcaaaattcacgacgatcctaaaaaatcttttttggggggaccgtcgttaaaaaaattaagtaactgtataaaaccgtcaggaaaaattt

SEQ ID NO: 382345 - DNA, 1442 bp, Cannabis indica
tctctctctctctctctcatttacaaaaacttgtgaaaaacaaagttttattttatgaaaagaaagtcaaatctgtaatgatatctgactaataatattaaatattttgttgtttttgtatatattcttttgatttcagtgtcaatcttctttacaatcaggttatgttattggattaaatatagtgtttattctacacttatatattttgagataattgtatacaataattattataataatagagatcttggagccataaatttaaaatttgatagttttgaagaaatacaagaaaatgacgaaaggaaaattaaagtcagatctagagagggaatataactaaatgaaacctacatagaaaaaagaaaagcaacaaaggaaaagtaatcatcgagagaattagtagaagatgagacaacaaagataaaaacaaaaaaactaaagatggataaaaggcttttaagtgtggtgtatattgtggaataaaggcaagataataaaggaataaagtggatgataatataataaaggctcgactgttttcctaattctttaattttcattttatttttcttaacttagctttctccatgcataaaatacaacttacatagttaagtttatttagctacatacatgagtacgtatctttaaaaatttacagaatatttctttaagaaataaaaaaaaaaaaaaattaccagacagaaaagtgaaaaaaaaaagtgaggaatatattcctctgtatataagactttctgcttgtaacagtacttatcttactatacattgttaagagtatatctgtgaactgtgatatatacttctaattggccactcatcatttcatttatgtgttcatattgattattttagtgtataatatagcaaacttaaactacattagtaaatttaatctacacaatttattcattattattgaacatataattccataataagtggggttctgtaaaaaaggtaaagggaatggtgggattgttgggatgaacaatttaaatccatcattgtattttgattttggtacttatagactttagtttaggtggtaaccttgttggccactacaaaaagtgagaggcgtattgtagttcataagttaatacataactatagagagaattggtttgttattaaaaaaacactaattaacaccggcccaaaacagaaaggtatatatcataacctttctttgcaggaattccatataatttaagtattgtctgatatattcagcctaataatttaagttaaactaatcctactttccaaacattcttcagaaattaagagtagtgtgttagagattttattatgatagaaaagaagaaaatcaaaatatattacaactttattgtaaaataatacaagaattaaaataagagattaattaaatttacaatacacatatatacact

SEQ ID NO: 382346 - DNA, 1144 bp, Cannabis indica
aaaattaaccataaaaactcaaacttttctaattctaattctactcattcatgggtaatacctattaaaaatgcacacatatatatgtaacgtgtattgttttttttttttttttgaagaaagggatgccctaaggaaaaagaagagaactaagattacatgggtcatcaccaatccaaaccgctacttcatctaaccccaaaggcaatttgccaacttatgggcgaaggaatttgtagtccagctaatatgagtgatacgggcgtcagggaaatgagacaaagcagatttaatttgcctaacgaggtctccaaataatgagaggtcctccttggggttctcgaaagcgtcagtgatagctttgcaatcaatttcaacatggtaaactgggaaactctcttctatacaccagaggagcgaaaaaaggagtgattttgcttcaagagtggcaacatccccactgccgatgtgggggaaagaaactgcagcaacaacttgagcttcactattgcgaatgactcctcgaaagctaacttttgatggggtcctcgggattgcagcatcagtgttcaacttgagaagacctgtagtcggcagagtccgggtcgttacaggaggggactgagcaatcggtgtagagagcttgcgggccgaagctgatgatttataatccgacagatagctccgtgcaagattcacgatggcatgggactgatcctgcgtttgactcctaattgccttgttcttgttgtgccaaataaaccaagcaacacaaagaaaaattatacatcttccttggttaaagtagtataaatcatgtaaacaatatcatgaaaagagatagtaaaagaagaagaaaaaatatatgggtagaaatttgtacctttccacattcttcgaacactcttgcaaaaaaacagggcatgtgtgatagattcatcatcgttaccacaacgggcacaaaccggagactggagaatcctcttaataacaaggttcctattggtaggtaaggttgaattggaggctcaaaaagcaaaatatttcaccttgggggggatgtgaatgttggaaattattttaccaggatcttagatctactaacaagtatgtttattaacagcctaaatatgaactttctaaa

SEQ ID NO: 382347 - DNA, 3076 bp, Cannabis indica
aaaataaaaaataaaaaaataacagtgaacattaatggttgtcccaactaacatgttccactatttatttagtcaatatcgaatttctgtttcgacttcaatcacctttttatacatttttattttaggtttcattactctatttctcaaatgaataagatgttgtaggtaatgtaagaccagtaaattaaggtaaaattccaataattttcatttcatgcgtaaattaaaagatttaaagttgctttacctaagtaggttttttttttggctaattagcatttttacttttgaattgacatgtaccaaattatgttcttgaactttgtgaggatagagattgttagacaatgactttggtctaattctattaatttaaaaaataaaagtccttaaatctaacaatcgaactgaaatttttaacaaactaaaaaatttaagaacataattagtacatctcaagaaataaatatctttattagttttttttttccaaaagtaaattgtttattgacttgatccacgaaaattataagcagactatttattagtgttgaattctccaaaaactttaacagttaacacttgagtttaacaaaaagaagaagataaattttctcaacattaatgtttttggagtgtgagaactaagtctaaaacaaagctttagtatatggtgaatgaaaacaacatattatgtaatgctatatacaactatataactaagagcttttagctactttatgaaaaagctatatacgctataaaggtaaaagttaaaggtaatgaaacacaatttttaaaaaaaattgttatgaattttgattaaaaatatatttacttgtataaaagaatttggaagagttggtactagattaaatattgaagagcttgaatgaggccagatggaactacactcttatttgggataaattaagtattcccaaacataattgacttgttctgaaaaagagatcagtccaaatagattgattcgttttggtttcaaccttttttatggttgtgcctttagtattaggtgcattcatgatgtgatcattctagtgtgtatcatgtttggttgtctcctatagtcacaaatgtaattagagatataaaaagaaatatttgtggtagatttattttcttaaacacaaaaagaattaggatatagtctaggtgggaatttacattgtaattaaatgattagtgtttgtaatggtttttgtgcatattacaattttgtgctgatctactacttgtgtctaaacaaccttctcagtggttgagcccaaataatcatctttacatctgtaatcccattacgaggcaatggcgaccttccagtgtggactatgttttgttcagagacaggggaatggagtgaaccagtagtcattcggcctctgcctccgctcacgagacaggctcattttagaggacaaatattgtatcgcaaccaagttgttgattggcatgggaggatgcactggctagaaagtgaggatattatgcattgccaaggcatggttgttttcaatctctttatacaaattcaattgagatggcagtttgtttgtctgcctgttgaaactaatttgacattaccctttgcatccatgcattatgtttgccttggaacgagccaggggaggcttctgctgtctcagatttataaagtcaaccattgttttgttttgaaagtttgggaattgaaggactacaagggtgattctgattcgtggtctttggtgcacaatgtcaagttagagattaaagcgaaactggtatttgttttggctttacatacaaacgatattagtgttgttttcttgtagtgtgatgaacaagttagtagataccatttgttggaaaaccaagatgatagaattgccaaaattccacaaattatcacaaggaatgattctacattcttatatttcaaccctattccccattgttcttggccatttacattactatttatttatttatttaaggctatttaatgaataacgatattcagctctttacctatttgggtgcatttgtggctgtcatgacatagaaaatccctatttgacaactagaaatgcttaacactttcttttatttacaagttagaacttgttcaaaatttgaattggtaaataccaaactaaaagaacattgcttttgctgttactatattatcaactgtcttttactttgtctgtttcacaatcacaactgaagtaccacaggtggcccactctaattcagctgctctctctctctttctctctctctctctctctcatctgtgctgtttttctttagtttcttggcctgaatttctactttaaacattgctgcactcttttctgatgagtggcagtagtagctgatcacttagctaggttggttggaagatactataaatgtaaagaaacaaagatttccaacataaacataattaataatttaggctctccccttgaagatctaagaggaaaacaggattttccgactgaggtgattatttggaacttttatatgtttctcttttgttttttattgaattttgaaacattcccttcttaaagtttgctaacaaagaaagacagctacggtccacggaggttgatcagtgtgttgagcaataaaaattacctctacgcccatcacgggcaaatacatatatacaaatattcgaaagaaagatgattatcaaggacaaatacacttaaacaaaaactacatgataagaatgctttatttgggcatgagcattaacacaaccaataaagtggaataaattgctaaacgaattaaagtgcatgaaaagtgtttcgaatttagaaaccttgtaacagatgattatcaaagttaggaaagaaatggctaaacgtatttctttttccaatctgaaagagaatactatgaaatatatttttgatatgtagagtgctatgttcttcaaaattcaataagtaaaatccaataaagtctatctttgaaatcttgccaaccttggctctctaggcaatccatgcttgatacagttactactgtttctaactaactattagttagt

SEQ ID NO: 382348 - DNA, 1928 bp, Cannabis indica
acatgtcaaaatttaaaggacaataataattagtctattagaaaattcgaaggaaatgaaagtggcacacccaattagtgctcatttattgaatctacaggtctattgtacgtgaatattctgagaagattaaatcaataagtgagattatccttaaggccatggcaaggtcactaaacttggaagagaattgctttgtggagcagtatggagaaagatcaaaactgaatggaaggttcaccttatacccgaaatgtccaaggcctgaccttattgttggtagcaaaccacatggagatgcatctgcaatcactcttctcttgcaagaccaatcaattgatggtctgcagattttgaaagacaaccaatggttcaaagctccatccattcccgaggcgcttctcgttaatgttggtgatcaagccgaggtaatcttttcgtataaaatttcgataattttattattattgaagactaatacaagcttagaagttagaacacttaaggactctttgctcatttggacacatattttcttaatttttcgattcattaaactagttttatataagtactctaaataattgtagaattatctaaacttagtccaagtaattctaagtttctttgagaaattcgctaaagtaataatgtgaaatattaaactttgtaaaataaccttacttaatttactctattccgcatataatgattgcacattctaaatctatgatcgtttatggtcgcacagtataatttatgatcgtttctacgaccatacaaagttattttgttaataaaattttttgtaaaattattttcctaataaaaattatcatagaaattagactactaattacctgactattgttgtgtttttaaactccaattaaattcattagtattgattttactgcttttcatgacacatctttttcaacttattaatcattacttaacagttaaaattatgttgttggtttctctaaattaatacaacagatatcgagtaatggagcattcaagagcgcgatacataaagttttgacaaattcagaaagggagagaatttctttggctgtgttttatgttccagagcatgataaattggtcggacctttagaagggttgatcgatgaatcaagacccaaattgtacacaacagtcaaaaactatgtcaacacttatctccaatactatcatcaagggaagaaggcaatagaagaaacaaaaatccaatactaacatttccatgcttttaatattgggaatggttgtgttgtttggcaatcaaataagaacttgcaaattggtatatcaaaaataaagtaatgcagcttatatatgaaacatattgcttgttttaaatgacaaatctttaggccagtagttctatgttttgtcaattttgttggattctattatcaagttattggcattttactgtgctatgcttttgatctaatctattagtggagctaagtattttttgatggttgtcatgctttctatgacttttgtgtcattttatttaaggtattaaaagaccttttaaaataattttagggttttttacactattttttgatagttttcatatcttgtcttctatgtaggggtggcaaaacgtgtcatcgtgtcgtgttcgtgtcatattttatgtgacccgctttatatatttcgtgtcaagcgtgtcgatccgttttttgactcgtgtctaattatctcaaccctaatccgacccgtaaaaaatcgtgtcgtgttcgtgtcgacccactgtgacccgttttgctattattaaagctaaaattgtagagaaaattaataaatttaagctccattaaaaaacttatatacatttatgtatatatagtttgttatacatataataaaaattaaaaaaaataaaatatttttaatttcatgtt

SEQ ID NO: 382349 - DNA, 2529 bp, Cannabis indica
ctaaatttcagggccagccctgagaacacactgttttctctgtttttaaaactgaaaataaaagtggtgatagaatacatttttattttaaaaaaaaattttacttttattttatgattaaaaaataaaaaataaaataattactaaacgcaatctaaacttataaactacaatcaatgttttacctaaaaaatattaacatcactctaagttacacacattattaaaagcttcatgaaagtttctaaagatgtagtcatagcatattattcaataacaactataattataaagacccttttacataaaaggaaaataaaatctttttctaagacggcattcccctcaaacccagcacaaaattcacatgaaactcataaacacgtggcaattaaggtatttacacaaatttcaagtttctcaatgatgaaccatctcacaatttggtcaatctcaattaacacaattccattaacactaacaaatatatatttctttagaaaataaaaaattaaataatatatgaatttatttctaaaaaaaacacacacaactcaagtcctcaacgcaataattttgccattaatttttcattttttccctttaccaaatgccgacatgattcccttggtgtaaatcctctaaaccttgagaatttgccatctaattcttgttaaaaaaaaagttaatttttcagattcttttttccttttcacaagcattatttatttttattttgctagtaaactaaaactaagtagtaccatgtatctagaaccataacaaaaaataaaataaaataaaataataaaaaagtagtgggttcgaatttgacttggaaagattagagtgtggaatggtattttgactttgagtcaaatatggcacaccacccatgaccaagaccagtgagtccacttttcacacgcttcgaactttaaagacccatttaaaactacgacgttttggtagctaatctctttcgggcctttgtgggcgggcccctacatcattattcgtttagttgggccgtttcagcccaaattcagttcttgtggggcccaatagtaatgtgacttgttgtaccaagcctcgcagtcatttttataatgatttcaacaaccaattagtttctaacacgtcatcatacgtcagcactgacgagatattgattggcccatcatctgactttttttagggcgaattatctcacgttttgacttggtataataaggaaaaaaccaaaaaacaaaagcatgaataatgcgaaaagcttaattttacacgagaaaattatatttggcttttgaatttcttgttatttttttttttcttagaatattttttaaaaattattatcttatcaataaaaatgtactaaagagattattaaacacactaaagatataatgctatctcttctttgctataaaatttgatctagttaaagcttataatagactaaactggcagtttattgatcttgtttcgtagttttaaggcttaggacaagttttgtggatgggttcgtcagtacatatctacgacatccttcaatatttgccttaatggaggaaaaattttggttcttgtctgttttgtttacttcgccgataacggttgcgccccctgtttggtttccccttccaaaatattgggtcaaaatcaatttcgacattaaaattggttgtgactcaatgtgcgtggtgattttggctagagattacaaagagtcagttttgtgagtggttatcaacacgctcaacttctcagacccagaagttgtgacctgtttattagccctaaaatcaactattctttgaaagcattcatctgtgataattgagaatgattccgcgacggtgatcaacacactgaagggaacttgttccgtttgggatattagtaactatgtacttcaatgtaaaaaagtttttcaaaccttttaattagttaactttcgtttatatctagactgtgtaattttgtggtccataatgtagctaagtggactttatgtattgatcgtgagatctaactttatctagttttaatatatttactcattttattaaaaaaaattgttattatattttcatttttatatgtttgtaaaggttatgatttataaccacataaattatgataatgttcattatgtttgaaacaatgatgaagaatcatttatatacattagtaaattatcgagcataatatttttacttaaaaagcttttttttttgttgttgttgaaggtaagatttgagcagttaaaatttgaagagaaattcaacatggtttgaatttagcttattacatacatatatattttttttttaattttcaaaggtagtaccaatagtttccttaatatacaacttacataagaaaaagaaaaataggccaatatgtcaagatattttatatttattgaataaaaaagggtaaatagcggcataagtacccaaaattttaagtttgtaagcatataaactcaatgtttattttttagcggcataagtacctaat

SEQ ID NO: 382350 - DNA, 1156 bp, Cannabis indica
accagatactagaaaatttctgtttgaaacaagtattatacttatatatagtttgggatgcttcttgcatcttttcagaattcgatttgcagtaaatttagagtggaaacacataaaagagtatcccttttgtcatggttaccaatctcctagataaacagatataccttctgctgtgtttttttttatcgaaactaggattaccgtcgaatcctacaatactagaggacttaaatacccagaaaagactcgaacctttgacattgtgaccatttgagttaccttttgctgattaggctactagtgaagatagatagtgttctttgtcttccatgtcctattattgtacttggggtagtaatacatgcttagtaacatttttctctacttgacattaatatgtgtacccaaaatatgcaccgaaatattacttacagtttcttcaaccaatcacatttatctaaactaggacccgactgtttgaaaaaccacgtcatacattttgagtgcacatatcattactttctaacccgttttcttttttcttttttgatgtttttttccccctttctttcatttatgtcttattttcttggtaggatgtttgatgatatgagaaaacgtcagtgaggctcttgaagtggacatattataaaatggccttctcttatttcctattcttttattagctttttcttttggcatttagatttattaattaacatcatcatagtgttttgctgttgttttttaattactgtttaataaattaaattatcaatggtttaataagattgcaaattttcttttctacttttcttggaaaatttctttccaattctcccattgaaaggctgtataccaattttattacacaaaattataccaattttattattacctgttatagacttatagtgtcaaaatttaaacattagtttttatttttgtgtattgcttacatgtttttcccaaattaccaaactatttaattaagaaaaatccagtacatgtttgtttctctaatataaaaatgtaccttttgaagccatgtttttattggtttttcatttatttaatttaatttaatatggtattagttcaaagtaatgttcataagttaagttgttacctttaaggaggccaaacagtaaaa

SEQ ID NO: 382351 - DNA, 2654 bp, Cannabis indica
ttaatgaaaggggatcgcaaattattgagagataataatggaaccctagaaatacaagaagaatgctcttggagcaagtgtgggcaatcgatgacaatcctccatctagttttcttcccttctcttgattttttatgtttttatttgtgtttaatttaattatagatttgattatgagctaaactccctatttagggatttgatggatattaattaagaatattccatgaattagtattgtaatttattcatatttttgcttattacatgtgtttgattagccaccttatgcatgatctatgatctcaatacaaaatttgaaaagtgagtattgagaatgctctaaattaataaacataggttttgatgtgagacgggagtattaacattgcttatgtaattgttagattattgcttaatacgaattgtatgttgttctatctcagagatgcagtagttagcatgcaagttaggacctttatgatattaaaagaatttaggttaatttatattttgaagaagaatgattaattagtattaacaattgggtaatgaaagtaattgaaattatatcactaatttcacatccattgttaacctttttatttgtttgttttatttagttttgcttagtttattagtttcaaaatgtattaattcgattgcaaatagaaacaagaattcaattgattgatgcttgactacagtcctcgtgggaacgatctcacttatctgagtattacttattcaaacgatacgcatacttgcatgttggatttatcacaacaagtttttggcgtcattgtcagggactattttagtttatatcaatatagttgaattatattctacgttggttttcttttatttaattttactaatatttacttgaatgtgtttgacctgcaaggtaaattcaaatgctatattttgtgaattttgtccaataacacaatgaatcattttattttgctcgggaagatttaaggagcttggagagagatgttattctaatttctcaagtgggtgttttactctattcttttataatggacttaactgggttgattatggagcaaaggtaactggagggcctttgttaaggagaggtcatgacgtaataaatctgttgaatgatataacaaattatgattatggctggcatggatccatcactttagggttggagtcaccaataccttccttattgtccaaactcacctgaaccaactaacgaaaacgagaatatactatcacttccaaaagagattaatcgcttaacgcacatgataaaagctctatgtaataatttaataacgcataatttgaagaattttaaaagattacacaatgcaaaattaatatagcatatacactttatgctgcaattaacaattgaactagaaataaattttcagcagcacaaagtaattaaacaattacaaccaaagtaaaaaaaaaatatatatatttagtataaacacttaaccgaatattttaaatgcaaaaataatttaataaaaaatcaatattattattaattctcaaaaattaatttagagatgctcttaatatcacatgtagaatactgtaatttggatctaaaccctaattaatttataataaatctaacaataaaataaaagaataacggaagcgtactaattaattgtaaaaagagtataatcttccaattttgcatcaaataactatgaagccttatttttctaatgataaagattcaggaatccaaaaaaataggatgcaaaaaatagaaaacatcacccattatattaccaaatgttatattaactatttttaatttgacacctcattaaatcaaaaattgtcaaattagaatttacatattaaaatcatgtccttaaatcgaaaactttatttcaaaataaaacacataacctaatacatattttacatatccaattataatcccaaataaataaatttctttaacatatacaatgtacaaaagaaacatcaataaatttcttgcaaagattagctatatgtcatctaagactactccaaaagcagagtattcaaccactttcgtgttaattgtcttaattaaagactactccaacatagtcctagaccgtttctgaataagcatacaaacaaaaacaccatgcttcacatattattaatgcaagcttattataaataaagttaattgtgccatattttttttttttaaaaaaaaagaagccataccatgccataatttgttttacagtaataataaaaatggttgttggaaatcaataagaatgattatgatggggtatgattattgtgttattattattggcctttaattgagttgattactatatatgccttgagcaaaatttaaatatttgggaatcacatgtctttgttctacacacacacacacataatccatgcatatataagcaaattaggaaccttcccccaaaacaatatacatgtgaaaattcatcaaaaagctcaaatgtgatgatgatgttgattccataacttataattacaaccaatctcaccaaccatatatcacattacatatccaaaccaatttcacaacttgcttgcttcttttccttttttttttctttcttaataataatttaattagaaggggtttagaataa

SEQ ID NO: 382352 - DNA, 2887 bp, Cannabis indica
tcttcttcaacaattaagcaagtctctgtttaaaggatcttttcaaaggctatcttgacactcttgcaatcagttcaacgcttgaatatcaggtgaatgaagattcaaaaacattttttttattcaagtccttaagggctagttttaaacttttaagtttagtcacagaacaatacatcgaggtcccatgaactttgttggaccagttgttcctaactagctaaaaaaaattgagtgttgtgctccacatcttaaagtacttaaaaggctttttcccagactcgaggctggatacaccgttagtaaggtcagacaatgataaaataaatcttcattcataagggttacctccgcaatggaaaacaaatccaatcattgttgatttgccatgacccgattaatatttgagtatattctatcctcttcatgctgcttattgtttcaagtaaaaaaaattaccattgtacttaacatcttcaaaggagcacacctctacacatttcttaaatgccattgaagtaccacgtcgatccctcgagtcaatcctctcttctttattaagaatgtcattaaagtcccctaacacaatcaagaaatcttagttttaagatcaatcaagtctctccataaaatagttcttcccttcatcattcataccatacacaaaaatggcataaaatctcgttcttttatcaattggtagtacatttgataatagagattgtgaacataaaagaattccaatcaatgacgatctttcctcctttgtgccaagcaatgttgaacgaaaaatgctaactcgaaaaacatgaacatacaaggcttccattctgagctttcactctcgtttctaagagtccaactagaccaaccttatgattagagatcaagtgcttgacctcattatgtttttgttactactcatattattaaaactttctattttatgtagaaaattatgtataatttttaagattttttttatatagtgaaattctaatattattaattttggttgaatattatataacagcaaatgctcttattacaactggcttggcagcacttggatacaaatatgtgaacataggtttggacatttcttcatttttttggtattttaaattatatatggaaaaaatataaatattataattgaattgtattgtattaagaaaagaaatataaaacaatgaataagttgtttatttgcaataattaattaattacgagaacattaacatataaaattaatagaaaaagttagatattgtaacttttttcttctttttttcatgtggaagatttaggcatgaagaacttatcacaagctttatatatacatatataatttgactaaattatctctttcaagatattattttctcgaatgaaatcacgaaattattaaaattattcaagtttttttttttttcaaacgatttacgttatatgtatgattaaacagatgattgttggggagaatcaaacagagacgagaaaggaaatttaaaagcgaaattcaaaacttttccttctggaatcaaagctctggcagattacattcatggaagaggattaagactcggcttatattctgatgctgggtaaattttatttgaatatatagcattaatttagtaatcaataacaaacaagtctatatatatagtttggaaatagaaacctaaatactttcatggtaaaattattaaaataaagtgaaatatacaaagtttccaaatagaatattaaaaaaaatattttcttcatttgttgatgttattttatttttttttttaatttttttttcattttttattttaagttttattttatttttttttttaatttttatttcattttttattatatagtttcatgacgtgcagtaagacaatgcctggctcacttgggcatgaagatcaagatgcaagaacctttgctcaatgggttagtttatatttaatatcaatattcataatatctaacataattatcatggatcatttttccatcaaaaaaattaagattaattatttttttttatgaatcagtgtaattttattgctcacaacaatgtttatacaagctatacgcaccttaacaaagtttgccaattaaggtcttgatatgtctatctatacataaatttacaaattgttaaaccaagtctcatatccttttgactttcttaggccatacaagaattactctttgatttacattttctttgatcgtgacagttagatgtacccaattaagctcattttcttgccaaattaactcattcctcgttttccacacatggtaaacaagactagctaaaccagcagccatcactttccttgaaaacctgctggttttaattcggttaatccacttggagactcggtttagctcagtcgtggcttgcgctccccagccaagccaatgtgcaatttcaagattaattattattatttaattattttttttttttacaaaatcacttatgtaacaggatgtcttcatcaaatcatgtattttgaatattattaattatttattttataaaagtgatattaatgaagaactgtatttttagccataaaagttaaagaataaatataattttcgcccctatcctttatttttttgtgttacatgaaaaattgcccccaaattatgaaaaggttacaaatatcctacctcagattacattctgcttaatttttttttaaacaatttacttatgtgatgcaactagagagacatttgcaaacaatttttatagttcagtaaaaaatttttgtaataaaaaaaaaaattcaaaggacaaaaatttacaatagtcaatgtatttgaaggggtataaattatatttatttaaaaattaaattaaagt

SEQ ID NO: 382353 - DNA, 1083 bp, Cannabis indica
actgaagttcatgtcatgcctttcaaaacgaataatttcatttcaaagttcctcatggggcctctaaagagcaccaccatctgacatacaatccaagttgcaagctcattttagtctgctttttttccaaccagctaggtgggcagttttgggtaggggaaaaatttggacccatttgggctcttagtaacaaaatataattagtgcccataatccaaaactaagaccacttaaattaaatttgtttaaaaaatcaataaataagtaatgaaatatctctgattgggtctattagagtgatccaaatccatatgtttgtgggccattattatcagtccattaaaaaaagaaaaagaaaaaaaaatacaagggtgaggctgaggcatacacagtattgtgagggttgtttccattaacctctgatgcagatttgacaaaggcttggctaattagaccctacagatattatagctcgaaataaagacatggacggacacttaagaggcaaaaatcatatacctgagagtgacagaaaagaaagaggaaaattgattggaaaacattaatataaagaaattaaatcaataaaataaaataatgaaataatattatataaagaagaagaaacaaatatgggttcacattaaagtgattggacctaatcaaaatggtggcccattgacaaagtttgaactttgaatcatgaagataagatttggatatttttttttggacttcgtatttgtagatacttgttttttttaaaatgcatgtgtggccaagtatatgaagtttcctcaatatattagttctaccttaaaaggttttgtacaagctcaggtatattatgatcacaatatgtaatggccatgtcaagacaagagtctgttttaattagagaatttgatttttattactttcaatttttgaacattgtatattcaaaatatatgagaaaattaattgaaacatttgttttcattaatacttaataagtaggggtgttcacaaagtatccgatccaatctaatccgcacgatccaatccaatccaatccgcaaaatgcggatatccgcacttgtg

SEQ ID NO: 382354 - DNA, 1105 bp, Cannabis indica
cctggttggcctctaagatgggtcttggggtctaccgggcctataggacctgaagccctggccagccaaggccaaggctccaagtaggcagtgagtttttcctctttagaccacgggtagagtcttgtggcggccttagaggcatatacaaatgtggccttgtccgtggtttctcttggaaactttgtatatggctagataatgagtccattatagttaatggtgcaacgtaggacttacagtgtgtcttggtaattgcacctaagatgatacttggtcgtttgtcgacctcatacccttcgttttttctagaagatgtcgttgagtgtcgttgacttgaatatatttgtagtttcatcaggttgctcacctccccttatttcttccatgaaggtaagggatcagtgtcaaaatgaaggaggtggcaactatgtaggtctcctgctctccttgtactgatggcaaggacaaagtagactttgcgtagggctccaccatacaatccacatgtggccattgtggccataaggggccaaatcatagtgtaggaagagactgcccaaccttctgtcaaggctgagcctaaaatagactccgatactgggagctctgatgcaaaatccaagttggaggaggctggtccagtgggggggaggagatataggacatgttctatcctccctaaccgtcccttgggcctttataatgcttgaggaaatctgctgaatggtcttggcatgccttcagtaataggactagatcatgtcctagaatagtctctcgtgccgaagatattggattcaaagccacctaagacaaggtgggtttagccagcttctgctctttcttgtgaggcctttcacaaggtcattactagtggccttgttaagggtgttcgttgcgagattccttgcaagaattatagggcacacaggccccttgaaggattgctgacatggttagggcgcgacatagaaaatggggttgtgttgctgctttatcaatactttctggacgtcgcagcttactttgagatgtgcccaatgttggatatattttaccaggatctagatttactaacaagtatgtttcattaacaccctaa

SEQ ID NO: 382355 - DNA, 1091 bp, Cannabis indica
gaagaagaagaaagataaaaaaagttaattacttagtttttgaaataattaatttttttatttgtttttaaaattaattttaattaaaattataatttagaccgataaaaaattaacacgtgaaattttttagaacaacgaatggggtagttaaattaggtacctacggagtaacaagaatcttgagcttggaactattgccacaatttttcaagattggagacttatatgcatcaaaataaactttttagggacttatgctgcaatttaatatcaacacttgacattttagggagaaattaacagatatgttaaaaaagaggaccaacagacttacaataatctcgagcttggggactacgccgttatttttcgaggttagggacttatcagcatcaaagtaaactttttggaaacttttgctgcaattctccttactttttatttatgtgtctttttaataccattttattgtaagtgttattttaaaatgtatcaaggagtaaaacatagtgattatgttttatgaaaataaagagagactaacttaatagtttaggaccatctacaattgaaaaattatgcacatcgaaatagcctatcagatttacttggtaaacataaaatatagcagggctgaagtttattcaagattattgcttagaatttctcccaaaatacgtgacaataaaagaatatgccatgtggcggtaggacccacgtgtgcgagatgcattcccctaattactcttgtagtaaaataatgacagattaatcatctctgggagtatttggctagtctgtaagcatccttaatctaaccttctccacgagtgaggcataaccgaaggatagtatgggaggagtagtggaagatgatgtcactaagggagcattacactgtatatgcatttaatgcaacgtggggaagaaaaatagatgccttactctgactaacatgtataagggtcaaaacccatcattccaagatttcatgaacccccaagtgtcaatcaatggtcacataaatgagccatcaagtcacaaataaaggataaatcacatcccaccaaacacctacaaacaaccta

SEQ ID NO: 382356 - DNA, 2110 bp, Cannabis indica
attttattatatatttttttttacaaaatctcataaagcaacataaaataacgtaaaatcaatataatataaatgtaaaaacaacatggaattaacatagatataatttttttgtgaaaacaacagattcatacttccttaagaaaaacttttaatttgtaaaaatgtttttgtaatatatctattttttttattaattataaaaaaaaatatcttataaaaataaaattcttacacaaaatatttaaaattacattttttatatatatttttacgaatttcttttacaaattttttacttgtattttttcagtaaacattgttattttcatattactttttataacaataatgtgaaaataacaataaaattaccattatcaagtatgaaaaattacatataaagcaataacccaatatgaaagagttttattgattgaggcatataaaacaaagtaacaagccacatttattcttgattgtatatagtttcttctcctcaactagttgaacttaattatgatcattgttccttccatcttcattcttcttcatctcatctttatcaaacgacttgtcgttagaggaattagtattactaccactagttgacttcttagtgttagttaggtgaccaaaggaattaagaatttttcccaaatcacacttttctatattagctttacattccactagcatttgcgcgcttatttgaggaggagcatagccattaccgccttctatggtggcaccaccctgaggagaggcataacccttatcgccttcagtgggagccttattctctgtggtggtaccaccgaaaccaaccctggtctcaataactggtggttgtgtcaacgacatcatcggaggcattggtggcattggaggcattggaggcataggtggcaaaggtggcgtaggtggcataggtggttgaagtggcattagtggcagtattgttgagatttctcctattatgcttacatcattcggcttcatcagagccgtttgatcaccgtcatcatcactactaccgatgtggtaatgatgagtcgggatagtaatagtagtagttgcagggttggttattagccgagccgagcaaagaataggtaattgaaaggctattgtgattgtgatgagtaataaggcaaagaaggctaaagaagaagtagtaccacattttggtgtcgccatagtactatgttttttagtttatgaaatgtgtatgtaatgattgagtatatttcttagtatagatatgtatatatatacatatatgtgtgtgtagagtgatgctaatcatgaatatgagaaggaggagtttgttttggaaggttaaaacaagaagagagtttcatgcattttttcatatcatcttatttatgtgatattatcaaacaatccgtatttaattactcttttattaataataaaatattactaccgattatgtactttgaaaagatttagaaatttattttagggagaaagaattcaaataattttatttggaatattctaacaaaaaaatgtacaaatgtttaaatataaatcctattttggattttgtattttacaaaagttattgattggactctctgttttgttaaataataaattagaccatgtatatttaaaaatagtataaaataatactttgaacttaatttttatcaaaataaaacttaataataatctgacattgaagtgtctgtgactatactaattatatttttttttgcatcgtttcatgttagaaattagttttagattggttatgttaaaaaaattgacgaaaattgttcagggtataattttgtactattttaaaaaatacaaggtctaatttatcatttaacaaaatagaatgtcgaatcagtaattttacgaaacacaaagttaaaaataatttacccaaattttaacattaatatgaaaaatacatagtgttgccaaaccttgaatttccttaataaaaatacaaataaaaaacaaaccatcatcaaaatatatttacaaaatttgcatattttttggtagaaaggatatgatacaaaaatgctgtcacacgaaaaagtttttaaaaatattgtgtttttataaa

SEQ ID NO: 382357 - DNA, 1621 bp, Cannabis indica
tgacctttagtttgacagcagaaagtaacctggtggacaaaccccaagatttgcttttttgtgctcgtagattcaggggccaaagtaggattagttggggaaacattgtccttctctagaataatgccagtggtaaaagtattcttttttccagtccctttcttcttcttcaaaacttgaatctgctttatagagtatttgcctcggaggcacttccttttttaccttgcttgactgagacactagggctgcagaggagattctctccaaattatcaatgtctacaaagataaaacaaaaggaggttaaaatctataaagtgaggttaattataaagtggcgagatcaaaatcccacctaggtaattgtcggaagtgctaggcgatgaggggttgctattattgttactaaactccctataaccagtgatcataaagagatcaaaggaattaagtggagacatgtcccaattccaactagcagccctatgagcatatgtactatattggttggcaattccataataagatatgttgctagtcaactgaatatgaaattatggataccaactattaaatatattgcataagaggtcaacataattctaaatatggaaattatactggctatccttaaatttgaccaggcgagtcgggttttggtcgaggacagtaggggaccatccataaaagtgagaggaattacctcgaggagccccttttgaagtctcggtagcttctcgagttgcaaggttattcttgtaataggtgcgagccagattgtcgtggtcctcatcattaagatccacagggacttgttcccaagcaaaatacttgcgatcttttatatccacggtattctggttttttttgagaaggctacaagcatttagattattatcattcaatagaaagtcggcttctcacaaaccaatcggaaggttgacgagctactcgtgacaacgttggattgctgcgattagggtaggtctctttagaagggttaaaaaaaaaaaaaaacaagcaaacgaccaatgagtttggaggttgaaaaatataaaagtaaaatgacaagaaaatacttgacttacgtatcagtagaaaaggtagtggtgccaactgggtgaaggtcgctcgtccaaaagaagttctgcttgaattcttttttgtttggcagcatgactatgtgcttccaaatactaaaagccgccagaacatttcttcctcacaagttaggacttgacagcataaaagtaagtgatttctaaaggggtttggctcccccaacctaagatgtgctacaaagattttaaataggcgagagaagggcttcgaccttgatgtgctcaatactccacactccaatatgcaaggagttgctggtactacacctagagccgctctgcaagagagttgggggatgacagtttttctcacccttctccaccgaacgaactataaattcgttgttgatttttatcccacaggattgtaagatgggtccaacatatgtaatagaccttatgttagactcaataagttatgcctcaaaggtaacatcaggattttgaggcatcttggacttttgagatttagttgttagaatactgtaaactctgaat

SEQ ID NO: 382358 - DNA, 1460 bp, Cannabis indica
tggtatattttgcatatatgtatagaagcttaattaattaataattgaaataaaagcttagctaataatgtatataaagaaggacgtacctccgttaagccataagacgagaggtttgtgttgagaattgtttatggcttcaaaaaaccaatagaacaaagctcttccattagtttggttaacgttaacatatccggcgtagtgtttgaagctcacaggtggctgtcccggcaatccaaccactcggtctgcctcttgctctgctttaattttctcactcactttattactataatattcatcactatttccagtaccactaatcctaccaaccaataacaagctcagacttatcacaacaaaaatcagataattatttttcatacccattattctatactacaagatttcaaattatatatctacgagattagctaggtatttatatatatagataaaaagggatgtgtaaattgtacgtgtggattatgtacagggaaagattcaagtgagacagataagcctcatatgcgtagtcttgctgttaccttttttttttgggggggtcattttctcccagctggaagtatatgaaaagatactattcactatttttattcccctaaaactgtggacaccatttctttttggcagtacttttggagtattaaatgtccatgtcattaatattgaaattctcaatgacaaatttgactttctatgcttagtgtgagggctagctagataaaaaatatctttaatggtgagggtgaagtttctgcaatttgagactatttttaatggtggctcttgtgttcattctctgcctccataggttttggggcttattggtgggatctgttgagaactgatttttgtcaacgaagttgtggccgggaaataaaaaatttaagacgaaatgaaagtaaatatttaagaaattaagaacttcaagtaagtagtaaaaatctaatgaagaagaagtaggagcttttattactctctaaatgatttggttacaaagatttttcaaccttcattcaaatctaaaatatagggtatttataagctctaatgacctgagatatattccaaggggacaagtagaacattgggtcacaagttgtaggaggtagtggttgcaaatgtgccccttattgggtgtcaggtagtcccgacatgcagaggtagtggctgcaagacagccattatcgggacatcagggtatgcatatgcgagaaggtcttcaagtctcccttcaaatctcttttttctcattatgatttcgagattcttacttggagaattttgggttcaatacttgccctgagttcataagagtacttttaagtactaaaagtactcttatgaactcttaccttgatagatgatttctcttttgggatctattagaatattagaatttgtgtatattttagtttaggcagatcagttatttt

SEQ ID NO: 382359 - DNA, 2842 bp, Cannabis indica
taatgaatttatgatatgtaatcgtcatgtctaacgtggattgttaagaaaaataaattcaatattgtgtaataaattagcattaatatacattatatattgagtgtttagggcatttatatggtggggtgtgtgttttttttgtccctatcaataatagtttttggtatgtaattagaaaaattataatttaaatatttttttattacactctatacattgtagttattaagtacaaaaacatactaatttttgtgaaatttaatataatttatcgtgctgatcgaaaacaaacttcgaaataacttattttatgttttcgatactgtaaattataattattcagaatttcttaaaattttattaaaggttctaaataactaaaatatacacatgatcatgtaaaaagatatgtttgtaatctattcatgtgtcaaaccacgaaaacatgttttgaagcttattttatatatatgtgcattgttattgaagaaacaacactaaaatatacgagtattcaaataaaattagaacacttaaatacagatgttcgagtactcacctcaaatagcgagcactcaagatacaagttgcaaaataaacaaaaataaaagcagaaataaagaagagacaagagaattattgtaattcaatcagagagcttggtttacttatagtccattttttgtaataattttcacttagtttatttaatttagatcactcgtttatataataaaataagtgtctatatgaattacataactaatcggtttagaactgtttctacaataaatgacaatatttaatcgaataaacatttaaggaataaatgaagagcagttttatctattcttgaattaagtgcagcaacgtatgtgactttatattccacgagttgtctgttcatattccaacacatgagttcctaggttctacgatgttgtactcgaaggatggccttcgggcctatcatttggatgtctgcgtttatcatgatcacataatcagacatttcatgcgttgacaatgtggaacatgcgagtccctaacgagtcgtcgaacacatcattcgtaccaaacctatgtaaacaaatattctttaattacttgtcgcaggaggggtctacttggtcatcacatataatcggtatatgcacgaccagtattgactcctttcggtcctgcttattcttttaactatgcaaggcctagtatgcgactagaccctgtctcgatcgcattttcttgcaagttcacatcaagtgaggttagctctactggagctattttattaacatgttattattttctatcgcgaaccagatccacgtgtcagctatttacaagactgcactcatatttctaggttacaaattcacactataacacatgtctttagttttgtgatgacaactgcttgtcaaacaacgaaagtatttatgagggacaggcgagttgctctatcacatgacgatgactcttgattatcttgtcgagaattttgaaaagacagttgtatttatttctatattttcccaagatgtcacgtcatcaaatcctttgggatttgtgcaggcatggttttgagatagtcgttggattaagtgacctttgtttttttattgccacatgtctagatactaataaatgaggttgatttgtatttaaaatcattggaataaaaattgacctcacttcattttttctatcattcttagatttttctctctaaaattgcaacagaaaccttttcaaaaacttgagtatcattttgctaaagactatttcgaggttcaaagaattttctaaagtgataatcaagttcagaaggacaagattttgggtcaaaaattgatatttttcacataacttttgtttatttactgtgttttctttgaataatcgcttgccttctgggtacttaggggtataaaatgcatgaaatagaaggaaaggttctagacaataaaatttcaagaaagaataagacaaaaaagagaatttttctagaaatttttttacctgtaatttgaatattcacatctgtctcgtcataaattttgaatatttgtatttttagctagaacacgttgagtattcgcatatttcaatatcaacccatgatcttggactaacagagtctaaagtggttgggtgtttcacaataatttaatatttatatacccgtgtaaatcttaagacactgtaaaacatcgaaccactttagtttactctagtgttagttttgttattttgaatttattatttgtgtgaggacacttctcttttaaattgcactcacaacacgctgaaaagatcttctatctttcagatgagtgatctctcggacaaccaaatattcgaatttgagcgtggagcatctgcaaatgaatctcagaagagcgacaattttctcccaatgtctttattagaagacaaggtttcaacaagggtagatcaacatgacccgtagtctattggccagataggtcgcatggtctaggagttagaagtacctgtcgccattgagatacgaggaagcgagtccactgtatctgctcaagaaagctttattcattgaagggctgctctagatgcagaagttgaggaaatggggcaagattttgattttcctgcttaaggggatgaaagagatgacgaggaaaatgatgcaaactctgctgaggatgcactgtgacagtcagttgtcccgtaatccgtaaggaaaaacaccgggtataagctgtacaatcccacactgcttggagaaggtcaagtgggatgatttctgagactgtgtaggtatggaactacacagttgaagagggcttaaatggat

SEQ ID NO: 382360 - DNA, 2664 bp, Cannabis indica
gtccattcacaattttaacagaacttaattttaatattagtgattcttaacaggcattttgttataatttaaatgaacaaaattaaagtaaaaaagaggggtcgtccaattcaatcaaacttcataatattaaaatgggaaatgacaagaaaatatataaaatgtaattggattaatttggttagcccatgcatataaattaattactggatccatataaactatgggcaagaaaagctgagaaactaaaatgatgtgagatgataatgacacactaacctctcttaggagactttcattatagaaagtcagtaataaaactaatcggccaagcaatcatttcattttcatattcaagattcaaccactgaattcagacacatataatataatatgtattttcatttttacccatttcatataataataaaggaaattagaaaaagaaaccatattattcacttgagacaacattttagcaggtaaatgaatacataaatatttcattgtagataacatataaaaacccggttgttaattttctattaaattttatctttattgctcattactcaaacttgatttgttttaatattttttcttattaaattaaaaaattaatatccaaaaaaaactcctcccctactataaaataaatcagtaaccaaataccttactaatggtagggattagtttgtgcaagtagaaaatggtagctccacttcacctagaagaagacaaaagaagagtttttttttttaatgcgctgatcaaaattacacatgataaataaagtagcaatctacaatcggcgaaggcacttccttgaaccaggatagcacatcgtctaaccgaagggtatgctttgccaagccatgtgctgcagaattcaaatctcgtgacacatggaataaaactgccctcaaaaatttagaaaattaaaaaaaaaaaaaaaagagtattttgtagctaaataaaatgtaataaagaagaaactaatgaggtgaggttataaattataatgaggtgtagtcagttcattatcatcaacaaattattctatgcaagttaagtatattgataaatgatgtgactatttagataatcccaaaattggaatagcccctacggctctctttaactaattaaagtttattaatcataatgcctgatgggtacctttatatatttaaattttaaataatacccacttgagctgtttgtttaacaaacacagacacactatccaaagttatataatatgaaaattttaaaataagcctttttctggtctaattttataaatttttagagaaaaaactgcaacaaagttattttttttggggggtaaatattaatttagatcttgtattttgtaaaagttattgattggactcttagttttgttaaatgacaaaataaatcctgtattttttaaaataataaaaataaaaaactgagcttaattttttataattttttttaatataaccaacttgaaaataattcctaacatgaacatatacagaaaatgtaaacaattttgtcataacacaattagatcggattattattaaattttattttgacaaaaaattatttcaaggtcctatttgtactattttggaaaatacagggtccattttgtcatttaacaaaatagatggtccaattggtaacttttacaaaacacaagatccaaatggtatttactctttttttatttataattctttaatttttttatttttttaaatattttttttacatggaccaataaaagtatactatatgtacactatgttcacataaatgtgcaggtggatagtcaatatgacatttaacacttaaaataaatagaattgttaaattgctaacagaacacgagtattaaaaattttaccgctaaaatttgagttatggaaattaaatacaagtaaaataaaagtattgaagatttggccacaatttacacctcaacaaatcataatcttattaattaagagatttttacaaaaatattaaattttaagttaaagtttacaattttactggaatataaaattttttacaaaaaattatcctttttataaaaacccgtaaaacaacaaaacataacaattaaaaataacagttaaacaaataaaaaaaattagaaatttctgtgatgtaattattccttaattaacccgtttaacacaactacctcaactctctgttgaaataataatatgtttgagatacacttcgaaataataatagatgcttccaattgaatcatgggccgttttcaaatgggccttgagccagtccaacggtaaaggcccaaatgagtgggtcaactccctggcctggttgatttcgggagagtttttcattctcgctggcagtaacattgcccaccacgtggctcttcgagcgggttttgatggaattaatctgaaagggatcgtacaaaacaaatctaatattaattaaagtcccacattgaatatcattaataatattaaaatgtttataagcaacagtaattatttatgggttaccaattgatttttgagtggaaccctacacttattaattaaccctataaaaaaaagggagaaaaaaaaaattgaagaaaaaaaagaaaaaaaaaataggaaaaaaggaagaagaaaaatg

SEQ ID NO: 382361 - DNA, 4268 bp, Cannabis indica
accgttgtttttaagttgttctaaaaatgatattatttatacgttattttaatgttacaaaaatataatacaatgttgggtactttgtgtaaatttcaattgaaataatttatgttaactataagtcaaaattttgaatatattgcatctataagttattattgcaaaataaattttatggctagagtaattctataagtttctttgtgtttagatatttaaattttcaatataaatatgtgataggctttgtccattattttgcatgtaaagcaagaagaagaaataaaggttgtatttcataataccaaaaaatgacaaaatgtttaacaaaatatagatttacaatttctttaacatttttttacggatttttaactatttttttttgttaaatatgacagttatttttccaatgttttctaaaaaaaatacaagtaaaaaacctatgaaaaaatccacaaaaatgtggttttagatactttgtataaaaacaaaaaattcaaaaaggtaaaaataaaataaaatacaatttgatagctcatattactacgagccataaatatgaacatggcatgtgaatataagtctcgaagattgagaaaaactataaacataaagaataaaataagcttctcacctcaggatgtgctacaattaatgaggcgttgtctcgcattattatattatggctatcaaataaaagcgataaaattataaatacaatgattagcgagaataacaacatcataagctaatctcaaaacttaaccgaggtaaacaaggtgcacataaaacacgaagggatgagctgagtgaaaagggtagataatgagttctttaagagcttacgactcattgacccacatactcgtgagtatattgaaagactaaggaatatgagccaaagacgacccatcacggaatgttcataaatgatgtgagataattgactctaaggaacacgaatgactcaatcctaagtactatctaaagactcatctcagaagacagaagcaaggaagatacttcaattaacactttgcaaaatacgcctagccattttagtgaagaatgcgaggcatatttttgggtatgttatctcggtaaagaaactgcttttaagataagtacaaaaaacagttaccagtagttagatcattaatcccacatgttataaatatgaaacgtggagatcgttcacatttcatgaacgagtatctagataagatctaaaggaaataacagtcattcctaaaaattctataaatagggaaggacccacggagaaatgatggtttttttgggaggacaaactcttgagaaattaagtattaaaaatacccaaaaatatcttgaatccagaaatactataaaggaataatcagaaataataacgacttgtggagtatgtagattttaactataaagtgatgtaaaatttctttttgtcttatttatatttagttattataaatattttaattttatttataaggcttcattattattaatgaatttttgtgctaacaatttggtgctttcattgagagtctttgtttaaaaattaacaactcgaaacacatctcctcgatataatcagacttcctcgtcatggaaaacactcaacatgattaaccagtcatggaagaagagacagtgcatcgatcaggaaaagagccccaaggaacacatacttaaaatagaccaaaccaaggaaggaatcccattgaaaggaactccggaagagatgaccctgaggaagaaattcccgagagaagagattcaaatatgtatgaccccatgaggtatgtcccactcgtggagttagaaaactgacaacttcaacaaagactcgcgaaatctaatcaaaggaatgaggagttagaacgagctatggttgcggccaaaacaaccccaaatgatgcatcatcggtacaagaagaacaacctgtctgacggccacgaggaagactacatgggtcacaaaccagaggggcacgaagacccaatgccacagaacaggagtaaaataaccccattcgcccctaggatcaacaactaggggaaacaaggaaaattcatatcgatgagcatgggcaacagactcagggtgccactactttgaggtaggcacgactaaggggtcaacagtcatctcatagagacggtgaaggtataaatgatcaaatacctaatcgatctgctcgccctccacgaccaccatgtggaccatgaaggtaggaaaggaacaataggtatacttatctaaacatggggcgattttccaatgtcatgacatcaagtgaaactattgttaggtttcctacttgctgattgtcttattaaacaatgacagagatatatggttatcgggttagggcatcgacattgccttattaggcaatgagatatatggatgccaggttagggcatcggtgttaccttattaggcaatgagatatatagatgttggggtagggcatcagcgttgcctcattaggcaatgacatatgtggatgtcaaggtagggcaatgttgccttattaggcaatgagatatgtggatgttgggttaggacatcagggttgtcttattaggcaacaacataaatagttattttataaagtaacatatacgacttagtcttattatacaagtgcttgagtattactgtttaattatgttatttatcctgatttagatatctggctattatatactttcattgtttacttttctactaagtctttgtgactcacaagtgctttgtggtgcaggtaagggtaaggggaaactagggcaactatgagacgacagtcttcttcggcaaacatacatattgacttatccgacttgtatggtcaagttgtcaaaggttgttttgggatgtacctaatgtgtattttgacttactgttgtatatagcctttttgtaaaacttttgtaataggggatccccgaaacaagtttttagcaatgtcatcctgttcattattatggttttatgttggtgaagtttttattattatcacaaattttattaaataattaacctattatccctaaactatgttccaaaagtacatacgtggcgtccctagggattagggtgttacatcgtgtgtatacttcacagaactgattgggcagtgcacttttttggagtatctttccaacttgtagaagacagtcttctccttgtgacccctcatgggtggagatttaatcttgtagaaatataaatctccttaggtgttggtactgttttcttgtgccacgaacacaaaatgtaccatccagataggagatggtacatatgtggtataaactggaagggtgcaactccagctaccgcacagaagttggcaaagtaacaccttggcagaaggtgtgcacccatctccacatgggcccaactctaaatgtcgaaacccccaatcaacacatttgtttagtttctctgttgacggagaccctattccagtacaaccccggaacactttcaagcccccgcaaggtctcgtatttctggaggttactataaatcttgaatttattaatgtactagtccatttcccatggactgtcgttcaacatcaattttggtgcattctcctgctccattaccttgtattctagttcaacctcttctcgctggaccttcttggacgtgatttctgtggaaagaaaatcaagcagttagctacccaaactacctaatatagagaaggagaaggggaatcctcccccataaagtgcttgaagaggtccttaccagattcactatctagaaacaaaaactttcagggctcatttgttccaaataggaaatcaagaacaattcatgtgaagaaaaatgaacgattcagatcgtgtatccaaaagcacaaatatatcatgtggctcgaaagtccagcaaccaagcatgtcaagcatttaatgcccctagaaccgaggcataaatcaatgatgaaagtacttttcttaatttttgcgccaataataaacaactatcaaaataaaagcttttcaggaaagcaactcttttgtaaacgtactcctccaccactagaggactgccacgcctgcttcccaaagctgaagatggaagtccaccttccacgatctactagcacttggaaagcaataagaattttacttttaacctccacatgtctactcatatggattggagcaagcttccacaatacactgttgggctttgagccctaaataaaactctatttcaatgtaatcttttctat

SEQ ID NO: 382362 - DNA, 967 bp, Cannabis indica
tgagctagccccaagtggttatgcaaatatttctcttcaaaaataaatatagccattgctcttagctggctcaatatcatacacaaatagccaaatgataaaagtaagatctagtcaaaataattagtggacaccatgatcaattttttgagatgatcacaaagtgggtacgtcctaatcaagtcctcagttaataaaagttgagttatgtttatatatatatatttatatatatatatatataataataattttgtcaaaaagaaggctgcggctttacttcaaaacgaaatataaagtccaaaagaaatctctttggcaaatccaaatggattttttctttctttttcttcttaaaaaaatgttatttattgcaggttttggttttgtttttaataatatattattttgatcatcaaagtttaatgtacgttgtataagtttaataaaaaaattgttcgaccaactcaatagttaatctaatagttatatattgtatttgtataactttttgtaaacttaaataaaaaacttgggaccagatcatagtgcttttccaaataatcatggaaaatccaatccattatgatcattactacctactttttcttatgtgtaactttccaatgtaaattagtcagccatgtatcttaactgtggtgccaaattaatattctctctttctttaatttattgatatgttttttttttttttcctttcaaagatgaaatcaataatcttgaaattggtggtggaatagatcgaatgatcaagatatgtttgaaaagatttggaaatccattatatatgtggaccaacaatatataattaatttcttttgggattatttaccgaataaaactttaaaacactactacaaaaaccccctttagaggcggtttttaagccctttcagcgtcagttttcgcgaaattcgctaccgacgctgatcagggcgacgctaaa

SEQ ID NO: 382363 - DNA, 827 bp, Cannabis indica
ggtatatctttggtatggttagcagatggtagtgcccaaaggaaaaagctagccgacattagcaacttacagcgccgatttaatccaacaaatcaagatgctaagcctaagcgtactacaattactgctaaagaatatgttgaaaagctccacaaggtataatgctccgtgttttttgaattgcagagctttccataggctctctcagggaaattgattatgtttaatttggctgatcttatatttatacatttttattttcaggaaaatacagaattggtgaagcttcttggtgacagaaagtattattttcgatcgaattctccagataagttctgctcattatgaattgtttcctgaaattggttgtctttattattggtttacagtaaacttattgagctgagcgcagtagaaatacagaaattgagaataagcattcagaaagtccagctacaaaatatgcagcttgcccaaacaaatagccaaatgctggcggtaacattatagatactgatattttgctttttaagttaatctttctttgaatttttattggggcttaagtttcgcttcaatcttgcaggagcttaattcaagtaaagatagggtaagattaatgcaactagttgatttattcaaaaacatttaggatgtggttagcattacctgtttattctgttctttttcagttgagttgaaattactccagcatgagcttcaatgcaaaaacgggttactcaaaagccagaaaaatttgaggcacggtctatatcgatctcactttttctatgctatgctatttgatcggactgtattgctgcttt

SEQ ID NO: 382364 - DNA, 1014 bp, Cannabis indica
acttgatccaagtgacttcatctattaaggaagcaagcatcctgaattttgcctttgtgacaaaccttaaaacagtatgttgtttcttggattatcaggtaatgagattataaccaaagtctaggcaaaaaccaattttggatcttcgatcatcaggttctgcagcccagtctgcatcataaaaactaaccaagtctagagaatttggtttggttaagtgaagaccataatccaaggtgcctgagaggtacttgagaattctcttcactattgtccagtgagattagagtggattttgcatgaactagcataccttattgacaatatatgctatctcaggtctggtaagaactaagtactaaagagcaccaacaatagaactatagaattggagattttcaatagggtcactaccacagacaatctcagactagatgtcattggggtagattgaggattggaaaattacattttggctcgagctaatagatctcttaagtacatagtctgagaaagatgcatgccattaaaagtatgaatgacttcaatacccaaataataatgtgtttatcccaagtgtttgagagagaaaatgttatttgggtctgaaatgagagatttgatgatggagggatggtttctagtaactagaatatcatccacatgggccaatacttgagtagtttgaccattggagaacctgaagaatagtgagtgattttctatagaggaggagaacccaaaggaaatgtgtaataccctggaattaagaaatggattagcaaaattctaattagataattgtgaataattgaggaattatattattatatagttcaatttatgtgaattaatatgatttattatatggtaagaccccgttggtgagccaggggcattttagtaattgtgacccgagaagggtaaaatgataaaattaatttaattacgtgcttaatggaactatattattatatagtatacctgtattgtcttttcaggtgtgttctgaca

SEQ ID NO: 382365 - DNA, 769 bp, Cannabis indica
tttttaggctgagtggcccctaaacgtaactaataaattgtgtgcagagtacaataaatattattagtgtaaatttttcccactcaatcttcgtaataaaaaataatagcatttgtttagacataaatataaaaattgtggtgtggggaaaaatcttattgaattcacatgggaaagtaagctaagcacaaaattattggtgaagcatatgggataaatagaacaaaaatggtcaaaaattaaagcatgaggagcaatatgaaaaagttgtaagcaatttggacaagcaagtaatgatttttatatagaagttgaaaaaataaggaagtgttaattatggactcaacttatttggaaagtttactttttcctcatataattcttcttaatggctggtgaggttttagttggcaattttgacaattcagttgggaagtttgataaaatattcatctattaagtttaaattttttctctaaactaaagttaactaatattggctaattaggccaacttttgtatcctaaaattatccctcttattttttaaaacattcccacctctctccttcctctactctctcgctctcttctcggacttaagggtgaacaaaatatgggccaaaccatttaacctggccaacctaatctattttttgtagtagagggttatgttaagagcaggtcatggcttattgggttgaaaagtgatcaggcccggccctgggcataggcgggctaggcctgtgcctagggcccacctatcccag

SEQ ID NO: 382366 - DNA, 3528 bp, Cannabis indica
aggcacttcagaggcataggctctcaatgatgcttactaagttttactactcaattcatgcataccccttttctctctttaactctcctatatattccatcctgttccccactaaagactaccctcacacaatgagttatacacccttttataagctatagtctacctcatcctaatcatgggatctaacattattgctcatccaaatttcaccttctcctcaaggtgaaagataatagctcccaagttatagccacattttgtgcccgatctttgtcaaagaacggtgtatttcgagaggtcttggatgcacaattggattgtaggagttgcgtctggtgccctttataaaaaatccaaagctggaatcgtactagtatagctccaaagtgccagtctgcaacaatgaacgatatctgtgataaaaaaattagagtagagagaacttgagtacctctctaaagcaagaccagcaagagaaaatttgtcacccgggtgtcactgtgtcctttgtcaaagctgcctttagcctacaacaccaagtccaactcgaaacggaagctaaccctagccaaatagccaccaacaatctctttgaattgcataaattaattccaatgaacacaatcaatggaggaaaacttaaacttaactcagttaaaaaatcgccttaaggagaagggagaaggctgtaaaacttgttgatggtgcatagtgataagcaccatgtaattgttcatctcctattttcccttagtccacatgggaaactcgagaaggctgagtgcgacatgttgagataaacaagtagagtactagggtgaaacacgcaaatggggcgagtctgaatcccatttggtgggcccatgatcgtggaagataaatgggccaatattcatgtcacatgaataaagcctgatgctttggggccaaactggagtaagacataccaaaggatgaatgggtaatgtttgaaacaacggccagtgggttggacttgggcatcaaatgatagggttttattgaactcttgaagaagatcagatgaacgaaggtcttttccattgaaatgacttgcgacgacttctctagctctaataatgtccatctcgttagtggcaacctcatttcaaaaacattgcttgtagcccccttcaattctgttagcagccttggtttatattcggcctgaaaagaaatcccttggcaacatcagaatctatttggttccattgaagattgatgctctaatgccatttgataagctctgatcctcctggtacaaatatagagagaacttgtgtttgaaatgagactggaacagagaattacaaagctaagcaccctaggcattcgaaaggcctaggctctccatgattcttgctgagttttactactcaattcatgcataccccctctcccttcgaaactctcttctactatccttttccccactcaagactacccttatacaatgagttatacaccctttatttgctatacgataccatacctcacccatttcttcacggggctaacaaaatgctcatcacaaaacctaattcaactttgtatcttattattgtactgaaacttaaaacttgatgaatgggattcaggtatttctgaaaatttttgttaaccattcggaatgaatattgaatatcctaattgttaacaacaaaaagtggaattaagtactataatttggctatggcggatgggtagaaaactacaaaattcttataaaaatttgctttgtttgcttcaataaattctgtatactgtgaaggggatgaatcaacatgaaaattgattattcatatgtatgtgtgtatgtataccattactgatattgtgtaggtcttgaaataggctggcaagaacttttcatatagtaatttctctcgtttcttctttttgatattttttttgggtagtgagagatggaaacatttcgcaaagatttttccttaaaaagacatttaagattgctcataacttaccaaagatttgtgcacatgactgataatcaagtcaatgtataaggaggcaggcacttgcagtgaacatgagtatttttttctgctattgattgttatcatttgtttgtaatatcattgcttcgtttttgtaactggtttaagtaattatcttgatttatttgctagcttactgagggctgtatatttattggtaccaactgtttaatagcttagctctcccctgatctcatttctccttttatggttgtagctgtctcccagcagttgcaggagtatgagcagaagattttcggatcaatcgataataacactccagcacaacccattttccagtctgttgctgcacctctgttcaacataggctttccaaaaatcaatgatccacccccggttcccactttcaatactgtcagtgctccctccatttttgagcgtcagcctacaagtattcctcctaatgagttcacatttggagcaatcccggctcaaaatgatattgcaggaggccctgccaatgctaatccgccaagttcaactgcaaatgatattcaaatggatagttcttgatttatttatttatttttttttgtaacttttagttgctggtattttaatacttattgaagataaagcatggtcagaagttaagtcctgagttctatggatttgaatgtaaagtgggatgtgactgttttggtttgtaaggtttgatgtggtaaaaatccatgggtaccttgatcatctctcattctcactgtcgtctcgtcttacaagggcaagaatttttttttcgactcttgtgcttatacaaaatgtaatttcctactttagaaagttacctcttttctgttcattgtacctttatttgatttttgtttttgggttgatacgatgagttattggcattcttgtataaattaataatgaattaacgactacgagaatcgattatagcatgtactgttcagatatgacttttgtttaaaaaaataaaaataaaaaaaagcctaaattacacaaaagcagtgcgctggtatgttgtagtctatctctacagaaccaagtcacattagaatccagagcccatttagcaacacaatcagcaacttgatgatagtctgtagaggtcttaacacccaacaattgggaagctaaactcttacaatctgcaacataattcacaatggcccaatggtaataatagaatcaattatgggcatctttaatggtaatattttggagaatgttttatgaggcgaaaaatttaggtgacaatatataaagatgctatactattagagaaaaaaaaaaaatactatttttaaaaaaaaaatactattttttaaaatttgcagtgataccacacaatgacattattaatgatatttttttcttttgcaatatatatatataatactttaacaaaaaaattatttacatatataataatggatgagatcacaattagtatttatttttaaaaagtatttataacgtttttaaaagtaagattactaaaaat

SEQ ID NO: 382367 - DNA, 774 bp, Cannabis indica
aagatttgtgcagtgcccttaatgaagaaactgatattcgtggaataatatgctctagtttgcagagtcttatcttacagaataaaaaaattctggaaaataagaatgatgaatctgatttgaatgacactgaaccggctgcaagacaacgtgtgatgtcttactacaccccacatgttgcagcagataacttaagtgcgttgaaggaatctgctcgtgacttattgcctgttctatcaactatttttctcaaatctagaaaagatgatggaggttctttgcaggtacttgttctatctctttgaaacatttggtttgtttgaaccaaattttatttgtgcttgatggcatttatctgggccactggagatatccattttcttaaagcaaaccattaactcgtgaagggtaggacataacaatcatgttgccaatgttttaaaaggtgtttgaggcgtacgccttgaggcgcgcctcggaacgaggtgttcaaaaaacgcctttgaggcctcagtcattgtccatgaggcttactcctcggccttgtgaggcgtacgccttgaggcttaagcctctgaggcgtgtgaggcttatgcctcagctaattgagttgttttgagcctttttttaaagagtttaattgagttttttttaaagagtttcagtgggcctttttttttaatggtcagtgagcctttttaaaagagtttaattgagctttttttgaacttttcttgggctattttgagttttattttgtaaattttaaaagcc

SEQ ID NO: 382368 - DNA, 2697 bp, Cannabis indica
aaataaaaaaaaaaattatataagcttggaaaatatatttggaccaaattccctcatcaccctaaaataaattaattgtttacttaaaaacacaaaattgagtctaattataaattcaccaaaatccgtatatatacgcgtaaagactatatattttattttgaattttgattttatttttcaaatttagaaatctttagtttgatatattaatttttgtaaactgtgttgatacaaaatcgatgcaatttgattttggaataagaaaattttgatgcaacatcggttaatttgatggtccaagtaaaatttgattgaataaaatgacaatttcagtgcagaatcgatatcaattcaaccgtgcaagtaaaccttaatcatttttggaagtcaatttcggtgcaaaaaatcgacgccaatacaatatatatagttccatcaaattaaacttgtgttaatagctagtcaatatatacatgagtatattaaataagtgagcattgctattgggcattagtagtgtctagtacccttaagacgtgtcgtcttacaatttgccagcgagattccctaaaagctattatattaaactatatgagacccgatactaaattacaccaataacgatattgacacgtagaaaaatacttaacactacgggtaccttttagcatttctctaaataagttattgtatattattcttgctgttcactcaattaaggagcaaataaatgactgatctccccaagactagctggccagtttcagggtgaatattaaataaattactgtgtatacatattaattgttaaggtaagttttttcactctagtcctcactatacttttattcaatctctatatctcaccacttgttttttttttccttattctctacctaaacaaattaaggatcaattttggttaccaaatccatctttctaaatccctcttgcctaacctattggtagagcgtgtttgatccgaaggggcagacatttataatttggaaaaaatgaattccaaattatagtaccaataaactggaaaaagaaaaagttaaatccaaaaacatcgtttgtccgtttcacaaataagtatactattggttctccattaatgttgaaaagataacacctagctagctaatacatatgatgaattgaaaaacaaataagccctttttctttagttgacaagtgggctcatgatttaagaagaataaattaatgctccattattatgatcaataatcataagcaaataaaaaataattttataaaataaaataaaaagtaaaacaattggcttatacttggtccccctccccaattgggctttatatatattaaggttatagctatagattgccccaaagaaaagggcaaagccaatcaagattaatcatattacatctcgtgaagaacttttcttcttcttcttcttattatgataatatttatttctctgttgctcttgaagaacataacaaccaaacccttttttctctgattatccctttccaaatattattttccgatatatattgttagtactgtaaaaacatatactagatatgagtaacactatgatgccgagggttaaggtcatggtctatcttgtttacgataggggttagcttaattacctcaattatatatattacttttatatagtttcgatttgatcgatctcttcatatatagttttcaacatacatatatatataataataggaatatggatgtagtgaaagtgaaaaagggcagtttaatcaacaaaacgtgggagcgatgcaagtccttagggcgccgcggccgtgacaagtcaccagctgcagcaaccggtcgaatcatgacgaagaagagtaaatcgtgcccgcgtttgaatctgatcactcccgttacggggtcgccggaggcggaaggaggtgatcagattaatattaataatagtaataattattataagaaagtaaagggctgtttctcggtctatgtgggaccggaaaagcagaggtttgttgtgaaagcagagtacgccaaccaccgcctcttcaagctacttctcgaagaagccgagtcggagttcggctacgataaccaaggccccattatgctcccatgcaacgttgatgtgttttatcgagttttgatggaaatggacgatgatgatggtggtgataataacggcggcagccttggcggcgcagccgattataagattcatcggcctggctgtagcttcgtgattaagcgccacgtcacctcttatcagcttctcagcccttctcgcatggtggctattaatcagttttaattagttattacgtactatcacgtcatcgtcatcacgtcggtcattatatagtatattttcctgtgtaataattataattggaattttatgttataaataattgtcttattaattatatatgatatatatgtgtgtgggcgcgtgtgtgatgaagtttggtgtgttatatattacgtgtgtaatagttttgtgtgttttgttgttttgtaatgaaattttcgagaggttggagattttattataatagaagatagtaaaaatatattataattctattcttaaatagtataaagattaaaaatgagagatttattaaatatatattataacagggccggctctaggcataggcgggctaggcccgtgcctagggccca

SEQ ID NO: 382369 - DNA, 3092 bp, Cannabis indica
aagttaagtttggcaacatattacaggtaccaaatgctatttatccgtaaaacttaaagaggaaaaagacaaagaagaaaagcaggggccgatgaaaatggattgcattacaaagggcagaggccgataaagctgaattacaaagtttaaatataaaataaaatgtttcccataatcagatgatcaaagcaagctctgcattaattctgtgcatcatttgattaacggatgctgcaatttgatccacagtattcatctggcacccttcttcaacctatataatccaattaccacaaacaaattagttagccaaattaatactctgttatataaatttatatatacacacaaatgattttaagaaagaaaaagaaggaaacatttagactaaccttgacgctaaaggagtagagtaccatttgctgaacagtgatgacattaagatgaagaacagagaggcgaagtgctccgagacctgcgaccatctttaagagctgtctcggctttttctttgacaatattttaatattggcatggcaatcgaccatggtcacttctatgtccgccgcagccctttggccattttcagatgagttgttgctgaagtagtactggttcgcacgtgtggagtattgtgggaaagtgaagaagtcggcaaatggagaagaagattgggaataattaggactaggagaagtggaagttgatgaagaggaagacgatggtggagatggagatgtcaaaggtaaaggtaaagaagatgaagaatgagaaatgttagatgaaaatcttccacaatttctgatatcatcttcatgatcgtcgtgctctacttttgttctgaccttgtggccctccattgactgcaacgactgttctagctccttcacgaaattaatggctcccccaataattgaagcttggtcaccctgttttgaaatttagaattaacacttggatgcagaaatatttatattatacaagccaaaatggtagaataatattaaactgaccctctgaacataagacgagggcattaaagatcggagtacagcaaggtactcgttcatctgtttgcggcggtttcgctctacagcaatgtgggtcatcctctggatttcgagctcttctttgttcttgctgcctcttgtacggcgtcgttttctgcgcccgttttctgtggccggagggtcagcaatggggtccataagatggcaggggaatgacgagggaggagattgatcaagtggtagtggttctggtggaggagtcgaactcggaggctgaggtggtcgacagctgacttcaggagacgagattgaggattctaattgctccgttaagctctgatgaaaaatagcaggaggggtagagtattggtggtggtagtttaaatttgcatgaattgtttggtccaatataggattattatcgaaaatcccaacaagggatttgcgttcttcatcttcttcttggaggcaaaattcgtaccaaagattattagtattattaggagctaccatagaggaatagaagtccttgaagacatagttgaatgtgtcttgagaattatacaccacagtttctaaagccatgttaataatgatgacgatgatttctcgacttttttcagctaaaagtttcctttctttctaataatggttcagaaatgcataaagggtgtttggcttttgttgagaaggaggcttaaagagagagagagagtaagaaagagaaagaggtgaaagctgatgaggagatgtgttgttgtgcttcctttatagaaacccaataagtgagctatatatagaggaaaagatatgttgaaatagcttaattacaagacagaaataaaacccaaagcacaaggcatttatgatatatatccttaatatcaaacaaagtgacccttttatctttcatacacctctcccttgatatagtcctaaacctttttcttataaataaaataaattaattaactcaacccaataataataagaaagcgaagctgcctacagcatgttgcacgtgagatttcactgtagaacagttactatcgtagaccagaggagagggggagagagagaaagagagaggtgagacaagcagattctcttggttctcttgtggaacatagtgagtatataatactataatgattctcatttcaataatatcaagtcctcaaaactaacgaggaacaaactctctaatctctaccaaaacaccttccaatgaagaaagaaatgctacataaactaaacaaatgaatcaaatctaacgggtggggcccttgtataatacgtacggccccataagaagaaaacgtttggttgggtgcggggcccgccataatcatatatactatccttattttatgcgaggaacagtaacaatcagcatttgtgtaacagaatgtttatatatataatataccgattgatctaactagctctctattgggttaatagtaggttctcgatcgataaaggtgaataggactttcaaatttcatgtatcatagttggttttaaatattattgttatattatttataaataaataagtaatataatattaacatgaaattgtcatacattatattatattattgagagtgtaatgtatattgggaaatttgattgattatgcatttgttatactatttttttaaacttaaaatatttaatattggtagaatatctcattttttcctaaaatctacccctctcatttgaacaattttctctctctctttcctccttctctctctcgctctatgtaaacacgcacacggagaagtacacaatcgacccacaactcaccacccacaaccttggttccttctctccacgaccaccatgaccacaaaccaaggacccgcgaattcaatgaccaccgtggacccaatgacttctccatcaaccacagtttcactatcggcaatgttgtcaagggaataaattgtatgattaatgtttgtaatatgtgagtagatgttagatttagggtcgaaaattaccatatttgagttttggacaaaaaactggttttttgtcaggcccaatggtggtccgataccttcctgt

SEQ ID NO: 382370 - DNA, 3117 bp, Cannabis indica
gatgttaataaacatacttgtgagtagatctaagatcctggtaaaataatttccaacaaagtcttcccagcatgaagactacatactgctaatcattaagcactacatgaggagcaaaagagagaggccacaggggtaccacctcgaggtgagtacctaccccgtgaccaagtaggtcaaatggtaacgttatatcttaaggagtaccctcactttgaccaacacatcaaatactctcccatcattcaagtctcgcataagcttaaaggtggttaaaaccccacgaaaatagcgggatattcccgtaagagtcagacctcaaccaacttcaaaaatcaaggagaatgttgagatatttttgcaacaaggacgtgtctccggtagagagacgcaccaacccttcccctatgtaaggggtcatacatgacctggggaagaattctgaatttttttacccaaagagcagaaactctgccatttttacttcttgcattcaagagcctattcttgattttgcaacttcgatcaataaaatacaaggggagtaggctattaccaacacctggggtcaaacctctttaaagtttggtgttctttattagcatttattatgattttagtttaatttctcatttattatgaatctgcatcggttggttaaaaattcaaccaacacattttctaagtcccgtattaagaaagtatacttgtaacgattgcatatttagacatgaaaattagtactgtgttattaatttaattactatttcatgattatttatgcattagtagaaaataagtcctcagatttaggagtgatataatttctcaattatgagattttattgaattctaggtgtgtcaatggggtgttcattggattacatccaatggatttggatccaaccgatctaatttaattatttattagatattatattttatcatccgatccaatctaatcaaattgagtcatccgatttgatctgatccaatggatgtattagattggatcggttccaactattagatgcattaattggttttcctattagattggattggattcatccaatctattttagctaccatttaagttgatttcattaaaatatttataaaaaataatttaaaacctaataatctaacatacataataaatattagtttagtccaacttaattctcatgatcacataataaaacagctaaaaaataaaacttattcaatacacattgataatctattagcgtttagaaagatgagaattaatattttagatctaaagtttttttttctttaatctcatgtgttaaatatatattaaatcaataaatatattaaatttcattaaaatatatataaaaaataatttaaaacttaataatccaacatacataataaacattagtttagtccaacttaattctcatgatcacataataaaaccgctaaaaaataaaacttattcaataagcattgacaattttattagcgtttaggaagatgagaattaatattttagatctaatatttttttctttaatcaaatgtgttaaatatatattaaattaataaacatattgtttaaataaaatatattaaatatataaaattataaatgtaattaaaaaatatataaatataattagatgataattggatcggtttgatttgattatccattggatcgaatgtcccatccaacaactgaaccaatccgattagatttttaaaatttacatccgatctgatctaattatgattggatatccgattctattagatcggttggaattagattggtcggttgtaattggatggatgactttctgcacacccatatgtgtcatgcatgttatttataaattttaatattcatgttttatgtccggtaacagtaaaaaattgaaggtttagccattagtgtcactttaatatggtttagtatttaaaatttagtggggcaagatttatagacattagaatatcggggttatgtggggtaattaattatgatcattatacccctgagtttaaagattgcttaaaggggaagtaagagtattgtggtaattttgtcacttaagccttatttggttaataattaatttagtggattttactgtaaaaaaaaattatgctcattttattaatgaattaagagataaataataagataaatacaaaatcatagccacactatctctcctcaacctctaatctcatggtcttaagaaacctcaagaaccaagatttatttagaccaaaatcctccatcttttagccaagaaattcagttaagaacctaggtgaattgatagctaactcaaagtaagctcttgccctctttattctctttgaattttgcagtaaagcatggtttttttatatggaaattgtcggttaggttctgtagtattttgttgggtttgtaattattttgttggttgttttaagttgagaattatgttgagtttggagaattgtgaccgttgtagtcattgaaaccaagttttgagctttagaaactcaaagcttagtctccaatggtgattcttgattttgagctttatggttttgagttgcaagatttatttagaatgtataaatttattgttttagaaagtttgagcaattttagggtagaattaaggaagaaaaactgagttttgtgattttgcataataacactgtttttggataaagagttacccgtttggaaattcggttactcgtttggggtatttttgtttggatttatgctctaaaagcaagtatttattggaaaatatattagagaatatatgaaaaacaaatataagataaataaatattttaattatagaaatataattgatcaatatctaaaaaaattatattcatatagatataatcttataaggtagtacaagagaactaagatcatataatatgaataaaataagtcagtagtgtattaaaataaggaatctttaatatgaaattaccaagtacggtttactaagcactatactctagtggatgtaattacatgccgtttatcgtaaaagagttattcatatcacaatgatgatcattagtagatcagtttgaatcctgagtatacatgaactc

SEQ ID NO: 382371 - DNA, 5185 bp, Cannabis indica
gtagtgatttgatattgaattgacacagataattatatatatatatgtaacaattagtacattacacttttagtgtgctttctgttttttttatataagatctacactttttgaatctaaatatatatctgactaataagctattttctctgaatttgaatattaaatatgtagactgtttattttttacacatctaaatatattttttattagtcctttttttagagagaaaacggaaagtgtccattaataggtaaattagacaaaatccattacatgaagatctaactcatagagaaaaaatcatcaacaatagcctgaccaagttgtttacattaaactggaagaaaatgctaacaacaacttcaactaagggtctaatgaatcactgacggttaagcatcaaagaaatgtgtagcatactaaattaacaaaatgaaaatctatgagagtttacctatatatcaataactatcagccaatgatattccaataaaaattaagaaataacaactccattatattcaaataactcgaccaactatattgtaacacactatcaaagatagatgtacaaaacataggaccaataaaatttgaaaaaaccctagccaaatctcaaaatcagagagaaagaggaagaaatccctgccaaaacgaaacattgaatccatcgatgaagcatccgtaatacaattggatccaaaaccataatctttcatcaaaacaataacaaactggtgacaaaatacagttattatcaaagctaaaataaagctaagtaaggttaaaaacaataaaaataaaagctaataataaacccacaaacaacaactaagaaaatgcagagaaagccatatatccttaacactcaaggtcactttagatctgaaaatccactgaagcccttggaactccaatactgaagccctactaaagccattgctgccctcagtaccccgatgtagcccttcacccttaccagagcgaagcccaccagcaagaacgaaacccacccaacccatcgagagagataaaaccatctctcataattgatagaagagacaaagtcatgggagaaaacagccctcacacagaccaccgaagtcgctctcagcatgtgaaaccatcgacttgacgaaaaatttgagaatccaaaaaatcctaggcaggaaaagagggacacatctagagaatcactgttgtacgatgaacccatcccagaccagagtcacacctacccaaaacagggtcggtggactctggtcggagaaaaattcagagcccaacgaagtcggacctatagatattttagagagataattatgtaatattaactaatttattaaattgtattttcaaaagaattattcaaatacaaagtatggttagttttaatttcaaattaatatcaattgttttcaattctttgatattgtttatatcatatctattataataaatttctaactattatatatatttataaaatagttttattttttgtttttcttaaaaaaaaacatcttatacacatataatatattttttaagatgaataattgtgaacccgtgaggatgaaactttttgtgtcttcaaagcatttctaggcgcgttataagatttttgcagacgcataattttagtgcatgtagagaatcctaaatacccttatgttcaattaggtattcttcctttctacaatagtttctcttttattttaagtggtcttgtatttataagttagggtatatacatgatgtaacagtttagattgaaatgttcctagttaaaaattttgccaaaaaaagtaaattttatggtgaattctcaaatttatataaatctataatattagaaatttttgttaggaccttattcgaacaatcaaaaaggagaatttgtgtcggtaaacgcaactggtcaattgtattgaccgacacaatagaggaagagagaaatggagcattgtttaataatcgatggtaataaaaaaggtttgtgttggttactaattagaagtacacgtcaaaacctacgacagtaaaaggaggctttttaaaattttatttgatgtttgcgttggttggtaatggtcactaaccaatcctgcgactgttaagaaccgacacaattttgcgagtgagattcacagacacaaatctccaatttttttaccaaacccccatagaccctgttgtgaaaaatttacaacgcaaatatacatattgttgacaaataataataaaagtagagtatcaatctcacatgaattgttatcactaattaccaattattaatttttaatttctttttgactattaagaatttaattttacaagtaataataaaaaaaactaaagttaacaactagaaaattaagaaacaaattacacaattaattcaatgaataaaaactagagtttttcatcatttgtccactctatttttcattaatacaatttttactattcttcttcttattatgatagcggattaataatggtattctatattcttactaggacatatagatcttaattacatgaaaaaattctacatttttgggatgagtaagaatataataggcatacgtaaaacaattttgaagctatacaaactatactggtacttttgtccaatatcaaaattcatgtctattcaactatagcatatttaactgtcactttttaaattttgaattaaaatcataaaggtgcccaagcatccacaagcattaaacaaattgaataaatcacaatgaaaaagaagaaatcataaaaaaatagcattaactaataatagagtatcaagagactatattaaaacctagaaaataaatatttcatgataagcatattaataatatcaatcaaactaaaattaaaaacaattaaaggaagaaattaaagaagaaaagaaaaaaaaaatcttgaacaagcctccaatcttcattattcctagcctctaaatatttttatgagtttctcaaaggtaaaaaaacaatgaaaaatcacacctaaagatttttatatcgtaaccttagtaattttaggtgaaaagatatctttgccccccctaaaattgagttttcataacttgtacggatgtcatcgttacagctcttcatttgggtgtcgtggctctaaatgtgaattttggactctaacatcctactacaataactgaacatattttggtcatcactctctagatataactcagaattggatgattcgagatgttatggaaagctgaaagaaagatatataacttctattcacaatgttcttgaaagtgaatggatcatagtcaaaaattagattaaaacttcaaacttgatttttaatcacaaatagagcgtgttgagcatcccaaacttataatttttcactcattatatcgtataactccaaatccatgataaattcaccatattaatcttttaaagcatgtttcttctcatttaaacccatatgatgtacttgaccccaatttttaagtttcatcgtcagtttctgtggatcgaagtaaatctagagaagataaaggctcttctagaatagcagcatttagcaggtttgtgtccaaagaaactgacaaatgcattatgtttttaacatccttgatggaagcaaaaagtttgaatggactactgagtgtgaagatattttttagaatctaaaggagcatctagttaaggctcatgtcttgtcaaagccggttgagggagaaccgctatacttgtacttggtcatgtccaatcaagctatcaatgtacccttagtgtgaaaaaaaggaagggtacaactttcagtatattatgtgagtaaaagattgttgagcgcggagtctagatacctaatgattgaaaatatttcctattgcttgttgattgcttcaggaagttaagattatacttttaggcccaggccttaaaggtacttacgaatcagcccctccgaaaagtcctctagaagctggaatcctcagtaagactgttgaagtgggctatgaaacttagccagtttgatattcagtatcaacccaaaagtttctatcaagggccaagccctagtagattttattatgaaatgtataggaactaatgacaatctggaagagtgagttccaggactggttttctagaaggcctacgttgatagagcctccaatgagaaggtatctggagcaaggtctattttaatttctcctcaagggcaccaacttcagagagccctccgctttgaatttagagtttccaataataaagtggagcacgaaacaatgattggaggcttatacttatctaaggaagttaaagctaaaaacgtcgaagtatacagcgattcctaactagttatgaaccagatatctggagagtaccaaacgaaatgggagacaatggatgcttatgtatctcgtcttatttttgtggtactaaatcatgtacatagcggaataataatattttattataatcgtaccacatcccaaggatcaccacatatatattatatctgaaataaaaagatgaaaggaaagatgaagcatctatgatctgtctcacacatggctttaaatccttgcattccgagtcagataagtcgccactttgctttcggaccaaacagtctgtaatttttaacagagcagctatctattcttctagccatctagtgttgtcatctgggagctcacgtccacgaattctgtcattgatattactttttaagtctcctccacaaggccttgctttctcatatattgctttttcccattacacattcagacggtccttgaagtccaccgttgacatgttatcttcactacaacaaaagggactttttgtcccatttttatatttggaaccttaaacaaaagttaggaacaagggccttatttggaaattgcacaaaaaagggtgttggaaaggaaatttttatgcatttgccaaacgcaaccttagcattttaagtgggactttttattccagtggttttcacataaaatctgggataaaaagtcccaccccctttttttatagttgctataacgcacatttagatttagggtttcattttatatgttgtcttccaccactctctctctctttctccagtttgtaagcccctctctctctcacttcatgttctctctctgtcactctctctctctctctc

SEQ ID NO: 382372 - DNA, 1627 bp, Cannabis indica
tttctcaagagagattcaagcggagccgtgcccgtgaacttcaaagagaccaacatgctccatatgagggcttaacagacctaaaataccatcttgatggctttaacgagataataaaaatgaagagagtcataagcaaagcgacgtgccagtgcttcgtggtgacgctcaaaagggcagcgtacaaatggtttaaaaggctggtgtctggatctatcacctcttggaaataactcactgatgaattcctggcccaacatcatgcatctagaaactatactatctctagaacaagcatggaaagtattgagcaaagagatgttgaaagccttaagagtccaacgcttcaatgtcgaagcaaccagggtaggaaggctgactaagaatgagcacaagatggccatcgttgcaggcgtcggtccaaaaagtaagttgtggaacaacatgcttaagagagaattggaagacttggaggacttctatgaaagggccaaaaagtatatccaggttgagggcgctcacgaaaatctcactaaggggaagagcgagcccggtgggtcggccaacccccgtgcccatgaagaaccatgaaggaaaagagagtttaacaaaggtaagaataactgaaataagagagttaggagggaagaggagccccgatgtagggagttcacttattacactgaaattacatgctcgagggagcacatcttcctaacaaatgaaaaccgggtgtcgttcaagaagtcggccccaatgagaaaagataggtcaaagagagaccctaacaagttttgcaaatttcacaaagacatcgggcacaccacggaagagtgtacccacctcaaaatggaaattaaggacttgatacaaagggggtacctgggaggctatcggagggagaagacacgccccgaagagaggggacgagaagagtaaggatgagaaaaccctcgcgaggctctaaaggtgataagagatgtttggactatctgtggaggacctgggataggaggagacactcgcaaggggagggacaggtacgccagggaggccagacaaccacctatggcaatgagcatggaacaaagatcgctaaaaaactcgaaagacgaaagttactccataaaattcactgaagatgatgcatgagggattcattttccccataacgagccactcgtactggcagtttaactagctaatgccagggtccattgggtactcgtagataatggaagttcggtagataatgcaactagctaatgccagggtccatttgaagccttgcacaacacccatatatagtttcactggggattttgtgcatcctctagggatgactgagcttcccctcagcgtgggagagcgacctaggcaagtgacaccgattgccaccttcattatagtgaaaagtctaacagttttcaacgtagtgcttgggagaccctcgctctaccgcttgaaggccattgtattcacttactagttggccatgaagttcccaaccctcgggggagttacaatggcaagaggtgaacagaaggaggcaagagatgttaactcaaacttttagatctccttgttttgatgattaacaaatatttgattattatttggtactaat

SEQ ID NO: 382373 - DNA, 1694 bp, Cannabis indica
tcacaatcagaataatatatatgtagcagaaagtcgaacaacataaagcagaagatatgcttaccttaatggtgaccttactcttcacttgggtttctagagcttctgtcatagactagaaattggaaaggataaacaaaaagtaagagaagaaaaaaaaggggtcacatttcgcaaaactgaaactcgaactggagtatatacaaactactaaagaaaccaagacttcgaaaacttgagatgggtcaaaccttgtcgaactggactagaacctgaatagcaagctcgggacttagtgtaccattttgaaccatctcatccaaagtctcagtgagacacatcccgatcgtggacctcctataaagctcgaatgtcgccattattcttcgttaaagcacacgatctgccatgaaacacacaaaagaagttgatgaactcaataacgttccaatcctatcaaaattttccacgaatttgtcgaaattagaacgaaagaaaaaaaaaacagaattgcaagaggaagaaaacaaaagactcacaaatgaaattgaggtaaagaattgtagttagaaattaggtagctacgttttgaggaaaagactcacaaaatcttcttaacgttcgcttcgaaatatgatgtttattattttttggagcggagaaaatttggggctttttataccctagcttttgtagctctgggtatatatagcagcgaaggatcaggagtcttgacataaatgacttttatacccctcacgggctaatcgccgtagaattagaaggcccaaataattcccatcaaggtccaaccttattgaggcccatcaacattttgccgtgattcccaaatatgaaaacttacaaaaatactgaaatttgggttaatttttacaaaaatactgtcatacggaaatttttcaaaaatactgtgtttttataaaacaccactagaacacaaaatagaacaactcaaaacaacagtagaacaactaaaaaatacaagtaaaacaacagtgaaaacttaacacaatatactgcaatatgaaagttataaaagaatacagtaaaaaagtaaaaaatactgcctgacagtacttttataaaaaaataacaaaaattagtatatcatgtaaattttcctaaatatttagaaaatttacactaggtactattttttttttaatttttttacaattttactgttcacacttattacttttttactactccatttatatccggtggtacaatgtgttttgtcgatttattttttgttccgttgatttgtacactgttatatcccacatttgtcctaaatgttactaattcaataaatgtgataaaagtaaacaatagtaacatttataaatgtcacctattcaatattttggtgttgtaatcaaaatcttcattagactatcttcaatggttatattaatttagtgttgaatcttttatttttggtacaataactctaataattcacaccaaacattacactaaatattccaccaaataaatatattttacttaaaacatcttgtattttatattatttacattaattatcgaaaataactaattcatgatataattatattatggctactagtcaaaatttaaaatcttaaaataattaataaaataaaatatttattaaatcaattaaacattacatatatatatatata

SEQ ID NO: 382374 - DNA, 1019 bp, Cannabis indica
aatgtacaactaaccaatgcgtacggatacgaaaaggtcattctaagttgtaatgatatgacttaaggtaaaaggtggaataaaagttatttaggctctattactaccataagcaaaaatactaaccaaaacaaactacccgactaatttactccttattttttttttacaaaatttacccaaagaaaattttaaaatactaagaatttctaatttcgaatccaacatctattttttttctctaagaattaatattcttcctttttttttttgaagaagaaaaactaagctaaactttttttttcttttagtgatgatggatacactttcacattacaaaactcttctcaatctcccacttcaccataattccactcataatacttcactcccccaaacttacttctaagcttatggcataataaggagcaattggaaataaaagttgagaatgggaacaactaagctcaaataagtggttaaaatttttaaacaagctaaggctcaaattgggcaaactagagataaaagtataagggtaggcttgaaaggcgtaaccggtctaaagaaaattgcctaaatcattttccaaagcaatagtcatcaaggatttcgtctcaagaaaataagtcattcaatttctattccattcacacatacataccacaagccaaaatagaacaaaatatgatataatccaaaaattaacaatttacatcgatacaatttttttcaataagcatccaagttaatccaaagagttaacagatcaagcacacggttagagatttcaatcaatttcatagattacaaaagcaacttaatcaatcaattttcatcggctcaattatcaacacagaaaaactaaaacgagacactaaactaattaacaaactaacctactaaaaatagagacaatagaaaacgtaaaaaaaaaaaaattaaaatccctccccctaaactaaagattcttattgtccccaatgtgacataatactcaaggtgagaaggacttacct

SEQ ID NO: 382375 - DNA, 3319 bp, Cannabis indica
tttttgaaaataagcgtaatcattcattagataaagcaaaagttagacctctcggtcattacaaaatagctactccagtaaggtggagatcaaaatagatcagtacaactagtgggtgaaagcctactttgccacattatgggcaacaaaattacaagatctactaacattaaaaaaaattacaacaaataaaagagggagatgacttaatacaaaatgagacatagttatcaagagctcaatggaactccttctcattgagagcattgatagctaatctcgagtcactctccactataacaaacttatgccctaactccatagccagcgaaatggccaaacagtagaccgcagcttctccgcatatataacacatccaagaaattcaaccgagccgtgtgaacccagatcaccctttagcatttcatctttgattttttttttcttaaatatcataacattatgttaattaatctccatgcctttttcttttttctttatcaaaccatcctttaaaaagaaaaaaaaaaaaacctctcaaactttgatacacatgattttttttttagaacctgatacacatgattaaacttgcattcatataaaatctgaataagatttataagtgattttttaattaaaattatggaccagaatgtaatatgaaacaattgtccattgtagtttttcttttctttcttaagaaattaagaaagtcattttttttcctccatgataataccccttttgaaattgaatttgaataaatagctttcatttttttaataaaaaataagactttatcaatacgaattgtccaacaatatacagttttgaaatcagagcacatagaaaactcaatttaaatacaatcttcagggaaataagaagctcgtgtgttttttttattattatttgaatacatggcttttatttttaggaaataaaatagtaatatttataaattcttttctttttgttttttgaaaatatgaaacttttgttaataggataaatcatctaatacatagccaatacatcaatacagctttgacaatcttgaatgaaatgaccaaaaacagaaagcatacataatgagctttgtaaagtttgaaccacaataaacagtccctttcaatcaaatatataaattcttttataaacatatagattattaatagttatatttataaattcttttttagtaagctgaaatgtgtgataatatctaaaaaacaaagagagtataaggaaagaaaaaagagataaggataagcttttgggggagaggaaattgatacagttctataaaagcttttttttggtaagaaagtaagtggtttttttcaccctcttgaaaattgactttaaatccaatcaaagaaaggaaaaagaaaaaaataataataattgacttactataaccgtatcaaataatgtaaaaagactattttggaaagaaggaaaaaagaaaaaatagtctccaaattgtagtctttttcatgctctccactaatttctttttttctttgaatactagattgatatcacaaaaagtttctttttttttttttcagtagaagttattcataaattaaatgcacttaatttctcatgataacatagaatagcattgatattgtaaattaattgtctactcttcatgaaaataataatgataaataataataatataaaaaaaaaaaatctgtaccatcaccaatcatatctctcaaaccagagaatgacatcagcagcaaagcaacaacaaccaatatttttctttctttcctttttttttttttggctagaaaccatgaaaatttaaattatgcaattaatttacatgaagacaatattaaagaaataacatttccattaattttgcaattaaaaaaataaaaacatgtaatgtgttccttaaaacaaagttctcctatgaacagcatagcttttgctccttggataagcatcatgagcagtagaagttgttcttatcatcacttgatcatctctttcttcaaactcatcacaagccttgtcttcatcgatccgaccaaatcccacacttcgacttttgggcaacttattagtagacttttgatgatgattatgattgatgatcttattattggctagagtccttgtggaagcagccttaacaagttccctaaaatcttgggtactattgttgttgttggagttgaccgagctggtgctgaagcttctcgtcagagtggtgttgacatgagccgttggacacccccatggctgctccataatcgaaatgacttgagcactgagtcatgctctttatgtataagtctctggccttaataagagcccttaaaggagctctcataatcctacccactttgctttctttcacacctttgattttccccatatgaaaaaaaaaaaagaaagaaaaccaaaattttctttgctatggaagttgttatgatgagatgggttttgagaattataagcagagagagagagagggggaaagtagaatactttagatgagattttggtgtgtttttttaagagaggcttttgtataggaggatatattatagtagtaaggacatgtggaactttgtcaaaatgaagccggattaatcatcattaaaataatattagggattgttaattaatattgttattattatatttctaaggttgaattttgtgactctaacaagaattataatactactaatattcatttttgctctcaaaataattaattgaaatccctttcaaaaactaaaattaatacaaacagataactacggaacaaaaataagatagaagaagaatggtagtctttcccttctaaattatgtgtttcaattgttttacaaaaaaaattttgtacaacttttatttttaaattttttaatcacaaaaataaaaataaaatttgtttttgtaaattttatttttaaaaaacaaaatgtgttatataaccaattttatatttcaattttaaaatcagaaaataaaaatgtgtactgtaaattttattttcattttctatttgaggtcgggtctgtatcctggggttcagggtgcaggttcatgagtatcggggtcaggatttgggtctaggtcgaggttgggatttgggtttaaggttgatcaggtcaggatcggggtttgggactgaggttcaattccgggggtttggggtctgggtcgggggttcaggtctgggtttgggtcatggtctgagtccaagttccaaaatttaggttaagatcgaagtccaaaaatattgattaaaaaaagattaaaactgtttaaaaaaaat

SEQ ID NO: 382376 - DNA, 4160 bp, Cannabis indica
aactaaaacaagaaaaaagagtggtcgagaaaaaaaggtgtgtgtatagtttgatgtatagttctatcttaaaactaaattagtagtattattttttttacacattagcaatattttaatactatagatgtggtggatgtggatgtgtaagaaggaagatagatgaagaataaggaagaaggaagaatagaaaaaagaaaaaaggaaaaagaataaagaaaagagaaaaataaaaattatggtagaagggagatgaaagaggaagaataaaaagaaaagagaaaagagtaaaagtgaaaaagaaaaagaaaaaggaggaaaagaaaaaaaaataagaaaagaaaaagaaaaaaatataaatataaatttatttaataatttttaattaattttaataattgttaggaaaatttattgtgattaattataatatttttccactttgtatgttaagaataaaatacttgttaaacactacaattagcaatataaaatattaactaaatcaccacaaggaataaaaaatatacaaatcaaactacatctttgcaagcatatttaaaagtgttcagagttagagtttcgttgaatgaatttcaatgttcaagaagcaagaggattttatagggttctccatatagttctttaagatacataatctttaaacaattttgactatgtgtgacttgattcttaaaaaaagacacataagtaatttaattattaaaattaagtagcagttagccagtcatgctacaaaataatataaaatataaatctcgaaattctataaaaaaatcattcatcgagaaatatttataaatttttaaatggcaaaaaatttctaaaaatagtaatttttttatttgaatcctcaaatatcatactcaaaaccataagtggtttgatccgtcacaaaaaatgttgaacttaaattaataaatcttatgctatataaatttaacatagctgaaattacattttgtatttatttttaatatatatttttgataaaatcacactaaacacaatatttatttaattaccaaaaccctatcatgagattatgacttagtaactactaagtataatataaataccacaaattattcacacataaacaatgtgagacaaacacacaattttctttttccatgagattatgatttcatagctactaagtataatataatttaaaattatattgcataataaaaaaatatgctaccaatatttttctttccaaattaaagaaaaaaaatgagtaattttttttacaatatatatctacagcaaactacttataaactcttcttgcaagaaaaagaaatattagctcttattttaaattaaaaataagaccaaacacaataacattaaaaatgaagtgtaaccaaacttacacagataaagaatatgaatgtcttgaagtacaagtttaattacaatttcaatataataagttaaaatttcattaggccatatagctctatctgcagaatctgttgtgataaactaaaatctgttcatttcagaaacaatatgacattttaaaaacctcaacaaaaacttcatcccctcttttatttcatacgcatactgcgatgctccttagttgttatgaggtgtttgtttccagcagaccaaaatactgttttcttcttctcctacaaagcttctgtttcatccttactttctctgtttattttataatcattattttgtttttgataaaatggtggtgaggatgaaaatgtatattagactattagacataaaataaaaatatgagatatgaagagagaagataagaggggtgttaatcaagaagtaaagaaaaacaatgcaatttattggcgtggactccacaaccagctaataagcataaatttttttttcactaatctattgagacatcagacataaagcacctggtgccgattagcaaaactctaattattatagcagcaaaagacctgattctcaagtcatatttgtacgacgtttttgtattggaaaaaagcaaaaaaaaaacccttttttcttataacaaaagtacctttttataaagctctgtagcattaccacaaataaaactaaaaaatattattttgtaataattaataaataatataatataaaagaatttggtattttctaataatgcatcgaggtttgaattgcattgtgcaatctgcaactgtaccaccaaagatttcaagttgcaaattttgatgcagtgtggacagtttgataaacactatcatattctgggtgagattatcagataagttgggtatgctttggcatttcacttctcttatatgtaagactatacatttttttgggagggctatgatggatttgactacaattacaattacacattatagagagaaagagagagaagattgaatggataattacacatatttgttgatcatttctctcacttcatcaatcacgagccatgctttatgtcctccaataacttcttctttcatctcaccatctttccataactgccagtacattttaaagaaattcattcacaaagatcaatcttaacaaaaacttggggagaagattttaatcaaaagaagaaacagaggtaagtaaatagtaagagggtgaccagacctgaatggttggcattttctgatagaatgaaacacaccaaaaagaaagaaagaaaaaacatgaatcaattaatatatcaattaaaaaacatgaatcaatcaattaatgtatcaattaaaatgattcatacttgtatgtttccacgcttcaccaaagcttgaggtaccttattgacatccacgcaatagaatttgaccctgtcattaacagtatatgcatcaaaatctcacagtgatccaatatcaataaacaagtatcttctattcaaattcaaaacaaggttgcttttttatatcgaaaaactccttaccatactatacactacagtacaggacagtgtagtttgtgcctgggattatcatgaatatgacaattgacaacttatgtttatgcttttaatgctaaatgaagtcctcaaactcatctgaacatttaaatattctagtaagagttcaatcatccattagaaaaggaattaaatttggagttaagaaatgaattttatttagctacttaaaatctattgcagcccaagtcacagtaatcaaaagtggaagaaaacattcacttgagctgaggagaatcatgtgtaggtcctaatctataagtgaggtcaaaagctcttaaaacatggagaacttactatactatgtactatgagtcagagtcagaggagtatagtgcatgcaaaatagaaagcacctaatcctaaaacaaaaagtttaagagtttacatgttatcatattcagcacccaatttctctaactttggtttcaaatatatgcatttccggcaccaagaagccatcctgtccccaaaacaaaaataagaagaagaaaaaaaaaatgtcataaattcttattacaaatcaccaaacaggtggcgtgcataattatcagagtgaagggagacaaaatggaagtaccaatcgatgagaataggctgagaaatttctgttgcatgagctagaatctgatcaaggtgatcagaatcgttaatgggttccatttcaacggtggtgggtccggacagattggtccaaaacgcctctgctctcaaatccctccttgaaattttcttccagtctctgtttttcaaatcaaccaaaaacccagaattttttggcaaaatcaagccacacccgttactccaaaactgggtactgtgatgtttttgatggaattctctgcataaaatatgagaagtcgcagcaggcagaacagacattgtttcacttgaaataaagaagagaagatgagaggtttagggagataagagtcagaagagaagggctaacagaatcatcatctcatggttgttcttctcaagttagaaatggaatttagttatgtaaaagtttggagtgtgtgctgtgatggtcaatgcttatcctcaaaagtgaagttggggatggcatcatagcaagtgcaagttaggatgtggtggggccacatttgatgggcaaatattattttttttttttgaaaaaggatgatttcattaagaactggcttctgcc

SEQ ID NO: 382377 - DNA, 1258 bp, Cannabis indica
aaactagatatgttcatcattagaaagattagacatacacatagctacttattggatattacttcttgagatcatccttaagctacaagcaatctacttaaaaatgtcataaaaaagaaatatattaacctaaaaagaaactatccaccaattgaaattgttaatgatcagcttgatgactatagtgtctctatattatcaaaaagcttgaggagctcgagagaaagtaaaagaatatgtaagaggttgctaacaaaaatcctacaatgaaatctcatccattttgtacatgatggtgttatccgcattttcgcaagggtgacacatgaaaattaattaggcaaaaatcaagagattattgaggctgcccaagtgccttgctccgtgctctgggagagttaaagccctatacttgcaaaacaggtttctgtgagataagtcttactggatgcaaaccgcaagagagatgcccgtaagctagcgactcactccactctagaagccaagaccctatgctcccgcaaggaacatagatcttcaaccgagaaacatcagtctaaggtacgccttaaacccgtggaagctcagcctagtgtgacaggctacagacccaatggcagagctttttttgatatattatcagaagttgtcccccacgccatgctaccgtgcagagcatgcatgtccttgtgtactatgcaatacaatccgacggctaggggaagggtaattcaaatgagaacacccctggagcgacacgcgtcaaggccacatggaaaatgtgacacctaccaatctaacggtgggggttcatcttcatgaagatccatgaagggtagtccatgctagaggatctgcctataaatatccccaaagacgcacaaggcagcaaggttcgaattctgttataggcataaatctaccctccccgggagacagacttgtctatagagaactcactgtattgaaggtggctcgcaatattatagtactcgcagtactgaaagaaaggatctcgcaatattaacttaaagagacctcgctatattaagaaaggcacacatcgcatatttggtgaactcgcagtatcaataggaaaaggtgcaaatacatacaccaatcaacgaaagtcaaaagtcaagcattcaaggagcattcatgacaaacgttagatatatttataatcgttgtaattaattttattaataagcatattattgttattattttgtaacggtctcattatggccattatttg

SEQ ID NO: 382378 - DNA, 2214 bp, Cannabis indica
atatttttgcaactgttcagaactcaaagagtcacacttcttatatgtaacagataaagttgtctcagtagaaaggataacataagttgtaagacaagtcttggcaatatttctatctcactccatccaagtgagacataatcaaagcactgaagtgggaatttcactatattcttaatcagaaagttcattcttgtatggtttaaaaaagaaaattggggtttccaaattctcttggttgacatcaaacccatcaatcgaggacctggcttggacaaagatactatggaaaagttgcgtgccatcaaaagttaaagtatttgggtggctcgtcgccttagacaaagtgagtgtccatgacaagatgcaaaaaaggaagcctttcctgtatatatcccctggctggtgcgtttgttgtaaaggcagtggagaagatgtggaacatctatttcgagattgcaagtttattcggtgtctatggaaacacgtgttagaggagtttgatttggcttgggttatgccaaggtcagtaacacaaatgatggcttccaagttaattggcagcaaacgcagaacaaagctttggaaaactgtgatcttagcaacaatttgggctgtgtggcttgaaagaaatgctagaatttttgaaggggttgctaaatcagaagcggatgtgtgggagacagttaaattttggacagctacttgggtctttaaaacaaaacattttgagaatttgtcctttttagacttaagcagagaatggaaaaccattttataagctgtcgagaatgattctgttttaggttttgtctgatggtaattgtaatcatggttttcctccgccataagtgaggctcattaataatatcgggaagatccctccttatgtgggtctattcccttttcaaaaaaaaaaattggggtttccaaatgatcaaaataacgagtaaagttagcagtcattactaggatgacgtatgttttctataacttaaagattgaaccttgcagttatgaacatcttgggctgatttagaataccatttgggaaattacattcaaggagatgaaaattttagaaaatgatgattatgatttccctaccagccatcagtaaccctactacacacaggctctgtaagctaggaagcttaaattagaaagtgcagaatagaaaagcgtaaaaggaaagtttcaaaaatagaattgtaagaagcttgtggtaagtttttaacccatatgaaaaacttcagttatccaacaaacacttacaagatcaatagtgcagataaatttccaataaaggcaggcaaaggaccagtgaagtagttctcatcgatcttgctacaaacaatttgaccaattgtcaagcaatcaattcatccaaagtacataaaagaatgacaaaatgataacaaaagaaaattaggttgaaaagaaattccttacaaaacagctagatattttaaagctgtaatttctctaggaatcatgcctcgtttgcccaaattgtgcagtctcctgcaataataacttataaattatactatgctacaaaaaacatttaagcaatatcagtgctacaatgctaacatatcaatatgaaagtagtaactaatgatagcttaatttatttttccttgttgaacatgagacatgacacgccaatatcaacaccagaacttttgtaattgaagattaacttttgtaattgaaccacacagtagttcataaagaaagaacatacagttgaataatgtggcaagtcttgttattgttgaacgaacaatcacatttaattgctgggttattaccactgctttcaaactctgtctcatctatggcagatccactacatggctctccacttatgttccataggggtgttgcttgtgcatcccattgttggaatattgagttcagggcactcactatctcgttaagcataatacaaaactagtttagatgccatctcttcaacatacaaagtacgagctaaaataaacaaatcgaaatattatatacaaaaaagaactatattacacataattgtaaggaagatccaaaattattgtcaatgcattagtggaaatcatttcttcatattttgagtgaaatattaaattcacacttcgtaccaaaaaaatttatacgtcgagttgcttcaaaaagtggctcgtagaataagggtgtgtttgtaagtaactgtgt

SEQ ID NO: 382379 - DNA, 2641 bp, Cannabis indica
ctaagagcctccatctcaaataaagcctggtcctttgctaggagatcagcttctttgtcaggaggtaagctccaaggtcttatctgctcacgaagagcgctcaaagaccccctggagttatcatgagaaaagttcagcttcataagggcctaaaagcaaaacaagaaaaatttagtgtcaaaagacaacacttgctggccagcccttccacaaaactactaagattggccaaccctcaaagacataacattggccagccaactctatgcaacggccactattgctagccagcctgtaataatgccaaaaaaatgagcaaagttaagtgtgcaactcatcgcagataaatcccaaaggccagtaggataaagcttagctagctcgttgtcatcaagcttctgaaactcatcatccatagaaggaaaagctctctctagatgcctgcgagctacttccatggctttttgcttcgtggctaagcttgctcctcgactagatttttaggcacccgtacttgaaggtcgttccctcctaactggagggtcatccatcacaagctgcccgactggcataggcccttgaggaggaagaggaagagatgaacccatagcatctatagcatgagtggtccgaccaccttggcccttagacaaaccgaaggctcatcaaaaggtccacaagcaagacctctcaacctagaagacatatctacaaaaagaaagtagcaaagtcaaaatgcaagttacaaatattcaatgtaagacaatatgaaagaaggtgcaataaaccatcaaataccattgtccttataagaggaaccatttgaatcctcaacaaccatcttgcccttgcctctgatgcaggcaaggggcgagtaagtcccacagagctctggcctccagacctaacctaaagagaagcatcaccaactgtgccccacaagccaagaactggcagagggccctttctctcttctccaaacctcgagctacccaagatagagacacactcatcatccatgatagggacttgtctatcactagggtagatccctttaacagttggggctccatccatactaactgattgacccttgccccccacaactctagaggcaggagggtacaggccaaacctctaaaagttggccacactggcaaatctctttatgttcctcttctccacaaggagggacaggatgtgatttgcccaatccctcatctataatgtacgaatggagtgcttgtaaaacggcacccactggaaccagcggtgtcgcaactcatggatgtcctaagcaatgaagtagttcttggcatacccgccaacttttgacatagttgtgttgttggtgtcacccaaccactggtagccaacttgactaaagtaaaagtacctcgtctggttctgctttgggccagactttagatcaaaataatatcaaatctcatatggagtgggctaaggccagcctatctctacatacaaaacaaacattgtcgaaaggtattttatactatttagggtaatttgtgttagacacatcctaaaataagcagcaatgtatctgaagtaagggtgtagcggcaacactacccccctgctatttataatgctctaacctttagcggtcatctcacactaaacaccccgcacaagaccactagctaatacctcctcaaaattcttgaccaagataatagatgcatgagagacccacttgtctccctgtgatctatcatccatatcctgaggctcaaaaggctgaatcaagacatggtccattagtgaaggctgaccaagcctattcaatggttccttgtcgatatcatatctgcccagatgacaattgggaaagacaaaataagttctaataaataagttctaataagtccttctactcataggcgcaacctcccctaccttagatttagagttggaactcttgaccccctagtaaacctcaggcatctctacctgaccaacctttggatctacatcctcacgaggctatgtggcctcctctaaacctctgactctacccatcgttaccaccctggaaacatgaggatcatatggtggcgctctacaacttgtttgcttcattctgtccatgactatcagtctagaacataagaaaagcaagggacaaactaaatgttctctctcaaaagtaaggctaataggacatatgacaaaatggctattacctcctcaaatcaacactcgaaatcaactgcatacaagagacaatgggaggttaacaacttcaaaaagctacaaatatagttctaataactgtacctaagggtaccttccaggtaaatcacactcctactgatggttggtcagctacatgatggatagagggggctgttgttgagcctgagaaccctggctggccccccatgccgctggttgttgagatctagcaatttttgctgtttgacctttgaggaaaggtctatcctccctgtggcaaaggaagatctatcctagttcctgaggaagaaggttggttagcatatcgatagaccctccctaatctatcaataagtcttccttgaagtggatctctaatgatgtccttgttgggttttatgacctaaataaaactccatttcaatgtaatctattttat

SEQ ID NO: 382380 - DNA, 2627 bp, Cannabis indica
tcaatgaactcagccttgaagaaattccttgaagcttgttatcctatccgaaaatttatctcatgcattgatttggcttgcatgaagttacagcacagagaagctcaaaagaaccttcataagcaagttcaccactgctcaattaccgccgttcacagatccggtgaggccttactacaaaaatgcagctgaaatatacactcgagacatttactataaagttgtcgaacaaataaaagatgagcgtgcatgtgtagtttttaacccagaagactttggggatcacctccttcttagctttaataggtttcaacatgggaaaatacgctacaaggttcagtactacaagattaacaaccacttcagttgtgattgtttattgtttgagactgacgattatccatgcaagcatatatgggcatgcatgaaatacttgaacataatgcttatacccccctcgttgattttgaagcgttggaccaatgatgcgaagcttacaacgctaaccacaagcaatgaagctggttccactgaacaagacgagctcaaacaaatggcaaggtatgactcccttaattcggacactaacttgttgaatatttatgcttcgacactagacaactcttttgcatatgtaaaaaataagatagcacgcctcactgcatattgtaaggatgctttcgatcaaacctcaaaacaagatgaacaagcgtcagaatcatctcgtggacatcaagacaatccaaacattgtgagggattcggtaaatgtgaaaactaaaggcatgggaaatcaacaaggtggtcgaagtgatggaaacgataatgaatcggggaagaaagagagagagtgtagaatatgtaagggtacaggtcacaatttactcacatgtccacaaagaccacaaaccatgcatcataagcaaattgcttcatctagccgacgagcttcacctttaagttgatccatcgagcatagccaaacgagtagctttatgtatgatgattcaactcaagactccttacactccttcaactaaagtatgcagtgtgttctataattttaagtttagttactaactttatcaaactcatttaagcttcatattatatgtgctttgcatgacaagtgtgttgtgtttgtagaatttatatacatgcttgttttgaaattgtttaaattaattactcaatatttagccaaagcataaaatttaattggtattcttatttgttgtgatagtccatgcaaaaattatatatgggatgcaatttttttttttaaattttgtatttctttttatttattctgggcaagtctaaatataattacacaagtattttttttaaaatacataagtttacaactgaaaataataataaaaaaaaatataagttcataaacgtccaaatatcatgaatggtgcccatttatgaacatctatcccaaaacacatgcacatatattctagttacattttttgtgccaataaaagggtggattgacatttacacccttcattaattgatgtaaaataccattattgacctcaacatcataataaaaaattggttaaatattaaataggttagagtaacctacactaaccagttaaaaagtggtttctaaatacaataaatgtctcctactgatgttgtagtttggagtagctctttcctcacagatcatagggaagcccacaaaaactccatcatcaggaagttgcagtagcaaaaagcttttaccaacttaacactgttgcatatacacgatttgtgatttcggacattgtcgagctgtgctttttctctggtgatttttaccacgctcgttagtattatttactggaaatggatccaaccgcaaaggaagggaacaagcttacagaagcacccattatacaagaagagataggaaatgaaggggaatcgaaaataatggaagccccggaggaggtaacggatacaggagaactgctccaagatgcaggggaaatagatgaaatgaggcagcagttcttcgattctatgtccctcgaactggaggcagatgtggagctaagtgcaaaagttacaaggaaaggtgttttggctaaaacctttggaagaaggacagtagcaaggggtcgagtgaaagaaattttatccaagatttgcaaactacaaggggcatgtcgattgaatacaatgaaacctagcttatggggcattttcttcgataatgagaatgataaaaaagaggtactcaaaaaaagaccatggctggtcaatggagctttactgaacattatcgactggcctgaagatggttgctgggaagatgtcgatatgaacaaagccaggtactgggttgaggcccatggtttactgacgccatatctcacatgggaaaacactgatgtgattgcaaagaaggtgggcgagtatgttgatttcgatagagccccaggggccattatcgcgcggagaggatttttaaagttacaagttgatatactcctaaatcaaagattagtggaaggcttttacttgaacttatcaagggataggaaagaatgggtagaatttaagtaccataaacttccagcaatatgctttacatgtgaacattttgttggaaattatttt

SEQ ID NO: 382381 - DNA, 2155 bp, Cannabis indica
aacacaaaggaaatgtaagtggagttaatttagtttgaaattgatcccaatgaaaataataagtataaaatagcaagattaagataagtaaatcttcaaatgtaagtggagttaatttagtttgaaattgatcccaatgaaaataataagtataaaatagcaagataatgataagtaaatcttcaagaaacacaacaatagatcccataagcatgaggtgcatgcataagaataattaataaaacttaccaaaaaaatgaatgctgaaattgtcaattctccaatacagaaaaagtaatacaaaaaaaaaacatatatacatgtgtaggcaaaagcaaagaacacaaacagaggaaagaaaactgaataaaatgatagctatatcagctaattgtgtagtaccaaagtacatattgcatgaaacagaaaatacctccatggtctggaaactttttcaagatggagtccgcagccttcaaccccttcttatactgttttgtctcataagatttctgaaacagaatatgagatttgataaacactatggcaagaaaagaagagggtgtcaactggattgtgtaaattaaattgccagcttttattttaaaaaaaaaaaaaagaaagaaaattaactacataaaccagcacaataagataatagcacaactatattgcaaataaactggcagcttacagcagcagccatttttcatcaatcctaaatgaatttgttcgtggaatattccttcaaacgaattcttcctcatacatacaaataaccacgttcacagagaggataacgccataaaagaatttaaattaagataatagaaacaatcaatcccattggagagcccatagctacgttttcagacattcataaaatctaaacttgaaacggaatcaaatggataataaaagaaaacgacatcagcaagataacgccacaagtctgacttcttcagtctctatcaggttaacttgatagtagatagtagacactctccagttttgtaatctatctactacattgcatcaactactgaaaatgaaatttaacattaaaaaattctattttaaccaccaaccagttctcatttcaacttctctacattcttctagtcaaacaaacaattcttacaattgatccaataacaaagttcaaaacttaactaatataagaaagaagaaaaatcacaaatttgaacattacgatccctgccccactatgctcttccgccgtaacaaaccaaactatatacaattcgccaaaataaaccatacccaattgattcaatcattcattttgtaataaaaacacaaaagcgatcataaatatcaaaacttttacatgcctgtcaattcatccagcattcaaacaacacaacacgagtgaaacaatcaaacaaacgaaatcaaaataaaagacatatagataaataaactagggttttgattctatttaagcagtgaaaaagatagaaaaaacacagttcgatcttgtagcgattgaaagaaaataaaaaaaaaaaaatgagaatagtagggaatcgaagcttacgacgatgagtttgaagaggttggcctccttgggagggagagaggcacccattgttgcagaggggaagtgagagtagagaagaacgaaggtgtggtgttgagagggttacgatgatgatgaaaaggagtggtggcgtttatctactgcaacccaaccctactgtgaggaagaagaagccgaagaagaagacgctaaaaaataaataaacgaacaaaaatatattatttatatttatatctcaaaattaaaaataaaaatataatattgtattgtattgtagttactacgaaacgaccgcgagttttaccttttgtgaaacttttattgtagtttctttctctctagggtttatgacttttatgtattgtttgtcgtttattttgaaacgacatgtcacttgagtaccttttgaatatttggtgactagaggaaaaaaaaaagtagttggtgaacaattgattttgtaaaagcagccaaagtgaatttttctttcaaaaaaatattttaatcccaaatattgtgggtggtgtgggcagtaatatttttttcaaatcaaactgcatatgtgatttttgtaattttttaaactgtaat

SEQ ID NO: 382382 - DNA, 980 bp, Cannabis indica
ctctctctctctctctctctctctctctctctctctctctctctctctctctctctctctctctctctctctctctctctctctttggtgaaacagtagattagttttaagggttttttttctttttttcttatttttgcctttagtttgaaaaaagaatccatttttatgcttctatatcactcctcttgaagctttaaacctctctttcctcttctctctcatttttctaatgtcatctggacttgggaagagtcaaagctatctgggtcatcctcagctttgacaaaacaacaataaagattgaaactttattgaagaaagatatcaagaattaaaaacccaaaaatggagaaaaattcatcagttaagaagaaacccattatgagtatttcactcttcaccactttctctgaatctttctccataaccacagctaaatccccaagaaatttccaagctggtgttgtgggtttgggcatagtagctgccatgactgatttaacctcctccaattctcatggagctgaaccatttgtagtggtctcacctagatcaactactactcccactactcctccaatcccaattgtctcttctgcttctaaagccactgctaatttcagaggtggtggtggtggttttgataatcaaattcaccatgttgttgaagatgaagtggttgatgaattgtctgaaagttatacttgtgttatatctcaccatggcaacaatttgattaggaaacgtgtttattatgatgataagcttaatggtgttgttgataattcttatatggttgttacttctggtgttttctctgcttcacctgccaatattggagatgttgatagagagttttggaccccagattttttgaattcttgctttctttgcaagaagaatcttcaaggactggacattttcatgtacaggtacatacaaaaatcctattttcatttccttaatttgtgttaagt

SEQ ID NO: 382383 - DNA, 1692 bp, Cannabis indica
aggggttcttaactgccaagataggataattttcttgtagtgtcaatgaattaaggtacgcttccgctaatattcgaattatttttctctttgaatcatgaaggattttctttatatatatgtttatacacttatcataatatgtactatgtttctatatgaaattaaatcttgatattacatacgatgtgagtaacaaataattctaacacctaacacatggacgaaggtaggggcatgtatcatttccccccaccccctcaattttttataaaatgaatattgtatataagtttttgaatttcttataatttcaccccactaaaataatatcttaactgggagatttagaaccggtcctaagaagatggaacacctttcatttaatcaaggattaggaaaccaaaatttagaacccatggcattctccccagaacctgatccagattagtttcttgagtgaaagatagaaccaacaagattgtcaaagttgtaactttcttgatttttaaatcccaatctgattccaaaaaagtccatagacaacataggatgttcttgaggagagaacaacagaaagacttatgtgtgtataatcggccaattaggtggcatctcccaatcctggtttgcctgaaatcattaattttccaaaatcctcatccaccacagttaggttacgtgtccggtcaagaatattctccatcgacggcaagctttgagagcaagattaaggtttaggcttatctagagagagcatattgacgaagagaaacaggagattcacgagttatcttcttaaggctctaattgacttttatattttatatttttatttgtagatatttttaaaatttatgtttttccaataaatttcgttaccctaataaaatattttgttgcctctgcgaatattgacatactatattaatatgtgcattataatatgaagtattagacattttgatattaaataatacaagtaactactaaccaaattatataaagcaattttttttaatcagaagggagtaaggagaagaaaagagaaggcttcactgttaaagtaaagaaaaggagaagaaagaaaaacaagggaagaataggagaagaaaaaagaaaaagaaaacggagaagaatgtagatttagacgtattattagaggatttttgtggacgtaagttctattaaaaattacaattttaatatataatatatatatataaatccataacagagtcgacataagtaaaactatattttttttgaatggacagtaaagatatattaaaaacttattagaaagaagagagaaaagattattacactgaaagccacgaaaattatttctttccttttccttccttaaaggtttcccctttgagctggttcctttattttttttttatcagaagggagtaaggagaagaaaggagaatgcttcactgttacagtaaagaaaaggagaagaaagaagaataggggaagaacaagagaagaaataagaaaaagaaaaggggatagaatgtagacttagacgttttaccagagaattttcgtagacgtaggttctattaaaaactatatttttaatatatataaattcataacagagtggacataaaaaaaaaaactatatttttttgaataaacagtaaagctatattacaaaacttattacaaagaagtgag

SEQ ID NO: 382384 - DNA, 1597 bp, Cannabis indica
acacgacctacttacacaaatttgacacgttttttttttctaaataaaataaattacaaaattattactaataatattactgtgtaaatatatatatatatttaacaattcaatgttgagttaaaaacttttaaattcaatttttttaaaaataaattttttaaaatatctaattttttattatatataaatgtatataagttttctaaagaaactttaaatttattatttgcactataactttaactttagtaatagtaaaataggtaaaagtagatcaacacgaatataacataattttttacaggtcgagttaggattgataaaattagacactgatcaatacgctgacacaaactataaaagcgagtcaaataaaatataacatcaacacaaaataataagacgttttgccatccttatttacaagtctaataaagtatttttatttttctaaaagaataggctattatcattattttgaaaggaaaaaattaaaattaaaaatttataacaatttctttggtatattttgagtgacattttctttagcaaaataaaagtaaaatgcacaactatattacaaaccaacttcttaaaaaaaaaattacacaccaacttcgtagaaaaaaaattcacaacatcgctattagatactacttaaaaggtatcgttttataaatagttagcaatattttataatactacttaaaaaatatcgttttatagtttatttataattattgtaaggatgatttattgttattattaattatttttttattcttttttaatgaattatctttttattaagtaattttttttaaattgtaaatgatattttttaaaattacactaatggtgcaacaaaatacttcatttaaccaataagaatatcacaacgctctcttttaccgtttatctttcaacaatttcaaaaaaacataattgtttgaaattagggtgtcaaataggtgtgttaaatttgagtgtgatttttgttcacataatactatactagtttctacacgtgtcaagtttgtattgggccagcatagaatgaattcagtgggagtaaaaataccaaatctcaaatctcaaaccccaaacccataggccaggccacaacaacacatagcacagtgaagagcttttactatttatacccatcatcactctcccaaatctagatcaaacccttctcctctccttactttcattctgctcttctcctctgcctttcaaagcttttctcttttttctaggagaaaatggccatgactaagtttctggccttcatgatcttggctttcatcgccatttccatgatccaaacaactgtatgtaacagacccattcttcttcttttactagatatttcttactgcattgttttctctctgactttttttttcctctctaacaggttatggcttctaatggcaatggaggtcatcacaacaacaaggttagacctctttctctttcggtcaaagattcagagctaatagttattttgcactgtaattaattaattaattattttttttatttttattttagaaaggatatggaccagggagtctcaagagttacc

SEQ ID NO: 382385 - DNA, 1623 bp, Cannabis indica
cctttattagtgattggtaaaatatactaaataaataaaaaaaaaatgaaatttattattgaccaacgatttctcctcccttttgtgagaggtggggcgattggcacttttatgataaaagagtcgaagacaccatcacctaaccacgtaggaaatttcttttttaaattctagtctttagatattttcttcactcattttcgtgttttcttataacaccacaggaaagatgtgatattaatttagaaaggagcaatggatgtcactagagcatttgcaattattattattgattttattttttttttcttttcctttatttatttatttattgttttttttttatgaatataatgagtaggaacaattttgaaattatttggtgataattaatggatgattcaaatataatgagttgctactgtcgtgtggtttcatgtgggcaacacatgaaaagaaagttgaatgcctttttgggtcgcaccggctcgtctctaatggcaaacagataaataatagactacgagtaagaggtcctatacattaatgcctctatcgttctgcctctctccatatatactggttgtattgtatttatttgaagtgcttaattaaattcattgtagttatttatatattttgtaccaaaattctcaatagaataccatgtccaaaatagattttaaaatgaaattttttttaagcacatatatgatagacttcaaaattaaacaaactgcattatattttttgcactgcactcaaaatttctttaattatatgtgggagattctataaaagtattttgttttataacaaaaaaaggatcacgtggtgcagattcctttcctactccttcagtcatattctgtaatcccgggtccccgtgttaacaataggggttttatactcagtcttctttaattgggtcatgggtagtcactttaagagttccctttcaagaggggttagggtaggtttcgaacccttacccaaaaaaaaagaggatgccaataaaagcaatccctaccagtctaccactacaccatgttgtggttaggagattctattaagtaaccactttttttttgtaattgtataaaaaagaatgatattgtgttaggatacggcgttattgataataattagtagatggtcgatgtggaagagaaaaagtgcaaaaaagtaacttgggtgttcacttttgagtagggatgagggctgagctgtcacaaaaagatattgaaaaagagaaaaccaaaagcgctgtcaaagaaaaagttgtaatatatgtggggtctcatgttgtaggtcttgcaagttgaggcaaacagtaaaaaatgcatggtcgccaaacccaaaggccgtatggtcgactgtacgtacgtactggattccttttctaaaatatctctctctccaatctacacctaaccagggccggccctgaaaatttatgggcccaagacaaattaaattttggggccctcaaaaatatatcaaaaaaagagtgtcatgggatttgaacccatgaccttgaacattatgtcctccacctcaaccaactaagttataaatatttgttgtttatattacacttaaattttacttaaataaaagcct

SEQ ID NO: 382386 - DNA, 3082 bp, Cannabis indica
aaaaaaaaaacattattataattagtattatggttagttttgttaatgaaaaatagatggagaaaaaatgttatatagagaaaaaaaaattgaagggttagtttgtaaaacttgagaaaatgtttcatggatgtttttgttatgaaatttgtaatcacaatgtaaaaaaaattaaggaagaatgatttttcaaaaaatggggtccctcttgtttttctttaattacactatgtttggtagaaaggaaagaaagaaagttaggttgtttgaaattacaattttaccctttgattgtttttgtaacaattaaattagtaaagggtacattagtaattaaatcttattagtagttttaaaaagttttctacttgtttttcaaagtgttttggaggaccttacaattttttttggactctcttttgttttccactattttttctcactaaggctacctttggtagaagagtaagtgaagtctgaaaaatggagaggaagttaatagttaaaattactattattttttttttttttaatgtaaacatgtttttttatatatatatataaaaaaaaaatatataaatttggtataatttaatttgtcttataaattataatctttccaaaagtagagggattagacttttgaaattttgggggagaaagtctaccgaaaaagggtattgggtgtgtaactaaagtcttacattggttagaaatgagaaagattgtgaaaagtactcgagatagtccaaagcgaatatcatactaatagtgaagataaatggtgttcgatgtcctaacaagtaattaatagtaaaattctcttaatgttaaatatcaactgaattatcgatatgtactcgttatgttctgaaacaaagggttagtaagtaaatttttgatgagttattggtggtgggaccaaatggtatggtggggttgggttgggtggttttaatagagtggtgggagtggtcagaagaagggtcagttggtgtgcatggtatgtgtgagtagcaataatggagtgagtgaactcttctcttgtgttgtgttgtgttgtgtggttgtgggagccattgggaatctcaatttcttgatctcttcttcacttatctctttttcaaagctttcaagagagagatggcagtgagtgacagcattaaatttagtgccaacttactttagtactctatttttttgttttgccacttgagatgagagaatgaattgtcccttttcagtctcttgccttgggaccctttctttgcaagttatgtaggaaaatgaattgtgttatttatttattttttttaatggcttttttcttttgggataattttaaaaacaataaaaaaaaattacaaaaatatacttatacaaaattttaaacattttgacaattttaaggtatgatttgtataaaatatgatttttttatttgcatattattttttcttatgttgtgttttgttatttttggtgtatataatataattatttttgtacatatttaatatacaattttattaaactagttttactttttaatcttttttcatttaaagtctcaattctccattgctttattttattataatttaatgtatttatgtattatatacacacattcataaaataatatgcgttttttaatataattcattaccacattaatagtacaaataatttgagcaaatttttttttaaaaaaaaatattttacattatttattttactaaaaaagtttttgttcttaaattgtatgatatttgatataatactttagtttttttagtttctaaataattgtagcaaatttaaagacttattttctaaaaaaaaaataataaaaataaagctcggtttggttagtttaaatcgaccaaaccgtcaattaaaatggtccggttttttttacatttatataatatagtcgatcggttttcgtattataaccatgtaaatcgaaaatcgaattttatattgttttttgtgtaaaaaactgactaaactgactgttgctcacccttaatatcaactagataaccactgtgtacatatgtgtatacgtgaaagtaaaatttcgaagccaatacattaataatttagtttgtatttaacggtaatgtctagctgacatctcaaatttatataaaaaaaataaacataaagaaattttaccacgaaaaacaaaagataagagagtataaaaaatcaaaacactttcgccataagtactcttttttttattaaaaattgggaatgaattattttatagcatattaaatattaacgattttttaaaataattattatgcctctgatatttacaaaattttcattgactaatgtcaaatgactgttctcttcaatggagtctgatctctaagattataatacaaaataatgaattcaaattactaaaagaaaatattaatattaaaaaagaaaaaaaaaagcctcaaatagtataattttgataaaattagatttgagaatattaattttatacaaatccaattttttagttgtatttttgaaatgcatgataatgattctaacaacattattatttttgcaataaattctttttatatagtttatgcaatgattaagctcatagatttttattcagattttcagaaagtgttacactttaattattttcaataaattttttattgttgaaaaataaaaataaaagtaaaagtttgtattaataattaatgtgacttttttcttaagaagaaataacaatatattatatattatagtatgcttctatatggtacgtagtctccaagtatatttttccaatcatgtcttaccaatttatagacacttcacttacacacctctcaatttttttcaaaaattaaaataaataaattgtgtaaaatgttctttccaaaaaataaaaataataaaaatcttgaataaaattatgcaaaattttataatccaattttgggttggttaatttttcgagtttggaagttgttaacaaggattaaaacaattaacaagtcttagcaaaaattaaaatgggataatttcaaaaaaaaataatacaaaaaca

SEQ ID NO: 382387 - DNA, 2335 bp, Cannabis indica
taacaaactttaaaaaaaaaaaaaaaaaaaaaaactaattatttcatactagctcaaatttgtgtactttttcacataattaaattatagttattttttatataattttatttatttatatataattttttaataatattttacaaaaaattacacacaattagaattactaatttgaatattcattaacaaatacttaaattattattattactgttataatgtttttaacatgttgtgctttcaaaattagactatttgtgtttacacgatttgcattttcgggtttgtcatggtatttcctacttaagcacacaatttttttttattattatttcatacaaatttatagcatcgtattgtgtcgtgcccatactcataattttttgtgtccgatcatgctcgaccctcctatgctcttgtaccaatttcgtatcatgtcaaaaaattatctattttataaccgtaactctagaggtattttggctttatacacctcttattagttaacacctatgtcggtattacatagtgaactctttgctcctgatgtggtttagaggtgctggggagacttggtctcaatgatgtggatcttgtcacagattgtcaatagatcgctaatgctgtgaagacttcttctgcaccgcattggaatgtctttgttgtcttataagtttgttgagattgtttgggtgcctagttaagaacaattcggctgatgtcttggctaggtggggtttgaatcactcttgtaaggatttctttttaatttttgaaaggttagtcttcatgtgctcaccaatagtgtttcgtatttcttagaaaaaaaatgtaaagtattagaaatagttgtaaacacttataataaattgttaaataaaaatatataagcattaaaactttattacactagtaatacgatatcttgttatgtagcaaatgctaaatgtgacaaagtaaatatatatttacatcatactattcaaatgaagtatttacaataccatcatataaggtagtctatagtgacacattgaggatcattattcaaatgctaaacgcacaaagtaagaaaaaaacaatattacaaacattaggaaaaacaaatcaacataaggaaagcacttaattaggcgatatttttaatacaaaaaatttggttaattttggaatttgttggtaggtatatattaggccgaatgagtgattctcacaatttaaataacagatgatcaagagaagtaaaaagacaacataattgaattaacaaaatgatgtgaaagcaagagacataaatatatggtggaaataaaagatgcaaagtcaaggaagtggggattgaaaaaccatccaaagtgagggattgtggcccaattatttaagtgcctagcttctttttaaaagaaagcaaaagttgttattctctatatatttggttattggtatttggcaactccatctactatttcgatattttacccttcgaatcttttattctatacataacaatttaattttcatgatgatatgttttttttttaatattttttaaaaatatttataattaaattatttattttacaattaatttatataattttttttattttaaaaatagatttcttgatgcaattttaagttaaggacaataaaatgatgaaaacttagaagaatgtaaaagaaaatgacacttgatcaatgaacgtaaaaaattgccaaagaaacaacacacgaatttttacatgactcgctgttagcgaagtatagtctacaagtcaatgtattaacccttagggctcatttggtatgcaggattagactggattggactagagagtaagactgaacattttgactgaaccggcgaaccgcgagtcgggttcaactcggtacccttcgggcgggttcgcgggttgagattttaggggtaccgagtttcgggttgaccctgaaaacccgctcgccaacccggtttataaatatattatatatttttttatttttttattacaatttatatatatattaaattaataattgaaaaaaataaaaaaccctaaatcatttacatttcacttttcacttttcagaagccctaaaaaacattcagtccccatccacattccacaccatacctcacgaacgacctcacccaggccaccagccaccacaccagccacgatcctcacccacgccacggccgacgatgacctcggctcctcctcctcttggctccgagatcggcgactcttcctcctccacgactctgtccgctcgagtcgcccacgacccacgtcatctgttagactatatatatagtgtatgtaatata

SEQ ID NO: 382388 - DNA, 4032 bp, Cannabis indica
aacagtgtgtacagtgaaaattttgtgattccaataaagaatcattcctatcatctcataaatacagtatacaaaaaacatttttagtgttgtttcaagagtcagtaaatttaaaaatctgatactataagtaccccaagtttgaaccaacacttagttattaaacctttttagtgtcggttctcaatcgacaccaaagagcttatatacaaaaccctctctcattttctcatatgtgcggaaacgaaaccaaagcccgaaaccaaaaccctccaggtgactttgactttgttcaaccccaaaacaaccccaagcctatcactctctcttgtcgatctctcttgccaccggaggtcttgtcagtctcatctctgaaatactctgttggcgtcacccaacctcaaaaccccctatcaaccacccccaaccccattggctgccctcgcttccccccctctctcggggaaacccatgaacccaaacatctccgtctcctctgcccgttgagtctgcctctgccaccacatgtgactatgtcaaaggtatatatatttatttatttataacaaaattaaaataaaaaaaaaacatggtggtaatatatgtaattattggagaatattgttccacatatattaattgtaaaaaatattaagtcatacataagaacatgggctacgccacacatcaccaattggttttgagatggaatttcatgtttcttcacatggtatcaaagtcatatccatagcggccttttgattaacacacctatccaggtttcgaacgggcgaggcctttgagactttctcctatgcctctgtaccgacctgctcgtaaattggcatggccatgccacatgagatccagatggtgcaaagatacttgattcaagattagtaagcaaaaataaccactattttgaggggatatattggagaatattatctcacatgagttaaatgtaaaaatattgagccatatataagaatatgagctactctattcatcaccaattggttttgagatggaacccatatttcttcacagtaataagaacttgtgtgtatatattttgttgtttttataattcattactatgattagtatttgatttttgttaaaatatttgttaatttatgttagtgattatagtatatatttgttgactgaattttaatcaaccgatacggagtcgtaatacatgagatttaacaaaaaaaaagaacaataaatgtaaataataacatcaaaatttaaagaggtttgaccccaaatgttggtaatagtctactccccttgtgttttattaattagagttacaaaatcaaaatctaggctcttgaatgtaaaagataataatggtagaagtttttttttttcctctaagtactcaaatttttggatctctttcctaggtcattgctgactccttatatagaggaaaagttcagtatttctcagttcaggagacacgaccattgcgtagatatctcaactgtctccttagtttttggaggtaattaaaatctaattctcatgataatatcctactatttttgtagatttgtaaccatctttgagtttcttgtgggatttaaatatttgaattagtcactgaccataagggtcccctccttagagtgtggtatgatcgttaacctcctttggggttagtagccaatacttaggggtgcacccctgagatccatcgtgaaggggtgacagtcgccatctcggagggttgcccccaagacccctttcacttgatcttcgacgttatgggagatgtgctatatttaccatctctcatggaggagaataaatttcttggaccatgaggatatagcactttaggagtttatccttagactaacttcattaccctttgagtatatcattacatttgaggtagggatattggcatctacccctagactgatttgacaccgtaagtgtatggtgatcgtttatctcatctatgagggtgttagtccattgtccctctagaagtagccacctcgctcaagctaggggaagatgtgaccatcaaacttctctttcaacgatcatgactaacgatccataccaacagtcatgactttacatattcctcatcaatccaatctcggtatcctcgtgccacgtgttgttattcttgccatgtcagcatcgttaaattttgggtaaacatttactcccaagtttttagaagactatatggtagaaactttcttatgtagtccgcacttcactttggctgttgacgacttagtggtacggtcctgagaatgtcatgcttatactagaattacatttcaaaacccaaaaaatatttttccaaatcattatacttttcatatttttacagcatatcctaattatagttttctctttacaagtaaaaaaaaatttccaagaagaacaaactaaattctttaactgagaaataatctaagcatttaaaaagggaaataaataaattatttgtatggaaaataaataatttaattacaatgaaaataatttaaatactcacaagagagaaaaaatggtttgtggccttaaattatagtggagggtcatagtagaaaaaataagaaaaaatgacccttcgcagtactaagtctcctaccttaaagctcattttcttgactttggaattaacgtatctggctaccttttgttagtatgccaccaatcaaacttgggaggcttccctcctaatttctaataagtccagggattcacccatcaataggtgagtattgacttgggcaggtctatttcaaccggtatcattgcatcatatcaatatgcaagggcaaacggggtatcggtggttgttgttctttctgtcattctatacgaccataggacttcaggtaattattctggccagtttatactttagatcttctagttttttcttcatcgtatccttcaaggttttgtttactgcttctacctacccagtcgactagggtgagaaatttgtgaatatgatactatcaaattgagtaccattatctgacactaacttttggggcaacccaaatttacatatgatgttcttgaccataaagtcgagcaccttcttggaagttatcgtagccagtggcttggcctccgtccatttggtaaaatagtctaccgctaccaccgcatattgcacactcccctttccttttaggtaattgaccgatctggtcaattccccatatggcaaaaggccaaggattttgcatttgtgctagttcgttgggtgcatcccttggtattttttgtaaacttttgacatttttcacaccttcaaacatattatagggaatccactattagggttgaccaaaaaaaaaaaatcttgtcatagtatcttcttggaaaggcttcgccttagcgtaatttcaacaaaaatatttgtggactttttccatcagtctttgggcttggacatggtgcacgcatcgtagtaggggcatgaagaaccctcttcgatacatgacactattgatgatagggctgcacacgggtcaaattttcgggtttttggattttcgggttttggttttcgggcttcggtttttggaaatgcacaaccgaacccaatttttgggtgttcgggtgcgttgggtattgggtcgggctttttcgggttgggcatagttgggttcgggtcctattgggctgagcccgaatgtttaatttatggattgaaataaaattaaattgaatatattacttccccatttttctatgttttcaaacacacgacaaccttttatcaaattggtttatcaaataataacccttgttatttatgtgtgtgggtgacaactggagtcgagtcgactggtgaatacgaataggcaggctagagcttttgtttgaaattgaatatgattaaaaaaatttcagtttcactattactatttactacagaagaatacgaataggcacgtagaaacctctacagaatacgaatatgcatgatattaaattaataattaattatttaaagtattaattttt

SEQ ID NO: 382389 - DNA, 1346 bp, Cannabis indica
caataaattattatttttttagctactacgttcaaccacgaacatttacgtgataacatagaaatagtaatttttacttttaattacgttttgtgactaaatgtacatttttttatttgtagtgaattaatgattaaaaacatgtattattagtttatattaattataatatggaatctatacataacaattttcttgttaaaattaaaaaaaaaaaaatctatcttacaaaacaattttgtcctatatatatattttatataatttggtattaattaaattcaatatatatataaatatatatataattgaaattgcagatcttcttcatttgaaatctgactcgaaagaggctaaagagtttcaaggatatgcaaagatgcttagtgatcataccaacaagactacatcttctactccaaccaccactggtaccattttaatttattatattatattatatatataagaaaataaattatatttatatttatatggctagtatatattacaaaattaattaagataatatttatttttaaatagttatgaagataattttatcacttagatttttattatttgatagttaaattttattaatttatgacaatccaatacttaaaattaataaattattacatgaagttatataccatagtaaagacatataataattaaaattccatttatataaatgtaattatagagagtgatttttttaaaaccacactcccattattattattattataaatcaaaattttttgttttattttattttagctaagagatttatggcctaaaaaagtttttctattattagggttaaagcttcaattatatatttattatgcctaattaaggcattaattaatcatttataaaattatgtagttcaactatatatgactttttatctcttctcattttttttctatagataaattgacacaaatatatcttcaataaatttctccaaaacatttaatatatatatgttttttaatatttttaattgtgtaaaatgaattaagtaattaataatttatgtttaattaaagggagtggaggaaaaagtgctacaatggaagacaagagcagaagtgagagaattaagagttggcaagggatacaaatggtgttggtcactttcttatggttactacttcctattctactcttttctaccatgtaatattataataatcatcatatctattttgtaataatatcatttacttttctctttgttttagttataatttatatttcaaattaataaataagtttgatatgtatacattttttttttcaataatttgtatgttttccctaattctttc

SEQ ID NO: 382390 - DNA, 1321 bp, Cannabis indica
cgtgaacctagctagtatattgacagtttgacactgataagctcatctacgagatgtttcgatttttgagagcaagtttctcattgggtacgatgatcagaggctatgggctcccaagctatggtattgttcttgctatgtttcaagattttctactttggatcccaaagctcaacatggtcaattttttggatttttgggtaagctttcaatgtcttaatttttgacataataacatgaaaaatttaaattactagacagatatggtgctttcaaaatcgagcgtttcttttcctagcagtgtattttgtgtctgcaggtacatcattccctcttcttctcatctgttccttcttcttcaatatccattccctgcccttccctttttctttgttattttttgatttttcctcggcctatgcttcaatgtcttaatttcactttcacaagcctaacgcctgagctttattccaattgaacaaaataaagataaagattaaggaatgtattggacaaagggtatggatgaagaagagaaagataaaggtaatgacttttagatcttctactttttattggtttcaggattattgatgtttaaagcttttaatttatgaaatttcttttgatggttgaaaatctgctgttaatagtacttagtttgctggtaccaagagtggtcagatattaagctagctttctctgatggagcttctcctgctaatccaactttcattcgttggtgtgctatcttccatgaaacatggagatccagtagtctatttatgttatggtggaaacagacttttctcagcttctttagacctgaatcaaggtacacagtcatgtataaatatctactattagttttattattataaaagttttgttaatttcttttctattctattattctgaactacttgtattgtaggtgtcggttcacaatttacaacgtgtggctacttcgaaaggccattcaggtgattgtttctattacgttaatttatcttcctttattccgttcaattcaatagtattatgtttttttatcaaaatacaaagacattacttttatactagtttttttttactgtcatgtttcattgcacaggttttcattgaggtttatcttaccaccactatggtactatgctacattctttattctgaaaatggttaccttaaaagatgctaggaaagacctagacttgcaacatcagtcattacagtaagttaacaacacagaccaaaatagttaccgctgtttagttggttgttttgtctatgatgttttgtttcaatatattggtattggttc

SEQ ID NO: 382391 - DNA, 2917 bp, Cannabis indica
agcaaccttatcagggatgggagaaagggggtaatctaacgggaacccgggatccaatgatcatgggtcgtagatgtgttctgcccattgccgattttagaaataatacctttgtgcagcaactcttttccccaacaaatgctacgccaaataaaggagggtgagtgcccgagagagctgttaaggaaagaggagtttgggtaatatctagcagacaagattttagacaccgttgagattggttgtttcaagatgtgccatgcttgtttagcaagcatagcctgattgaagtggaccagggatcgaaagcctaacccaccatcctttttggatttacagagctttttccagctttgccagtgagctttgggatggttattttcgttgaaaccccaccagaagttagccattatagactcaagggagtggcaggtagctacaggaatgcgaaagcaggccatggtgtaggtggggatggcctgaatgaccgacttgaggagagtttctttgcctcctttggaaaaaaccttattcttccagttgtgaaggtggccccagactttgtcatgaagataatggaagagttgctttttcgttcgcccaatgtgctggggaaggcccaaatatttttcgaaggaagggcagacagggatgcgcatgtaatcgaaaatcaaagtttgatcccgaagaccaacattcggggagaagtacagtgaagacttatggaaattcactttttgcccagtggccctttcatacacatcaagaacttctttgatgacgttacaagagttgatagaagcttgacaaaaaaggaagttatcatcagcaaaaaggaggtaggagatagccggagcctgcctagcaactttaaaccctgggagagacctatttctttcctgctgatgcgggagggaggagaaaccctcagcacaaagcaggaagaggtaaggggaaagtggatcaccttggcgtataccccgggaaggggtgacgtttcctgaaactttaccatttatattgaattgaaaagtggcagttgagatacaggcaaagaaaagttcgatgaaccggaaagggaattggaatttgcggagaatggctaaaatgaaggcccactccactctgtcaaaagctttggccatatcaagcttgactgccatccagtccaatttccctttagatttaagcttgattgagtgcgcaacttcctgggcaataataacattatctgagataagcctacccgggaggaaagcactctgattgggcgagatcagggaattgaggacgagtttaaacctattagcaatagctttcgaaatgattttgtaaattatgttgaaaagactaataggccgaaagtctgaaatggaaatgggttgtttactttggggatgagcgtgatgagagtggtgttcagaggagcaatatccccattgccattgaggaagctaagcgctgcgctgagaatatcattccttacataaggctagtttgctttataaaagttggagttaaagccatcaagcccaagggctttgtccgaaggcagttggaaaaaagccttctcaatttcttcagcagaaaactcttcgtccagtagagatcgatccgcatcagatagagtgcagctgatgccttctagagccctctgcctatcttcctccgaaggattcgtagaggtgaagagtaggccaaaatgggactcaatttcatgaatgatgtcctcctcatcagagatagtacctccgcttgccgagagaagattctgaattttgttgattttctttctatgggaggcgaaccggtggaagaatttcgtgtttctgtccccctgggccaacccttgggtacgagctcactgtttccaataagtttcttctttgtacaggagggcatccaggttggattggagatcttttatttttacaatagcttgatcatcccaaagggtgggggaacgggcagcctccaggtccttctcgagcttactaatgtgctttttgaaattgaattcttttttgtgattctaagagttaagacttctagcacacgcagtgtgggttgcaataagcttagggatggcctcttggtgagacgtggaactagtccaggactgatcgaaaatttggggccaattagggtcttttagccaaacattctcaaagtgaaactgtttgctcttatcattcggcttattgccctgtgtggggaggtgactagttccaaagcccgatggtcagagccaaagaaacccaaacatgggtaagaatggcatccgggaaagtatcagtccaagaattattaactatcccccaatctaaccgctcttggatatttttaggagagggcacattgttgttccaagtgagcagaggacccttcgggtcaagcggggaaagattaaaagcgtccagccactgcctgaaatcggaagaggggcccctatcggggttgcctccttttttgtcttgacaaaaaaggaaagcattgaaatccccaatgataagccacgggtctcgatgattatccctaccaatcctattcaaaattttccaagtgtgcggtttgagcgaatctaccggcaagccgtaaaaacaagtaagatgaaagaactcattaggaacagcacacgaaacatagcaatcaaaatgactgatagattgggagagtaaagttacagttacatcatttgtccaaaataaaagcaaaccgccgcttcgacctatcctagggatctccaatcccgactcaaaatgaagctttcttttaagattatcaatagcatttttaacaagtctagactccataataaataaaacatcaggattacaagaagacactaaacgggagagattccagaatgcacgatcactcccaattgttgggttttatgccctaaataaaactcttt

SEQ ID NO: 382392 - DNA, 1549 bp, Cannabis indica
aagagagagagagagagagagagagaagaggagagagagagggtagtgactggagagaaactcctatgtgagggccaaaaggaagtagattttgctttgaaagcttgagcttactattttgagggtttgtttgaaatacatgactgtgactatggtggcctatgatgaattgaataaaaaataaaattaaaaaaaataataataataaaaaattaattatagggacaggctgtttgttgctttcaacttttgtgaaccaagaaaaagaagtaagtacaaggatggatgcttgagacaaagcatgtggcattgtgtttcacatttcatggtatgtctttcttttgggcttactttggatttttctttggggggctctttctttagtgtatttacaataccaccccaattataacaaaatttattcttttgaattttgaattgaataccatgaaagagaagaaaaaaaaattaattatcattaactgagattttatgcttagatatgtgttgttggtggggacccttattagcttttgcataaataattgtatagagtatatattatagaccatattaatgtgaacaaaattgtttgcttcaaatcaggtaacagattcaataataaaaaagaatagcctaaaatagttaagaaagaaggaaaaatggtatggtgagagaaagtgacatgacattaattccatagatgatgaaataagaattgttgaaaatgatatatattaaaaaatttcttgcatgttttacatctttataattagaccccatagatagaaaattcatatttagcaaatttaaatgaaattcacattaaaatatgatcagggctcgttggttggttgttcatggctgtgggctaggcttgagtgttttgctcactacaattgatgttttcttttttctggtggatatttctttggccgtaagatactagtttatgtgcattttatggggtatgcattttcggtatcgtgtggatccaatctactaggagcggatccacataaaaacaaggtgggatatagtctctccgtattttaattaattacgatatatatttgtaataaaagatatatttaaaacataatattaactttaactaaatggttgaaattagatatgatatagattagagaataagagtcaaatcccaccaaaagtttttttgaaaaaaatttacttttgaaaatctagaattcttcttatgttatatttatttttctaattagttagtattttagttgaagatattgttcagatttttttattacatatgacttgattaatttattattgtttgttatactctttgatattttaatattctttgattaatttattattgtttcaatttacttattaatcaatacttctatttatttattaaagaaaaatttgaatttagatatgtggctttaaatattgatatttaattagtaatgcaacttaaaacatacctctccattcctcttaaaaaaaactatggttcaatagtgtacctaatttagacaatattgttataatatcatatata

SEQ ID NO: 382393 - DNA, 2687 bp, Cannabis indica
acaccaaagcaaacatgctctaaaatgtctataatcaaatcatgaaaagatgaaatctcagtttgtggtttattcaaagcattttctatcatcaaagcatatgtttctatttatgtaatagataattgtagttgaagaagccaatcaagacggtaaaaatagtctttacctccatttcatgtgattccaaatttcttgtaattggcttagaaagggcagtcacaacatgaccgtgagcatctcgaacgacttcatcaataccaattatacccctcctagcatccaaggcagcatttacattcactttatagtcgcctaaagcaggtggcaaccatggaggtgaagcaatcggtagttgagttgttgctgagagattgttgtcttgagttgcaagaacaacctgacattatttttgcctaatagatctgaagttgtcgagataagttgcagcaaactctgcaagtgagcagccggccttggcttccctccatgaataacaaagttccttttagtccaaatgcaccacatagtacaattctaaattccatttcagccttcgtataaactgtatagagatgaacaagatagtctcatttggtcatggaagaagaaggattccaatcaaaaaccaaccccaacctatgccaaactgatcgagcatatttacagccaaacaaggcatgtcttatagactcccaatcccaactacacaccgaaaaagtagcatcggttattaccttccttttaacaaggtttgtagccacatggagagcatcatgaaccacacgccaagcaaaagttttgactttttgcggcaatttaaaagaccaaaaatagccccgccatgatgatgatgaagcggatgtggaggaagcatgtgcatcttcaattgaatctaccaaatgaaagcctgatttaaccgtgtagtggctggagtagtgatgatgccaaataagcattattgggtttgggaagaaactcaatagtaaagtaagaatcttttccacatcaagtggtgaaaaatattattgcaggaggtgtatgtttcattgacgctcttttgttatcaagttcgctatcaccccattcgcaggcccaccataattgaaagtggaagaaaagaaatgtgacatggaattcatggatctgaaccacttctgacatatatatctgccctcaccaatcttccattgtaaatcactttccaacaactcacgaccccacaagatcccttgccaagtcatagaaggagagtgttccgattgtgcttcaagaaaagagttgtaggggtgatattgactttgtaacagcttgctaataagagaatctagattttgcaaaatcctccaagcttgtttagccaaaaagagcttgattaaagtgcatgaaggagcggaaacccataccacccgaagctttagatttgaagagtagattctaattgcgccaatgtatctttgttccattttcatttgatcctcaccaaaaagtttgacatcatagattcaagttctttacagaaagttaccgacaaccgaaaatagctcatggcataggtaggaatagattgtactaccgcttttaaaagcacttccttacccctgtagagaagagcttctcatttcaagtatgcatataacgagtttgttagttaagggcatcaactattggaattatatgtcctaaataaaatctaattttatttatctaagatcagaaatcatatcttgagcttgtcatatgttttgttcacatgttttatacatgattatatgtttaatataaaatttttattaaatcccgaacatatagttattcgcaataacaatgacattatcacattagaaagtaattgtgattatatgcttcaaattatttagtcccataatttattagtacactagatttacactgacgtgataatcaatgataaaatttacttacacactaatatgtggaatgtcctttccaaggcattgacaaagtatactagtatcaaatgtagtggctttatttcatattatgaacactaatagatccccattagtcaaaaagcctataaataaggctaccccttcatgtaaagggttacaaattttggcaaaatacagtcgtatgagaaaagtaataaatactccataactaagaggttaataatattgactcgtaaactaagactcattaatgccttaactacgtaaaaatctcatcttatttattttttaaactcattttctttagcttaatatttcttaacttggtttttaaaaaacttggtaaacacttccaaatgaccttaatccaatctatatccattaatagcaaaaatttaatcgcaataacctgatcgcagtagcaaaatcacaaacctcgaccaagtcacacccagggaggaccgacaggcctagctgaaaaaaaaaagacaatctctagtagataaaaatttaagaacgagaaatcaatatggccaagagattcatgtaagtctttgttggcattggcaagaaaagtggtggcatggcgcaacaggaattttaattagcaaatcttctataatataagtagggctgagcataaaatttaaaaatcaaaaaaatcgttcaaaccgacctaccaaacaccgttggaattgaaaccaacataactgtaaaccgaaaaaaccgctaacagttaaaactgccattgaa

SEQ ID NO: 382394 - DNA, 2215 bp, Cannabis indica
gaagacccagaggaagacccagaagaggatgaagaaatggatgatgtgaatgctccaggtgattcgtctgttcaaaatggtaccaaggaaacaagcttaaacgctgaacctgtatacgagaaggatgacaacttggataagggacaacctgacctcaaggatacagagacaacagccaaatcggacaaaaaaccagctgaaaaagttgagacaaaagcagatactggtgagaaagaaactcctgtaaagttgaaggaggcgtctgctgacaaggagctattgcaggtatctttctttcttcagttgtattttggttgtattctttcttggactgtgcattgatagaacttttattcttaaacaggcttttaggttttttgaccggaatcgagttggctacatcagggtaactttcttcttcttttgaacatgaaattctctttaatgataactctgaaatggcgagtaatatatgtatatgtttgcctttacaggttgaagatatgcggttgattatccacaacttggggaaattcctctcgcacagggatgtcaaggtgagtctccatttgattaaattctgaattatattatcatgtgtgtactatttttattttttattattttattaaggtgggttctcttttttttctccctgccctgcgttaggaacttgtgcagagcgcattgttagagagcaacacaggaagggatgatcgtattctttactataagcttgtgcggatgtctgacatatcaaaagattgaagaagaaatcatggtcattttggtctctctttgcttcttgacttatattccggaatttgtcttcgtttgaagtaatataatttaaagtccgtaagaagcggcggctatataagtttcctctttgcttgaaacattgtaaagaaacattgctgttcctttttttttatctttaaatacatattaaaagtatttttattggatgatttaaaattctgcaattctcttattgtgtttgtgtgttgataatcgtgttcacgtgtatcctacattttctgatcaagaaatattttttcattaatcaaactaaaggattattaactcaacaagttacaaatcacacttatctcaacacagccattacagatttttaattgactttaaaacttctcttctggagagcttatttactttttgacagaaaattctggctttgatgctcttcttgattgctttattaataacctttggtgttgagcatttgttctcaaagacacaaagattacggttttctcgaaattttatatactactactagcacagctaaatacacatctatcaacaaacttttttgtttttttttaattaatccgatctcggaaatccacaaatttagatgaccaaagtctgctgctcagccatagactaatattcatcatgactcgccaagagaaggcacaagaaaagaagagatgtgcatcactttcaaactccaatccgcatacaagacataagggagggagagtttatgtatacttgcttttgtataagatttttcttgtgagaaggagagagtgaatgacctaccacaagttaacggatctcgtcttactcatggactgtcctactcacggacctcgtccttgagtaactttcagtttcttgtgcctgtgctttctcgatcgttgtagcgacaagtactttctcctcctcgtgttgattgactatgagttcttgtgcgctccgaggtaacactcgcctcttcacgtctcgtccttctcccttaggtatggttcgttgtgtgcccctgctggggtttgttcgtgacctttccctgttagttcgagaaggacgttggcgatgcctcgttggtgacccacatgtcccaggttgagtcctaggatttccctcattcccacgagggatttcttgttccctggtttctggtcgccttctattctcatttctgtgtgaaggctctggccgatcatttagttgttcattttcagggggacccttagtttccccaggttattcttcctgagtgttttgagggttctcctgagtcgtctcctacctcctgggtcgtgaaccgcgaggtctgcctcgtggttttctcactccaggatcaggttgattttgtgtattgttctcctgtgccgccctggccgcggcagcctcacgttccaactcagcgttccgtcagtttgcctcctccaggcggtgtttg

SEQ ID NO: 382395 - DNA, 4465 bp, Cannabis indica
agagagagagagagttcaaaaggtgttctttagtcttgtttgtacccttttcagatatcattttaataagtatgtatattatcgtgtggggtgtacattttatctttagatatatgataaaatacaatttaaatttaaatatcacatataaatatatatatttatttgtataaagctagccgaaatctcaaatgctaacattgaatgagcaaaaagaaaggtttgactatgggagacaaatggccgacatctcttcttcttcttcttctgcccatcacaattatatccttggtaggtaaaatatcactctctccaatcttcatccatccaaacttaaggttttatttaatctcattttttgtagagatcgattgatgaccaattattataacgatacatttatatacatatattaatgcctttgatttataaaacgcatgacgtgtcatcacatatgcatgaagcttgaattcttttctgagcttcaaaatgaaaataaaagcaacaaaaaaaatgttgtattagctaatttaagatagaatagaaaattaatagaagccgactggtagagattattaattgttttaatgaacaattaatatatatatacctatatgtcacttaagtctcttattcaatcaataagcacatggcgatgccatactattaattaagctcaaagtcatttattcaaccatgtaacatatgttaaaaattatatcttcagttgatctcgttgtattaaagatattgttacgtgcgatagtttatatatattgttggtgtaattaatgcacgtagaaatggtatgaattaataagttagacatgtgtccaatagtaattcgtgaattagggctgtttacatattataattttgttgattatgactaataaaaggatattattatgatcaaaacattgtatcgtttcattagagagtaaaatgatcaagacatttttcaattattaaattcttcacacatctggactctaaagtgataggaagtatcttctccctataagacaattaattattagagaagacgaaaaaaataaaaaaagaaattgtaatcatgaaaatgcatatggctatatataggcatcaataaggctctggtaattaatccttcaaacatgtttttttttcttttttttttttttaataacaggtaattatatagtatccatcaaatgtggtccacataatatatacagcatccccttttgccgggcctaaaacttttattaaaagcagtcaattacattatatatttttattttttatttttttgtgaaaggtaggaatcaattagattaaaactatcttttcttttattggaatagattaaaattatcttttcactctagctaattcaccaaaaagtaataattaaataataataaaaaaaaaaatcttttgtctgtctatctcaccctacgacccggccgcttttgaaatctataatgctatagggagggacagtttcaaagttttagcaacttagtactatagagcatgattatgttaaactccaatgattttgttctactcttttggtttgtttgttatagattatcgagcatgatttaaaattaccctttccttctttatttattttttaaaattcttcatccaaataatatataatacgaaataatataaaataaaaatatgagatatttagagtttaaaatattaaacttttacctttataacaaatatcagtgttttattttttaacttgaaaatacttgttaacggtgaaaatttgtcaataaaactggccaaaaaattaaaaagtttaaggcgagataaaaataaagtgtttatgaactcaagaatatgaaataaattatagggaagtaatggagaagaccaaatatattgctctctaagtgtcttgcttacaataattttccaaccctcccttcaaaccttgctatggggtatttataagctctaagacttgaaaatattagtggtcccaagaagaaaagtttgcgtcttgtacctttggctgttagatgatccaagcttgctggtgtagtggctgtaacgtgtcctttgtccttgtgtgagggcatgcaggtgagatgcctcctctacttgtacattcccttgctagctaaccatgcaggaaccgtggccgcactttatcagcgtgcatgccttgtctttgtagttgcacgtccattaatttttattatttttggaaagttagctcaattgtattacatcaacaaacaaattacatcaaaagaaactattcacccaataatactcatttttgttatattcatatttttgattctatcatataccatatacacaatattcttgaaaactatatcaattgttgggactttgagatcccaatacacagtattcatgctctttttattctgataaactagagaacttagagtaggatgaaaatttttctttcccaaatggggactttaccacttttgatccgattcaccaacagaaacaactcatgcttctgggtattcaaaccaatctattggcagcagtacttttgcaaaagtaaagagctgtaaggacactaaaaaaatgatgttcatgagattcttctttaacaccacatatgagacaatccgacgaggaagttatattaaatctgtacagcctatctctagtagataaccttttcttaatggccatccacattgtaaacctatccttgggaaaaaaagacaatcccaaatcaaggaaaatctctatttcaaaggagtctgttaataattactcttataattaagacatcatttaccttataattatattttatatattctctaatatattattcattaattacttacttttagaacataaattccaacaatacgtacaacaactgtcaataatcctttcatcttgatccttatgatttgaactgatacaagcatctcgagtgcttgaagttgcatcttgaaccttgaaaactgtcaacacatctacatcaaaaatgtagttctcatccaccacaacattagaatcactgctcttgtctttttctgccttatttttctttttatcgtctcttaattctaatattttttgatttgttacaatggctaaatggtgatacttcctaattttccctgatcttgatttggatcttgaatttcctctggatcttgaattttctcttgatcttgaatttccccttctatgttgtcttcttaaagccattaaagcttcattagatcttgattcttaatttgcttccattttccaattcaattcaacatcccttaatcttagagtgttcattacatctttcaaagtgagagtgtccctgctatatattagaatagttcaaatttcattaacaacaatcataactcgatcttcttctataattgtttctgccatattataagagccaaagcaattatatttaaataatctagattttgttcaaaagaaaaagtagcagtcttcttaaaaccataaaactcccctttcaagaatatctttgtggcagtggtcttggccatgtagagttgatcgagcatgctccgaatttccagagcagtcttctctccaatagcttgtctcaacacattgtctgcaaggttcattattattacagatcaagcttgcttcatcatagtattgatttctttcttcttggctgcatcaaattcctttttgatttctcaacactttcttcaagtgttgagtcaagtttctggtatatcaatatggccatcatcttctccttacatagactaaagtctcctgatccatcacacctctcaagatcgaatcttgcaaaagatgaaactatttttgaatggttcttgaatcttgatagcttgtcaagattgagttctcctcctcaaaattcattgcactgatacaactgttgtaatcatactacacagattcaagtcaaagaacattcaaacaagttaaaaccaatcacaagaagattaacaaacaagtaatttaaaccagaaaataagcaaagattaaaaatgtagaaaaataaagatttgagacacaattctttttataaaagttcggccaaactaaggacctacgtcctattacttccctaaattatcttctccattaatgtgatgaattagaagcttgagttgttgagtgcacggtaaaaaaaaaattccagaaagaacccctaacaatcagtttgagtttaagctccaagaacattagtcttggtctagatttcccatatctctcttcactatgtttttctctcttttcgtatctctctctgtaaagaccgctcagtttaatttaaaaattagcagttaattatgaattaattatgaaaaattatttatagatatttaaataattatttatgctgttattttagaattcagaatgcatttttatgtcatatagtgtaatttcataattttgcattcccggtgcccggcaacatggaactcggtgtttg

SEQ ID NO: 382396 - DNA, 1092 bp, Cannabis indica
taaaatataattttttattatttttggatttttttaaaataattcctaaaaataataatattaacttattcacatatataaataaggtatattggagtatttgtttaccactataactgagtctattaattttaatacaaaaaataatatgccttaataaattacatttttaagtttttatataagtggatttattttaataaattgcatttttcatttaaaaaataaaataaattatattttagtaagtcataaaaaatatttcaaagcaccatttaaatttgttgggaatgtgtgactacttaataattactttaaaaatgtaattacattttttataacgtatgctatgttgtcaccagattattattaaaaaaaatattttcaaaattgaattaattactattaaccacatacttgacataatttaattttttaattaaaatatttaacaaaaactaatcataaattatatttaaatttaattaatattttataagtaaacaaaatacattaataaatacattcaaatcagattagtattaccttatagataatttactaattattttcagttaatttttaaattaattgtaactgtttaataaatattcggtgattagaactaatataatcaacctaattatatatttgatgtaaatattaagccttcttcctatgtatacttttagcttagttgttctttaacacgatgttgtatgttataaccatatatgtatggggactactatagtagccattggataaaatacttattaatagggatagtaatttataacctaatgattcaaattaacttttgaaaactacaccattattaatatatttatttatttataattaactttgaatattattaattataaatttaactaacaaaactccaaacctaactccaaaccataatgtctactaaaaatttaattttaattatatatattttttaattttaaatttattacataaaaatatattttaattaaatttattttaaaacaataattatccttatagaaaactataacatgttcatcttataataatcaatataagcactcttaaaacaatcaa

SEQ ID NO: 382397 - DNA, 1325 bp, Cannabis indica
aaaaaaaataaaaacaaaattgaagggaaatattccaactttgaaaattgcattttaggtcatcaatggaactttgaaaaaaaaaaaggaataatccccaattgaaagtaacataccaccaaaacaaattaggctatcaaatgtcaaatttattatatatataaaaaatccaacacaatcattggaatttggcaaggatgttatccaacaaaattgagtaaaaattgtagtatatgtttattttttacattctagtaaatgatttgttatttttctcttgtaataaatattatttgatattggatatatattttttgaattgtattatttgatatattagtatgataatgtaggataaattttataatatttttattttaaaggtgtatttatttgattacgtgaatattttatttgacatatgcttatttgactatgtaattatacactaattaataagtcttaattactttttaattcttacgatcttatgagaatttaatataattatactatataattattaaagaaattcaatttaaatattacttaataaaaaattatttttctatatacttattacttatttggcttaataagtctgtaaaatttataattataacctcgcattcaaatatcttttgtaattttaaatatattttaattattaattatattatttggtatttgtaaagttatttacaaacacccaatatgtattaagtaattagtggaacgagacagggaacctgcgacttgtttgctagtcgtgaagacagtggtttctttaaagcaccatttgtattgattgagagcgattctaagataactacaaaaataatgaaaggtgcttatttcagttggagtattggtaactactttcatcaatgtaataaactctttactttatttttagattgtaatttctctactatttttatattttataattttgtggctcataacgtagttaaaagaaattttgctcaaaacttaactgatacagttgagttatcaataataccagcaaaatattatctataatgactatgatgtctaattctatcctttaattataagggaagtttttatttatataatttttaaagtataagattataaatatacatattttttttaaaagttattttttggaaaatttttagaaaaaagttaaaatgtattaaaaaaaaacagcataagtatctagttatccccttatgttacttggttatcatggttacttttacttaattttcctatattttttaatttttttcttcaatttttttcataaaataatctttttaaaaagaaaaaaaaaa

SEQ ID NO: 382398 - DNA, 1732 bp, Cannabis indica
actcttagaaattcgttggaattttctccctctttactatcaattaatagtaaataacatgtcaacattatattagtccaaaataattttaaatatgttactagaaaaatttattaaaatacaattataaatcattaaagtaaactacctaaaaaacataaaagttttctaaaattttttaacagaattataatttttaacctaatttcaaggtgtagatcccaaaagtgggtgcacaaatgcaaacaaactgtttgaatattatttttgatacataaattattttgttctccaatatcccctcaagatggtgactatttttgctcaccaatcttgaatcaccttatggggttccatctcaaaaccaattagtgatgaatggagtagcacatgtttttatatatagctcaatatttttacatttaatccatgtgggacaaggttctccaatagtacattatcatagaaaaattgatattatattaaatatccaaataacaaaaacactaattaatggagcatttggtatgagatttagacttgatagggatgagaatataaaatttaaattaaatttgaatgacaaggggtttgtgtttccaaattagtctcaatttttaaattaaaatgatgatggcaatgttaatcccctcaaatacatgagtttcatattccctccaagtctaccctctccaactttactctcttcaactcaaactcacataacaagcaccttattaggtggcatttgattgaaaggaatcaaaacattactagaataagaatgacatttcgatactttaaaataaaaccaaaaaataaatagaataaaagttatttcatttccatttattctatttcattctcttcaaccaaacgttacctaaaaggtatattacatacatacagagagcactataaagtattccaaatttttattcttaaaattaaatttgaaataaagtaatgcaagtataaattttaaaactttcattttaatatttaatctaatactttgtaactattgtttgagtaatgtaccattttagtcaaacttaaaacttgacttaactttcttaattgaattatagtatcggttgaacacaagaatttgataaattattgtaaaaagttagtgaaaaatatttagaattcacatttgttttaaagaacttaaaactcttatgtgttatttccatgtaataattttagagaaaattatattatataccgatgttattatatttgttttaatttttatataccttaatttacatatttttttagatatacttattttatagatgatgtccttgttagatcccttaagttaatgtaagtatgacgtatattagacaactaacttaaaaaagtgaatatattttaataaaaaacataatatgagagtatttttaattaacggataaaaaaaaatatttttcaaataagacacaaaacataaaatgtcataggaaatataggaatttgaaaaaacccatttttagaaaaataatacatatagcaaaacagtctttagacggacaattgctttattttatttatttatttatttgagttgaaagcgtagctctataaatataccatgtgttactatttgagcgagtacttagttggcgtttggttaaaagtaatgaaatggaatgaaatggaaatgaatcaattttcattctattttttttttttgtttagttgtattttaaagtattagaat

SEQ ID NO: 382399 - DNA, 2204 bp, Cannabis indica
ttggctatcaacatgctcaacttcttaactcactcattggagaagcaacgacttgttgttagccttggaatcagtgatcctttggaagtcattcgtttgtgataattgaagcttgagagtgattctcagacagcgatcaacacgttgaaggggacttgtttcgtttgggtattggtaactatgtgcttcaatgtaaaaatctttacattacttttttattagttcgtaacttttcgtttatttttagacttgtgtaattttgcggcccataatgtggttaagtgggcttttgccagtaatgtaataactggtatggtcgatccgtcctccatagcaaataaattattatgtaatgaccataaggtctaacgtttttgagttttaatatatctacgcatttattagaaaaaaaaaaataaaaaaaaaaaaaaaaaaaggtttttactgttttttccttaccatgattagcttggttaccctaatgtacataaggatttatattaaaaaatttgtttcaacccatttaattgtataaccagtataaatataaattaaattttccgcgtgatctttaattagctctaaaaataaaatggaacatatctgtcgtgagctaggtacatcttaatctcttttctctttattagtaaaatgcatgaattagatctgtaggaattaaaaactatacaatatataattattgcagagtgatattaagaatatatttatttttccaaatatataaacagattcataattattttttggtttattcttaattgatatattgggatatttgttagaaaaaataatatattaatctagcataatcaataactatatacagtttcttttttgtcactgaaagacatgatcattatatattagaccaatatccaaattaaggggcgcaaagcaattttcactaattttatatagttgatggcctaattgtgtttcttatttctttttcctttttttttttcttgaaacaacccattgtgctttgaaccatataaatatgagaaatattaaaagatattagtaacctttttatgtgtcattattattattggttcaattaagtaaataatttttttaaagtatcactagctaatcgtaaaattacatatctaaaggtgttaagtattattggtgtctcgtaataatattctataaatatatattatgttggatgtagatagtgtatctaacataattaggatccacttaattgattttgttatataagacagccgtctaaattgaaaagtgagaatcttttttttaattcgggagtcattttcttaaattatccgcgtacttacgtacagatcaaattaatttaattattctaatataaaatgtacatattttaaaagacgaaagagactaaggttttaaagaccataatttcaagtatatcccaaatggaataaattagataaagatcttaattacaattaataaagaaatttataagtgtggaccaacaacggtaagaatatttataaataattatatttgtttattacaggaagaaaatattactattggtctcccaaaagctacctcataataaagtgagttgtgggttgtagacctacctctctccatgcatgataatatgacatatttgtaagtaaattcccttttcctttgacaattaaagctgggataataaatatcatatataataatatatttatatagtataataattaaatgaaaccagcaaataatcccatatattcccaattattgaacattgaataaaagaaaaataatagtaaaatatatattacttttggctatatatatacaaatattccaacacaaattttgaccaaattcgcttaataattattcacgatcacgatatagtggtggtaccaaatcacatttttttaaccttatttaattagtccaaattgagaacataacaaaaggcgggtttactatataccaatagccttctttatttcttatcaacaaactcgtgcatagactccttttttatttttctctcttacgttttgttcgtttcaatcattattaatatatatatatatatatatatatcgccctttttataaagaaaaaaaaaactaactattagaatattagaagatgattgtattgatggtgaagttgatgtaatcagatttacttattaatatagatcagaaataacatttaatgtt

SEQ ID NO: 382400 - DNA, 1042 bp, Cannabis indica
ctctctctctctctttaagggtttcatatagttcaaattaaggattaaatagtgttctcttcaagaaaaactcaaaagcattgtataacaatgactagcttcccaagtctaagataatcatggttgaccattgtcctaatcatatgaaaatatgcagaacaaaccaggattacagcaaaataaaatgggaaaaccttaatttggctccaaccctctttttgaatgtgatagattttttctaaaagaataataaaagctgagagttacaatgtaatttcctaaaaactagaataattgtaaatacaaaaaaatgggaaagtattgaaaaaagttttcaccattaaatttttggaaaataatttcaattatctattctctgttatttcctctcgtaaaatttatgagtgactaaccttctttatcccaaatctgcaaaggtttgctcctaaattaaataaacaagaaaaatgaagaacataagaaaaataaataaataaataaacaagaacaacaccattgaaacatgaaaacataataacatacccaagagagtagagaattgagagtaacccagattggaatatgttcttaaacatcttttttatgaaccaaaagtaaagcttaaacctgcaatcaaattcaaattcacaaaacacaccacacgaacactaactattttcgtgttgtgaaactaaaaagtttgctagtgaaggaagcagtagaagtagaaaagaaaaatcgatatcgtttggagacttacgacaacaaaagttagaaagccctcttctagtcttctccaacctctagttctctggttcttcgttttcgcttctttctttctccagatgaaagagagggactgattcatgttattcttaactggattgggctatgctatgttaatgggcttagacgaggaccattaagcccaacttaattctgacgaaaaaaaatgggaaatttacgtgtatactaacttttgctatttttttacaaaattcttgccagacggtatttttactttttactgtgtttttttata

SEQ ID NO: 382401 - DNA, 2008 bp, Cannabis indica
ctcttaggagcattcaacatgatcagttccaattgactgtcatgttgattgagggctggcaggcttgtatgtctctccctttagtcttttattttttttcctttttctttttcttctttttggtgggacacttgtacaggtgggacttccattgaagttggtggcaagttgcttagatgattctttattcaatactttttccaaatttggaagaaaatgaggtgtttgtttagcatagagtcaagtacagttaggaaaaacattattgaaaagaaagtcattatatgagaaatcttcccttttcttgtgaatttatttgaattattattatgtttgattaaccatatttatgacatgttaaagtccacttgggtttctctgcacgttgattagagatgactaaaatggtctatgcatttatgttttctaatttctatacacctataagacaattgttacagtttttctgttttgtatatattattattataagatcaagggaggagtgtagttttaattaaaaatattataagtttattgatctaatcaaagaggttaattaatggtcttgagaaaatgatggttatttattacttaacgaaatatgaaaccattgaaagtgaaatattgattcttgcgttagcgtgttggattatggcttgtaattgttgtgtgagcattggctcaataattgatgcactgatatattgttattattattagtaataatacctataaatagtttttttttttacaatagataccaagctgtggatctttcctcaaccaccagtaaaaaacaattgatattccacataattttttttttttaataaaaagtgatattttttcttttcaatatctcatgcttataatattcttcactttatttttgttttggtgataagactaaaattgcaaattgcacaactaaaagaccttgttattcacatgtgatgaaacttggaatgagggagagaggaaaggtcttgtaattagtcttttcgggctccaattgcatataaatctaaaatagaagacaaaacaggcgtccccagtccaaaatggcttagcccttcttattcttaatacctatccatccaacaatgcatattgcataacctaacccttttcagtacaaaatctatgaaagaaatctcacttcttttggggtttgtataacttgtatagacaaatccctttcatgggttttggatgttttatttaaataaattaatttttaaccgtgttcattttgtttcttcttcgtgtggggcttgaatgtagggcaaaagtggaagaaaaggccaaggttgtgaattgatataaccttagatttagtcctttttattgggtcaaacgtgtaaataatgatgagaaagataacatagcttttgtatggagatgtgttttttagtttttttttctcattcacttatccatgctggtgatttgaatttctaagcaagttcccctaaatttcgtatactcaagagtgttggaaattttaattatatttgactatgatgaagtgcaacattttggatggcaagagttttaaatgtatttgtggtatgtactgacaaaaaaaatgtatttggtatgtttttcaaaaatggttatttttgtttgtcagctaaattgttttgccacgttttgtgtcatgataaaaaacatgtttatataccatttttgtgctctaccgtataatccaaaaaaaaaaaaatggatataatttgattggatgtatttttttttttttgaagaggggtgtatctattatattgaattgaaatattcctaaaatttgtctttggacaaaaatgaattgaagaattgaatggtagtttgtctcttactagttacagataaaaaaattttaataaaggaaggggtaaattaaaggttttttgttcatgtatatattgaaagggaaatttgattttttatacttaaaaaacttaaaaaaaaaattttaaaccaatacattattatacactacaaaaaa

SEQ ID NO: 382402 - DNA, 3104 bp, Cannabis indica
aataacactcaaaccatataatctaacacttttaaaaatgtcgtctccaaacaaaataacctatttaattctgtgtctgtcaaatttgtatattagattgacacatatacaatatttaaatcagatatatgcatattggaaacaaacaatagtgtctactattttttattgtctttatgactatatatataaacccttctaattggaatctttgttgtaataatctctgacattaacagtaactttaaccctcaccatcgtatcatgctccatatctccatttcatattcatgcaattaagctgtgcaggctaatttatcttcttggtcgtcatcatcaggccctgctttaacaaagatcatttttcgactaggattaatgtacatttataaataaattggccattaatttatagtagtaccagtacatatatatatatatataccaagaaactattgattaattaattgatgaaatatatacatgtgccaaaagactagggttttatttcatgggaaaaaaataccatagctagctacatgattaattatattaacaggtagatgaaaataaataaataaacttatatgatcaaagtatacattaagtagatatttatatatatataggggtagtacgtaccttattatcttgatcagtattatgatcatcatcatcattattatgatctttggcagtgtcttgataatgatcaattacaagaacagagttggtcgtgatcttattgtgatcatcatgattcttttccgaatcttgatattgatcttcttgtaatactttggcatgagctccatcatgatcaacaagaagtagagactttttcataagaatattatgattgttgttagtcctgctggctttggctctgcctttgtgaatccttaagtgtccattaacagcttgtggtttcaagaaacttcgtccacagaattgacaattataaccagttgatgaagaagatgatgctggcttgttgtggttttcgatgtgaaccctaagacctagagcacattttagtatcttctcacaacgtgggcatctgaaaaaacgtcttcgtaccatttgattcctcccacgatcatgatcatgatcatgattatgaccaaatgctgaagatgttcctgttgctttcatcaccattttctttcttgctttcttgctacttcttcccttaatttctttctcttcagcttaattaaaaccctagataacgattagaatattttgagtggtatcgaaagaagtaatgttatcaactttgaaatcatcttatatatatattttacaaccgcttacctgtcccatttcggtggcctatgctatgttctttttttttttttttttttaaaattaccatttttttggactttatgtttggtaaaagttaccaattgcacctctattttttaaatgacaaaatagaccttatattttcaaaaacattaaaataggaccttgagctcaattctcaactgttttattttttaatatgaccaattttaagacaatttttaacacgaacagatacagaaaatgtagttagttttgtcataacatctctagaagattattattaagttttattttaacaaaaaatcagttcagggtcctatttgtacaattttagaaaatacaaggttcattttatcatttaacaaaacagttagcctaattattaacttttgcaaaacacatggtctaaaatggtatttactctatttttttaaaaaaaaaaaaaatattttaacttctattattaagggcaattataataaatgacccaaatcataggtaaggctgagcatgcaacccggcgggcagaccaacccacacaaaattgggccgaataacccattaaaatgtgggccgaagttgaaatgggttgaaaatttttttcttactgaacatagctgcagcttggtatctatggaggatctagaaactgatattttaacatttatttggaccattatataagtagaaggaaatttgcatgcagaattagtattccttgccaactttattataattgtgctaacctttttattggttttgttgggcaagttcaaggtgtaatgcagtcgaatagcatagggcctaggcgaattttggttcctcaacgaccagtgtttgcaaaatcagcaccaagttcaggtaatcttgatgagagcaggaagtctagagaagtagtttctgttagtgaagatcatagagattcagtaatgcagatgaagagaactaccgccattgccaaagatagtcaggaagatgaattaactacaccaccttccaattcagggactattaccagagcctttgatgacaacttaaatccatatgagatcaagtcaagtctgtgactggttgttaaggaacccaaggtcactgtcgcatgtggactctcattacaatattgatggtggtcagaaaaagatccagttttcagaagcaagcaaggccatttcgcagggtaatgtttgcctaactctgttgaattggctcaatgaaagttttagtactgttctattgctgtttctttaagagatccttaattgtgaaagttgtaggtgggaatcatttcttatcttgtctatttcttggattgtcactatgctctattatgtatattccccttctttctatctgcaggggtcgatcttcttatggccactggattggagaacttacaatctcatatgagttcacttgcattgacagaaatggaatgggttacaggcaatcaaagagaggcatcagcggtcattaatcatgagatgaagcatcagaacacagaatgtgatatcacttcgagattttatgtgttgttttttattatttttgttcgtgcttttttctaaattattgttcgaaactagtttacatattttgagagttctgtaatggggttgctctattttataatattattacaaattttttatattaagttatttttttttatgggaaatttacacagtttactgtgttttcctattttctttcttttacactgttacactcccaacataacttttatactgttttttttttttttcgaaattaacttttgttttttttttttt

SEQ ID NO: 382403 - DNA, 801 bp, Cannabis indica
atattattggtgtctagtactttattcgatgtcatattattatcaatgtaattaagattcaagtttcataaaacttaatacaataaattttgtggaatattactaactaattattagacgtcacctatagaaaatgctagataccactgatgcctaataagaatgtcctatatatttagaatttttgcctttcaaattataatctatagtattatgtctcttatttttttaggctgttaataatagtcccagaactattaatatttcacaatattaaagtggaacttttgttaatttttctggtacgcggcaaacaaattataatttaaaatttgtattattaagagatcattaaactaaaaattattaaaaaaatttatatgaaatttttaaattatctttttaaaattaattacacaattcctaaaacaatcacattctcattctatttatcatgtataacaaaatctgaaaactaatttataacaatgtgaatggttcggaattcaattttaacgagctggaaaatttagtcccacatttatatgcttattataatatcacacttattatcaattgattaacaatgaatttttccttttatatgatctttgttttgatcttatttaaaagctctcctaatccagatcctcttttggattggactgaaaactcgattatgaggtgagtttctttcttgtttttgaattaaatctttcattctttttagatattcatatgagttataaattttagaaatatcttttcgaaaccaaaatctttaatcccctaaattttctt

SEQ ID NO: 382404 - DNA, 4096 bp, Cannabis indica
atatatatatatatagatatcatgtcatttcataactatatattcatagtattataccccttcactttaaagtaaatttacctctcctgatcgtaactataaatatataaatttataatttatgttcaaggagagaggccggacgatagaaactttcttctttcttttctctttttagtattttagtgtaatttccttttaaaggaaaagtttttattatgaataagatcaattgtattgttgaatcaaaaccatacactattctatatttacaagacaatatcccaacagtatacaagaaaaataaaacaattttattttcaaactcctacaaatatcctctttatttgatgaaaactttgtttataaaaactgttaccttatcttttcaactacccgccatacatcctctttagatgaaaaaataaaagagaaaaggttagtcgtacatataaatatataaatatattccgacttggtgaaaatatatatacatattttgttttaatggaacttgcaaaacaaaatctcttcaaaaaattttgagtgtcgagtatgtctcaaagtttatttttagtgtcgagtatctcttcataatgagactattatgtataactaagtgctatataactgtatagtcgtgcactcgtgcaaaatcggattttttcgcaaactctgttcattattaaattcattagatactactccatcaatgattcagttgtttcatatatatatttatataattgactggaaaatttattagttattaaaaatcttagtattactacataagggatgtgataatctgtatatatgtgcgtgtgtgtgtgacagatgcacatgtgggggcatggatcacagtacagaaagggtcctgaatcactaagaggaacacaaccaacagcaatgctaaggctaccatgcttctgttgctcaccaggttgtagaaacaacatagaccatccaaggtcaaggccactaaaagactttcgaaccctccaaactcattacaaacggaagcatggcatcaagcccttcatgtgccgaaaatgtggcaaggcctttgctgtgagaggtgactggagaacccatgaaaagaactgtggcaagctctggtattgcacttgtggctctgatttcaagcacaagagatctcttaaagaccatgttaaggcctttggcaatgcccatgcaccttatggtgttgactcttttgaccaagacgatgatgatattcttgatcaccctccacctagcaatgacactacttaaccacccttttataataattaatttgttagacttaactagaagaattaaatctcatcatgcatgggataatcactattcttctttaatttcttaattgactaattgttaattaattttctttatatcatgaccttaacatatatttttttgttagtcatatatatccgggatttaattaattttctttattacaagtcaacgttagttataaagttctccagaatctcaacatctctcttcaggaacaaacataaataatttacatgtagactattattttgctcagcagtagaaaaactgctaaagtaacttgtaggacttacttggacatacaaattgatgagaaattaaatgaggccacgacaagatttataaagattactaaaataaagataaatgctaaaagttacccatagaatgtaagattactaaaattaagataaatgctaaaaattacccataatatgtagcatcctttgttatgttagtttattaagtgtgtaattcaataacaaatgtaatttattttattttaataaatattatactaaatctctaacgaattataattcatcaccttgtaatagtactaaataccttaataactcataataatactttataattaattagcaattattatttaatgagctatccatatatagtgtcgggacaggacacttagtatttcttgaccaatttatttttataattggattcgtggtgttcattaaagtgctcacactgcataaatataattaatttgaaattttttatagtacggttgtagtttgtatttctgtcaaaacgcgtagtgcggtgcagtttatgatttaaaatttaataattgtggttttaactgcactacagtactacatattacaatgttattaatttttacaatataatttttatttatttttttgatataagaataaatatttgtaatgtatgtgtatatatattgtatgattttctagagacaattgaatagaattatttaataattagtaaatatgttatgatgttaaaattttaataattttttttcttttttgtatgttttttaaacttaattagatttatttttgaatttcccttataacatttcataattatgatagtataaattgtttaaaccacacccgacaatatcatatttttgcagtgtgatttttaaagttttaaaatcttacaatgcgtttaccgtttaaaaattacaaaaactgtatattccatttaatttgaaaaaaaaaaaaaattacaatcgacaccacctaacgtgaatatctacgattgctccattaattttttggttggaatttttataccattaattattgtataagtatatataaaaatagttaaaaagacagctgaataattattgctcatatatatcaacagtacataaataattaatcagcttctaagtatactagcttacaaatgtagagcagggtatcaacatttttttcttctatttttttgtgccatagggtgtcaacatatttgtaggctttagatgccatttgcaaattactaataaacccctaacataacagatgtttaggatatatttatataaacgaagggcttcattatataaaatgatttagcttcagatatatgcttgagatttatataataagagcaatatctcagttctatatataaaataatatatatttaaaaggttatataagctaaagctagtgtatatttaatttgtacatgtactgtcatgaaacaacactgctactactactaccacaaaggttgtaaggaagtgatataatggatcttattggcagctttgtaagatgagaaaatttagaaaaagagaaaaagagagttatagcagtgaaaaaagtcatatatctctcttctcatatgtcatttcaaactacaatattatttcagaatactgtactgtgtttggtgggatcagcagtaatgtgtatgtgtgtgcccccaattcagagcttcaaaatttttaggtccccctcctctcacttctttcttcgtcatcactacctgatcctttttctttttctttttatttactcatatatatataaatatttaaataatgatgatgaatacatatagatatctctcagtcatctttgtgtgtatatatatatatatctatacacatatgcttaggacagttattcagagatcttccaatgtatgtacctttagatttaacaaagaagctacattgagtcatcaatataaacagcatacaaatactatttaattcaattatgccattcttttctaattaattcttcgctccccagtgttatgtcaacaggcctaatctaatcacagtgttttctctgccttgcattttctttttcgaacttgagacaagcttgttgttctgaaatgtatttccaatttattattttaatataattaatgaataaagtgtatgactatataatgataaaactaaatgtgctatatataaaatggactgtttactattaataatattcacattgctccctaacaattaattaaaaagacctcaaattggtgtactctttaattccgtcaaacattattaatatttctctctcttacttcggccttgttattatatatatctattctatataaaatgtagatatacaagtgaattcttagttactaaaagttattgggcgacttttttttttaaataaaaaagtaacaaattattagatgttgccacgtaaagagtcagcatctatgtagttagtcaaacctaaatataattaatccacctaaagtgttgcaattaataataaatttgttcatattattt

SEQ ID NO: 382405 - DNA, 2923 bp, Cannabis indica
ttttttttttttttcatgggctacttcagatctatcttgttatctaatccatatggggtttgtttttgcaggtctaaagactcaatctttaacatttcattcataatataagatttgaattttgctgataaacaaattcccagaaataaagttttaatttttacaagaagatgcaacaaagggctatgcctatggaagaaggcaaggaccctggagctggagctggagctggtggtataaggacaagtcaatacaaggcaatgcccctaagattgcttcagttgtttgtattgtttctagctttttctattacttttgctgtaattagcatatacactattcgccattttggaatatattatagtgtaatggatacagttaagtcaagtttccaaccttgtttagaggaaccaaacggattggaacaatggattaagcctccttctaatttgatacatactatgagtgataaagagctgttgtggagggcttcttttacatctagaataaaacaatatcctttcaaaagggttccaaagattgcttttatgttcttgactaagggaccaatgccacttgcacctctttgggaaaagttccttaaaggacatgaaggattgtattcagtttatgttcattcactcccatcatttcactctgatttccctccttcatcagtgttttttgggaggcacattcccagccaggtacttgctcctctcctctcaatctcatctgttttaataataagctttgctgattacaagttacttgattctttgagtttgaattttcaatatatatactgtttgtgctttcatgtctttttttggggtcttctgctatgctataataaacattcacatatgtgtaataaggccttgatattaatctcaaatagtacaattgattagcattttagaggctgagttatcgagttttttagtggctgtgaattttgtttaagtgtgtctaacacttagattttggtgaatttagtgtggattatttagagtaaatattactcaggggtttaccaagtttctcgaattgtgcacaagtgtgtatcaaatgattttcgattataatgtttctaagggcctaatgtcagccctgcttatagttatagctagaagatcatagttttctgtacaccaaaatcttgcttaatttgccattgttaagccatatctgtatttttcacatcttttctgtaagtcaatggctgcaaatttgcaaatgcccataactgttggatgggattgggggacaaggttttcgaattgtaagtgttgttgtttgtacgtcgtaaagacataatttggaagctcttcatcctatgtatggttgtcccaattatgttttgtgtttgcctatcaaggaagtggtagagtgaggtgattttgttctgtatctttcttctaatcctctagtattcatgttgtgatctaaacaatcaaaacaaaacagtacaggccaataacattgtagcttacacaactccacaggttcagaagctatacaaaacagatcttgttttctctctaaacctctcacacaagctctctctctctctctaggtgaattgatttgcattgcattgagagagaattatagaactaagtttatatattgggtatggttaagaatggtaggctgaggtagttgaaagtaacaaacttaactaccatgatcctaacagctttaactgtaaaaacaatgagttgacctggtcattgagacaagtggctgaaccacaatcaccacaattcattacttaaatccacaaatagttctctactaatgaagtacagttaagaggcacacactgataatggcccttaggcacaaaattattagtctctcagagtttacttgttttccaacaacaggtctcagagtggggaaggatgagcatgtgtgatgcagaaagaagacttatcgccaatgcattgctcgatatctccaacgagcggttcattctgctttctgaatcatgcattcctatctacaacttcagcctcatataccactacataaccaaatccaaatacagtttcactggggcatttgacgatccagggccatttggtagaggacgatacaacgaaaacatggcacctgaggtgaacatcacacagtggcgtaaagggtctcagtggttcgaagtaaatcgaaagctagccataagcatagtccaagacacgacattttacccgaaattcgagaagttctgtagaccggcatgctatgttgacgagcactatttcccgacgatgctgagcatagaagcaagcaatcaattagcaaacagaagcatcacttgggtggactggtcgaggggtggagctcacccggctacctttggaagatcagacataacagatgagtttttcaaaagacttgctgggaaacagcattgcacatacaataacaagaactccacaatgtgttttctgtttgcaagaaagtttgctccaagtgctttggagcctttgttgcatatgtccactaagtatttgggatattgaagagtgagagagagaatgaatatacagagagagttatgttaaccacatttgttgtactattagtttgagtactatgttttggcttccaatattacttgatgtacagacactacagagaagcagctgctgatgagtttagaagattataggccatccattattatttttgtatcatcttgtgattataatgaataattcttttgctcatccaatccaatcttaaatatacacacatatactcaattttactacttatttataattggttgtttttgccagattatctaactaaaaagttgtggatgggttatatatatctttatatattaaaagtgtctatctaacggcaattcttggtttaacagaatatacttaaaaataaaagaatattc

SEQ ID NO: 382406 - DNA, 2426 bp, Cannabis indica
ctttcacaaccaaaaatagctaacatgcatacaaaaccactcaccatatacaaataatatatcttaaaacaattactcaactacatagaaactaacttgcaatattcaacctagaatctatattttaacttaagaaaataaataagaaaagacaaaagaatttccttgagcttttctcataacttcacatagttttcttggcaaaaatcaaaggctaacgatgaagattacaatgaattctagttatttttcttagaattcttggggtttgttctagcaaaacctagcgagaaaaaaggaaagagagaaattataattacattaatttatcccactaataaaaatataaattaaattaactaaatataaatccttttaatcaccctacgtttccctagaatcccgtaaaaaataaaattaataaatcctatttgaaaagatcattttacacttacatagcctctaagtaaactctaggatttatggataatttggttgtaaccaatcaccttgaaacatcctgacaacacaaacatccaataaaattttttatcataaaccgaaaattcattaggtttctacacatggaaatagcaactgtgaaactatcgtgacatctaatgaaaccatcgtgacatctttgacaaattcattaggtttctacgattgctgaaccctaaaatattttattttataaatggtacatataatatctatatatttcactaaaatatccttaattgataattacgcttatttatttatttttataaaatccctatctattacataattactctaggaagagcataatcttacgtataatctcttaattcatatataatcctgtatttaataaaaaattcattaataaaccatactcatattttcaagatattacaactaacctctccttacagaaatttcatccttaaaatttccctaaaaaactcacgatatttttcccgcatttgtggctctaattcccatgttgcttcctcaaccttagtttttctacataacactttaaccaacaaaattgtcttattccataaccccttctcctttctttccaggatcttaagaggttgttctttgtatgacaaatctttctaaagcttactatcatcataactcagaatatgtattggatcagacacatattttctaatcatcgagatattgaacacactgtgaacttcagacaaagcaagaggtatagctagccgataggctagttgaccaaccctctcaaggatcttgaagggacacatgaatcaaggattcaactttcttttctttcaaaatctctgaatccccttcataggcaatacccaaagaaagacaaaatccctcacctagaactcaacatctctacgtttcagatcagtgtagcttttctatcaattttgtgaggccagcatatgagctcgaatcttttttatggcgtcactagtaatcttaactgcttcacatctaagataccttctctcatccacttcatcttagtggatagatttacgacacttccttccatacaacctttcatatggtgccatacaaatagtactctaataactattattgtaaggaaattcaataggagaaaggtacttattctagcaacattgaatgtctaaagcacatgaccgtagtatatcttcaagtatttgaatagttctctcagactgttcatcattctgaggataaaaagttgtactaaactttagcacagtgtccatcgcttgttgtaaacttttgcataacttggatgtcaactttggatctcgatcaaagataattgactttggagaaccatgaagtcaaactatctctttgatatatgaataagcatattgatctactgtatatgtagtccatgatggcaaaaagtgcactggcttagtgtatcggtccacaactacccaaatagattcatagaaccctattgtcttttgtaactcaaccttaaaatccatagttatatcctaccatttccattcaaaaaactttagacgctaaagtaatgccactggcctttaatgttatgctttaattagctaacaagttaaaaattttgacatgtactcaactatatcacctttcatgcccggccactagtataatgcttttatttcttgatacaactttgtcgttccctagtgtaaataattttttgtagtatgagattcattcatcatttcgtgcttgataccatcatcaagcagaacataatgttgggatttatgccttaaaagaatgtaattaatggataatatattagagaatatatgatataattataagttaaatgatacattaaaaataatagtataattattaaatatgaaaattccttattcatatggagagagtaaaatattgtcatgatgtacaagagaattaagattatacgatataaataa

SEQ ID NO: 382407 - DNA, 1929 bp, Cannabis indica
ggacctggactcggacctggaccgggatacgggacccggacccggacacagacttgggacccggtacccagacccggacccagaaccgggacccagacttggacctggacctggaccgagatccgaacccggaccaagaccgggaccgggacttgggacctggacctagatcaagaccgggatccggactcggacccgttttagggacccgggacctggacccggaccccagaacccggacccagacccattgatataaaattaaattggatataaaattataagttaatataaaaatagtcgggtcggattagatctgatctgaataagtcgggtcggatctgatccgatccgagtatctgatctagggggcggggcggggcggggcagattcttacataatctgtatgaggtcggatcagatccgaccgacccattgacactcctactttctggcatttggttgctctcctggactcttgtgttagtatcaacctagtttgggctcctcatgagcaaaataaggaggtgcataacttggttgcttgggcctttaactttgttgtctttggttttctatccattgaggagttggcacctcttgttgccaattaagacttattttaatataatgtgttcttaattaaaaaaaagatataaaaaaattagaaatatttaccattaaatcaatatctgaaatagaaataagtaagagataacacatttgaatagtattaaaatatcaacagtgtgctctaattttctaattaatgccaaaaattatatgttttgtacatatgaccagatcatgactaatattttgatttaagacttttaagcatcatgactaacaccaaaactaattgttcttctagcaatgtacttctcaaaggagtaaacaatttattttacactagttaatcttctttcatatattactgaaatttaaacctcccaagtagctatattatgatattgagttaaaagattacaaatgtaaatgctatgaaaaaatatttgataaaatataaacgttaatgaagaaaatatatatctgaaaataagagggaaaacccaaaaagaaataagcgttggcctaattaaatagctcaagtcaacatatatttattaagctaatttgattagggtagggatatcatgttaggttcggtattcataccaataaataattatgacagataaatttataaatccaataattattgaaaataaagtgtttatttgtgtggactgtggagagtggtagtatagtagtaaagaaaataaataaataaactgcatgtcttaaaattagatattaacttttgtttgattgtatatattatttaaaaaaaaaaaaaaataataatcaaaatttatgggaatgttagattaaaatacttattatggctctatggattagtgtacattggtatatgataaattttgactcaaataaaatgaccattttaataattatgggtcattaaatattaaagtatcatgaattaatgtgatcctcaagaaatgagagttgctctaattctcatatttcttcatatagagaaaaaattagagaaaccttaatcttataattttgtaagatcattacccaataagattatccctatcgaatagaataatattaattctatcaatggattaaagtatgtttgtgctatttgagtttttcttctctctcaatcaatattaagggtattcttaatttaaatttatgtttatacatttataaataatatgtagtatgtttgtatgtggaataaatcttagatattaggaggcgtttggttaggaggaatgaaaatttaagaataggaataggaatgggaatggaataaaatttaaaatgcatacaaaaaattgataaaaaaatcattaatttttttttcttgttacattagaatggtc

SEQ ID NO: 382408 - DNA, 1460 bp, Cannabis indica
aaaaaaaaaaaaaaagggacttctaattttagagttgctttttaaggaataatgatgtgtgggctctaactctatctgcaaaattgttcagtaaaaaaaagaaaactgtatctgcaaaattataaaaactttgatgttaaatatgatgggggctcctataatttctttttatgtacaatgtctaatttttctgttttttctacgtctcattattgtgttatttttttaaaacatgtattctgatagtttaacgaatacttcattgtaaatatttaattattgttacattacgaaatattaaaacagtaatcctttaaaaaaaccgaaaaaaaacaagcttaagaagatcacgcacatggaaataaaaataatttatatgtttccatctcatcatgtctcaccaataagtgagtgatgactcaatcaagaagacataaatttacacctcatggctcatactaattattgttttttgtataaaaaaaattgtctcatttttgtaacaactggcatctcaagtattaatcatatccatttatattattttttaagtattataaaaatgtgttttgagttgtgttgtaattttagtaatacattttttattttttttatttaaattaatgatgaaaaatataatactctaaatatttaatactcgatcttttattttattttttttcagttgaatctcacttttgcattattttctcttcatgttcatcatcttttccttttttttttactcttctactctcttcttctttttatttttttccattaacatataattttttttcttattcagttcttcttttttttcttttcttttttttaatttagttttttaaatttttagttatgttttaagtcacgtgttcaggaaagataagagttagtgtggttttttttattctgattttccagaactaagcttgcaaatatagtctctattgcatttggcgttgaggttgtgcagaagagggttagtttttttttaatctttttttattttattttttatttgttttagtgttgttttacagttatttgcgataatttatttatttgacgtcaattttactgttcttgctctatctcgccgaaattaatagttattttttgggtgttctcttgttgttgtggtggttctgaccgtaggtgtgaaagatggaagctataaatatatttcttcttccttctctatggctatttttgtggttaatttattctggttctcctataaatacatttgacgagctcactggcaaaaaaattttgaagtgtgtggttcttttatgtttttctaagtggttatatctgcttcattgttttacatttatttttgtgttgttttgttttgttatcccgaaatttgactatttaccaaaagttgacatgtgtactataaaaggaatatgaataagcccaatggttataattagggatgcacattttct

SEQ ID NO: 382409 - DNA, 1915 bp, Cannabis indica
agagctaatgtcacatgaggggcataatcacggtgatatggacattatgggaggtggtgacaagcctgctatgagtggcggcaacatgcccccaatgggcggcgacctgagaaacacaacagaggtgatgatgcactcgagcctttactggggaaaagatgctgtaatcttgttctctgattggccaaaacagaatcttggcatgtatatgcttgcgttcttcttaatctttctcatagctttagctactgaggttttgtcagtctctccaactgtaaaaactggcaccagccccatcaaggcaggtgctattcaagccagtgtctatgctataaggattggttttgcttatcttgtcatgctctctgtcatgtccttcaacataggcatattcatagcagctgtggctggacactcactgggattcttcctcgtcaaagctcgttcgcatgcccagaccaaccaagctgcttccaaagtttgaattatatatatacataactactttctatgttgtgtgtttacatgttgattttcatcttgagtgtgtgtgaataactctagtgtttgatgtgtgattgccctcccagataaaataataataaatgggatcttagggtgaggtttgtaataaagtcttctaaatgcggcctttgttcttagttatgatttaggttgttgactaaaagtctaggtctgcatttaaaggcaagtgtgctgatttctgtatatgacattatagttttgaacttctaaatttatgtgttggcttgcagttaatttatgatctgctgagtgcagtgagcaattaacagagcataatttagattgctgattggtatagtcccacaatgagatctgtgtaaagctcatacttgtcatcaataactagaatttgagcagtcataactgaagccattatccttaaaatttttttgttgtagtattggtatgataattagaacctggacaggtgaacgatagagactagaaacaatattgtaaaagagttacacgtgagacatttgtgtgttaccaggtaaacttgggagtaaacaggacagcatgattgattaagtgacagtgatgtattgcataatggaggtttttctttaggactgaagagccctatggcagggatgtggggggtctaccgttacatggacaggcgcggtaagacaacaagcagaatgtgaaccacattctggatttatagatgaaaagacactttagacaaacggaatccagaatcaaaatattccttcaacgtttcccctttgtgttttggtggctttcttatgtgggtgttggtaagagaagattatatgaaaattatgtgccagacagaggtgttctataagttgattaagattacactaggccaactttctatattagaatatcggtggtgtgtttcttcagctatatgttaggccttgggattagtatggtgggctagcttatattaaataaaagggtaattgagtctttgtattgagggtagtgttttggagggaatacaatagtatatatagaatgttaaggggaattgagtggtatgcaatgttttgagtaaatctctatttgcaccaaaggggcctaagggctcctatcctttgtaattggatttctcaatacattcaatatacaattcttattatttgctactgttttgctctaacttttgttactgttttattgaatatttgatctggggctctcgggtcttatcaattggtatcagagcgagtgatttcggtggaggccaactactcgaatggaggaattagaggaacagtggagattggaggcttatgatcgtctctctgaatttaatacacaggaggaccttgcttcgcttttggatcaagtacttcttggcaaagtaaggctactccgcctctcccgcgatctc

SEQ ID NO: 382410 - DNA, 2114 bp, Cannabis indica
agtgtagcgtaatggtattttagaatcaattaataacttgcagcttaaaggtcttgggttcgaacccatgacctctcatttttctcattcctccctcatcactaagctagtcttagtgacttgttattgcttgtatttagtataatattccttttgctacgtgtatgacctgtattggtactctatacctttctaagtgtcgtataactatataatgaaatgcacctcacaatagtaagctagttttccaatcattaaattactctatattttcagttgggtatttttgcttagttaactaactcatgagagttatagtctttaagaatctaggactcaatttctaaggtggtgcgagacagatttaggagtagacaaatgtaggagtagatcatccaattaatatagctttacttatgtgcattgatattagacactagtaatttccataattattaagaggtgatgttttactatattaataattattaaattaaaatataagaaattagataattaattaccgataataacaactaaagtaatagcatcaattgataagaaaaaatagctcacaattattatgtcagtcaatatcaatatcaaaaatgtagattgagattccgcattaatcaataacaaaagattttcttttcagaatcaatataataagtttgagcactcatatctttgatttaatttcataactaataagaagaaaatatatggtaattgtatggaatacatcatgacttatataggtaagagaagttaaatattatattatttgtttgtttgttttatttggggaatcatgtaaagatgcattgaataatgcgacaatgtatcgttttatttctattccagtaaatattatattagtagtatctatacggtattagtcttagtcatccaataactcaatgtacaattattttatgaagatcaggaaaatatcatatccaaaatattatataatctagcaatattccaatttttttaatgggtaagagacaaaagcaaataaaatcgtttcctttaaaactaataataataacaaataacaacaacaataataataaattgggatatagaaaacaaagtatggctggcctagcaatacagcataatgaagtgtcagctacaaactttgaaatttcatgcataaagcaaacttgtaattaagtggttttggttttagttctgtaatgggcattattacagctacttgtatactccaaaaagcaaataattctatattattgaaaatactatacatcattttcctttcgaatcattgtattgtagtaatggaaaagcatgcatgctcccactttctagaacgactcagccaaaacaaaagtgttcctaaaaaatttgtatacaaaatagaatttcaataagtaaacccatgtttggtttctcttccacatgacattgacaatgatcactatttcaactcttccattaaaagaccccaacaattatctttctaactttctttttgtctattttcacaattgatgctcagttttctaattgggtcattacttaaataattttttcttttttgctttgtgtagaaatacattttctaatgtatggtcatttgtatggtaatggcatgcgtatggaattgctcaatttgattagtcgtgagggagcctactttatgactatttgtatagattgtgtacaatttcaaactcttgcctcgacatagttgaggttttcaactcttattattgtctttctcaaccgattcccttatgtaacttcccttttccctcttgatttgaaccaaatagatcagtaataaaataaactatttctccctttgccactaatggttttaattactattttaccaaagtaagccatgttataggtaaactattcaaaagatgaaatatcactttaggcaaaagtagttataactgtgctcttagaaaaatcaattataatagaactgtaaaaaaaaagttaggcgtgtggtaaattataaattttagagtattgcaaattgttaagataatattataatgataataatgttataatctagttcattataatcataaatatttataaaaaattatgttatataaaatttt

SEQ ID NO: 382411 - DNA, 3170 bp, Cannabis indica
gaaaaagactaaagagttcattcttgaaatcaagcctttacttgtttagtttttccttgcctaagtttacctgtataatttttacattttgattttagttgtctcagcatatgttccttcttattttggttcttactattttacatatatttcttttaccctttgaatttaaggttctgatgaattgttgataatggaagagggaaaatattattgaatggtgtgttgtggccaaattattaattttgttgtactttattagctgtattgtacttatgcaaggcttagaagacttttagggttgtgccattatgctaattggagatggtggtactttaaattttgtgataacaaagcctaatattcttgaaagaaacttggaaaacgatctcatttcttgttttcaagtgctttggagggtgttctgaaatcttaaatatactaaaagcagggagcttggaaggcaattacggttattactagttggtagtgtagcgataatgtatatttatttcaaacgaaagacttaccatattagttgaatatttggatgaataggaatatacttgtttcttttaatatgtctaatgagacatttcaattaacactctggttttttcaacttgtgggtaatggaggatggagttgtagaagctttctctagtaatagttatcttatattcattggatcaagtgtcatagacgtgagccactatgaaaaacatttgtttcaagttcatgtaaagtaataaaacttcagttattatcaaaacataaaaaaagttctgtaaaaatgaaaaatataggtggtaaattttctcagctttaatattgtacatatgtgtatagtttgttgatgagtcttttgtgcaccaagagtagtttttgaagtagttcatcaccagttcacatcagtttgagaacaaataatgaagcttttaaccttaaggattatgagctatactatatattgaaatgtaaggtcatacaataagtaaaaagctaattcacaaaaacgtattttgatggaaatttgtggtttatagaaagaagctgcaattggagtaattggtcaaattttatttattgattaggaatacaaggcaaacatggcggtgagtggtgacactttcatttcattcaaatgttagattatcattaaattcaatctaagaatccactgctacttcttaattattaaaattttaactaatattatatataaatataaataacagaatcttgaatttacaatcacatcataagagggatagagactttgattgcttgtaatcaaggcctaacttgtaatttgattattaggatgattgtatatacctaaacaacgtgacttaaattatgtaaacaacatgttttattagaaaaaaaaaagtgatcaacatgttttattaggtagataaacaatgtgctttaaattaagtaaacatgttttattaggtaggtaaaaaacatgttttaaacaacataccttattagaaaaataacatgccttattaggtaaataatgtgtcttaaattaggtaaacaacatactttaaattaggtaaacaccatactttaaattaggtaaacaatgtgtcttaaataggtaaacaacatacattattaagtaaagtgagctagatttgcacccatagtgttattgagtacaccccaaaattttatatacatttttaaccttgtgtgaaatgacaaaagtagacattttaaaatgaaataaaatcatcttttaagaaatatataaattaaatcagttatttctaatcagtacaccccatttactttcatgtcttagttaaattgagtaacttctaactctaagaaaaattcttcaacagagcaacacagtaagaaaatttcattgtatgaatcattcacaaagtaagtttatatataaatatcttatcactttctttgtattacttcacttgaaattttttttactgctctctacttcataagataaacaacgtatcttaaattagctaaacaatatgtcttaaattaggtaaacaatgtgctttaaatttggtaaataatatattttaatagataaacttcataccttaaataaggtaaacaaaaatcaccatcctcaaataaggtaaacgacactccttaaattaggtaaacatcatgccttaaattaggtaaacaacatacaacgttcctgaaattaagtaaacaatgtgccttaaattaggtaaacaccttcttaggtaaacaagccataaatttaataaacaacgtgccttaaattaggtagacaacatactttattaggtaatcaatgtgccttaaatttaagtgaacatgttttattaggtaaactctgcgccttaaataaggtaaacaacacaccttaaattatataaataatgtgcattaaattaggtaaacaacatacctcaaattagataaataatatgcctaaagagttggtggatggcgatttagaaacttaaaacacctccaaagatcaagcattttttcccttttcaaggggatgattgaagcaagaaagtaagcattgcttcaaacatccttaaccttaagcatcacttcaaattttaaaatcagagacttgttgggacttgaaggagcaacactgaacttgtgaagcaaaatcttaaaacatggtagaaatatcaggtacaagatccctaagataaaaggtgcgacaataagccatccaagctagggatgagcaatacttaggaagtgtcatgtgatgctttttcggttaagactttcattaaagcattagttgtcaatagaaaatgagagccacaatctggagtgatgtttaaggttaggtaaacaaaattaactatcctaaaaaaggtaaatgacaaaccctaaattaggtaaacaacgtgcattaaagtagtaaataacatgtcttattacgtaaataatgcgccttaaaataacgtaaacaacatgccttattaggtaaataacatgccatatagtaaacaacatactttaaattagataaatgatgtgccttaagttaggcaaataacatgccttaatttagctaaacgacatgtcttattaggcaaactacgtgccttaaaataaaataaacgacatgccttattaggtaaacaacgtacctaaaataaggtaaacgacatgcctta

SEQ ID NO: 382412 - DNA, 2232 bp, Cannabis indica
ctaacaacaacaacaacaacaacaacaacaacaaaaagtattaatagctaaaaatgcagagcaaaagcatttctacaacatctcaatcgtttagctacatttgttctagagcaagcataactagcatagaggcagcagacaatattggattagatcacgataatgatgatgatgaaggttccattgttctgtctctcggtcctcccggtcaacacaataatgatatctccaagcgttactactacaaacccatcttccatcaacaacatttttcctcctcaaaccaaccgcatcatcatcatgaaaaatataatacaactcaaatcagtactactagtactagtgagaaagctacaagtgttaccgtagctcttcatgctggccttccagattctcatgatcatactcgtcagactggtaataatcataataacgaaactacccctattgatcaaccccagtattggattccctcacccgcccaaatcctcgtcggtccaactcagttctcttgctctgtctgcaacaaaacattcaatagatacaacaacatgcaggtaacacattttttatatatttatattctgtcaaaaataccttattaattagtatacactaaaccctaagttgaatttctttaaatatatactctcatataaggttagagaaatccaagctcaaaacctctatcataaagttatggaacagtaccaatttggtaaatataaaaagagaaattacaccatatctgaccagtgtgggactaatggaatgaattgtatgtttagatgcacatgtgggggcacgggtcgcagtaccgaaagggtccggaatcattgaaaggaacaaaggcagcttcgtcaatgctgaggctgccgtgctattgctgcgccgaggggtgtaagaacaacatagagcacccgagagccaagcccttgaaggactttcggacgctgcagacgcactacaagcgcaaacacggcgccaagcccttctgttgccgcaagtgcagcaagcccttcgccgtgcgaggagactggcgcactcacgagaagaactgcggcaggctttggttctgtgtctgcggatctgatttcaagcacaagaggtcgaaggaccatgttcgtgcctttgggctaggtcacgcgcctcacgcgatggagttgtgtgaggagctggcggttgaaggagatgaagatggagaacacgataatgatatggataatgaagaagaagatgatgatgattgttattatgattatgaagaaggtgataataataatgatggtcttcgacctcttttcttttgaatatattatgattaattaaccgttaattaattatgtacgtaacgaaccagttataataataaacttaatttctttatatttctaattggtgcactacgtattaatatgtataccatgagagatcagagagagagggctagagaatgcttcgacaaagactgtaacagtatcatgaagaaagccacgtctgtaattttaatgcatattaattccggaagctacagtcatatgaagattgtacaattaattataaaattaaaactttgttaaacattacaaccttctttcaaccaataatttttatttaaaataaaatacactgttttggaatgtatttacaaattttatgtaatcttttagtgcaaataatttcactacacaattacacttatctatgtaaaaagttaatattaaaggaattataaaaccagtagtttctattggtttatagttactataaatacagcttcattcttgtgttacatagtttagattcgatccatgaccccacacatgcaccccaatatgttctatgaggacttagctaattaattggtttataccttgtcacaatatattatttagtaaatgaaagataacacataatatatatggggccgggcacacaggcaggtggcagaagagtagtcattacaaaccaacagtaataatgcaaatatatacatatagatatatagaggatgtgttaatgtgattaattaggtcaataagtgaattccgtgagatgagctatatggctactaccagacatgcataatgtattgcagagaacagagcccacacttatataaatatatattatatattatatatctttgtgtactgttcacaacttgtgcatatttacatatacgcatgtatattagggcctagagagagagagagagagtaatttaattta

SEQ ID NO: 382413 - DNA, 1302 bp, Cannabis indica
acgaaaaagcaaatggtacacagtagtcatagcaatgtttattaattaattatgtacatatatatatatatatttgatttattagtctttttttcatctgcaaagcaaattgattctatatattaaaattaaaacaaaattattataatgatatatgatgatcgagtttgtttctagacaatgctgaactgtactattcctggctttgtggttcatattaaatatatatattataacatgtgtcattaagcagtttgtacgtactaatattgtactatatatgtattgattaattaatataatttcagtaaatggattaattgttggatatcaaatatggtaaagatcatatattatatatgtgtgatcataaaatacttattaaaagttgaacttggaaaggctactgggacttttgtcaaaatagctaggtttgtagctgcagagtaattatagtatatattttatattattgttttggaaaccctagctagtaagacataaaattaattacactgaatctcaaaggtttgtttttccatattaatcatttaaactacttaattaatttcttttgtaaaagggaatcatatatataatgggaaaattctatatataaagcattttaagtttttttttggtatttgataatattttagtctaatattggtcgtgtacgctgtagttatttaagacattctgtaaaattttaagaaattcgaaaaaatttaacacgttcaaaataaggttcaaacagttattgcacgtgcgactcttttattttatatgcgtgtgaaatagactatttttgaacattactttctatattgtaaattattctgaatacctatagataaagagtgcatcagtgctcccctttaaggaggttgcattataaaattaattagcaccctatatagtgttgatgttgatcatctatatattaatggaaacttttacaatacacccctaaaaaatggtccattgttgaggcattccctatctgttttagtatctgagagaattttttagtgtaatttctttccatggtcgtctacgtttatttaagacatcctgcaaaattttgagagattaagaaaaatttaacacaccgaaaataggatccaaacagtcggttgcacaaaaaactcttttatattgtactgttcgaatcttatttctggcgtgttaaattttttaaaatttctcaaaaaattttaagatgccccaaataaccgcaacatagaagacccatgaaaaaattggactaaaaaattctcctaaatgtcgaaacagataaaa

SEQ ID NO: 382414 - DNA, 2735 bp, Cannabis indica
gattaaggtgcggttggacagggctttagctaactcttcttggatgagtttgttttcgaatgcgcatttggctaacttggttttttctacttcggatcattgcctttatttttagacccctagtttcagtttcaccctgcttctaagaaggcttttcacttcgaaaattcttggctgcgggagtccaattgtttctctataattcaggagcaatgggatgactgtttgtcacgtaatattgttgataaagtggctgctattcagggtcctcttagcatttggggaaaaaatttaactggaaattttaaggagaggattcaaagttgtaaaaatagaattggtgttcttaaaggtcgcagagatgctaactcgatttctcaatacaaataggtgaaacaataactcgcttaaatttatcatcaaaaagaaattttttggaggaaaagatcgaagcaatttttggcttaaggaaggagaccaaaacactaaataatttcacactgctgctagttctaggcggagaaataatttcattcatcagttgaaggatgatagcggtgcttgggttcaatgggagtcggggttaccccaagttatggtaaattattttactgatatcttccattccatggggacgtagtgtgatgacattcttgatgttattcagccttctatccattttgaggataatattactctgttaaagcttgttttggaggaggaggtccgacaagccgattttagatgcacccggacaagtcgcttagtcctgatggtttgacatcagctttctatcagaagtgttggcatatcattggaaaagatgttgtcaagcttgttcaagattttttccattcgaaggtaatgcctcagaatttgaatgtcactaatcttatgcttattctaagaaagaaatctccttctgtcatgggagatttgaggcccattgctctatgtaatgtattgtacaaaatcatctctaaagtaattgctaatcgggttaaaagtttactgtcaaaggtgatttccaagttttaaagtgcattactgacaatgttcttgtctcgtttgagattttacactttctaagacgtaaacaacaggggaaaaatggctgcatggctctcaaaatagacatgagtaaggcatatgatagaatagaatggtcttttctacaagtaatattactttagataggttttgcagatgcatgggtcaagatgatcagggagtgtcttcagactatttcttataacattgtgcagggcggggaaattctgggtcctataattcctactcgcggtattcaacagggagatcctctttctccgtatctattcattatttgtgcggaaggtttctctactcctattcgcttgtatgaggagaggaagtgaattcatggttgccgtgtggcccatggggcacgttttgtctctcatatgctgtttgcagacgatagttttctttactgtaaagcaaacagagaggaggcacatcgtgtattcaagttgctgaataagtttgaaagattgttggggcaaaaagtgaacctgagcaagtcatcgattttcttcagctctaatactgatgatgggactcgtcatacaattttgtcaactcttcacatgcgagcagctgatgatcatcgtttatatcttggtctgccaagtgtgctaggaaggaacaagaatgtgactttcggttttttgaaagaaaggtgagaaaaagaatccagaattgggatagcaaattattatctagagcaggcaaggaagtgttattgaagtcggttatccaatctttgccctcttatgccatgcgtatttttttaatcccgttggaaatttgcaaagatgctgataggcttatggggcagttttggtggcatactaagtcttcacaaggtcaaggtattcattggaaaagttgggataagcgttgtctccacaaacataaaggtggtttgggtttttgtaatctttaggattttaatttattaatgttaggcaggcaatggtggagattgttgactaatcctagatctctagttgctcgggttttcaaggctagatattatccccaaggttcgttttttgatgctgagcttggagctaacccgagctatgtttggaggagtgtctttgaggcccatactgctgttaaaatgggagctagatggagggtaggtactggggttttctatcccttgtaaggagaacccttatgtgatttcttctcatgtagctctccaagagtgtagagtcaataacttgttaaaagccaattgttttgaatgggatgatgaagtgttggaggacctgtttgtacatagggatattgatttaatttggagtatccctctgtctccaacttcaggtgaggatacttggttttgggcacttgaggcttatggtgcttactctgtcaaaagtgcatgtcgagctttgtaggtgagtagtcggacatggtactctcatgataattcaaatatttggaagaagttttggagcttgaagttgcctcagaaagtgaactttctctggcggggtcttacaaattgtctcccaaatcttgcttctcttccatctaaatgggttaatgtgagtagtttatgcccactgtgtagtagagaggatgagaccatctgtcatatcatgtttagcattcctttcacacaatcttgcattgatagcggcttggtgttgggctttatgccctaaataaaactcttt

SEQ ID NO: 382415 - DNA, 1591 bp, Cannabis indica
aaaaaaaaaagctatggagaagtagaacctaccaaatgcagatggaacctggtgttctaattcagacatgaaagttgactgttgaatgtagaagagcaagtaaccaacaaaattgctttggtatttaagcaaatgaaatctgctcaacaaatgacaaagctaaaaagtgaacaatacagctattattttacatttataacttaaaaattagtgatcctttcttataaaacattgcagataagcaatatgaaattcatcaacgctaaaagtaagataattgaggtggactactttcacttcatgttcttatacatacactatcaattataagaaagatccattcataaaattcctcaccttattaaataaaataaaggcaatataaataatctcataaacctaagatatttctttttcatatacttgttttcgcaaccaaaaattaacctttacctatagaaggcaggaaatcctacataggaatcgaacaccagacacttcgcgaaaagcaaaaggaagagtggaatcttaatagattctaataactcagataaataaatgcaaataaataattaagaattttagtattatatttttttttgaaagcaagaattttagtatttagttcatttagccacacttcaattgtggatcatttaaagttacaccattgaaaacctagtttttgtttccattaaaaaaagaagcccaacatattcaacccatcttgctcatgttccccaaaattgcataagacatttatttatttatttatcaaaaagaaaaatatttatgttaaccgtaaatttcgatctgcaatccaattcttagattcataatctgaacgaatataatcaaacacctaaagagtcctaaaagaaaagaaaagaacaaccaacaccgacagaaaaaaaaaaaaccctaaagatggtatccaaaacacagattgaaagagtgaaaatcaaattaataaaaaataaagaacattaatattatagcaaaacccgatcttacgacgaaagagtaagaagagaacaatacctaatacgatgcagaaaatagagaatctaagcgaggaagggagcgagcgagcgagggagcgaacgagcgagagagagaatgaagaagggataaaaattaggggagactttatatagcgagttaccaaaaataaagatattcctattcccaaccacataaaacaccttttatcaaaaaaaaaaaaaaaaaaaaataaaaaattaagtacattaaaagttaaaacataaaaagtttcggtgttaattactcatttcagaaactataaaatacattaatagttagtaatagttataataaaaagaagaaaactaaaagaactagtaaaagaatgaaattatgtttagatatagtgcgcagattataattacattttattatttacaaaaggaaaagaattaattatgcttataatatattatgttattcaaaatgtgcaataaatatttattcaagaatacaaaatgttcaaaaattataaaaagtgacaaactaacgagaataaatatttaggtgttttttaaagcaccaaaaaaacactagttataatatg

SEQ ID NO: 382416 - DNA, 1530 bp, Cannabis indica
tttttaattttaatttttattatgttattggcacatctcatgccgtcaaaaatgagattttatattaataaagtattatgatgattatatatggtttaatttgtgggagactaatgtttttttattgatctttattaattaacaacatatagtatctcaataatcattgcattctttaaattaatcactcctttatatttttaaatacttttgtagacgacaatttaaacctgtttgataacaaaagtaataatatacatataaattatacacatttttttatctacacacatctatatgacttccttaataagtaaagatgttctctttttcacaataaaaaagataattgcattaggaaaatttgataaagaggttacagtgttttgaatcaaatttgggagagaagatatgtcctttcatttatgcttaattttgttcaccaagacttggcaatctgacataaagttaaagggaactttactgcagcacaccagttgagagcattggaaagagcttgtgcttctgcataaatagggagaagaacacttggaagagaataataacagccagccacaacatcccctttactattttgaaccacaacaccaaaaccaaaccacaatttatccttacaaatggtatagcatcagtgctgggtagagattgaagaagctgaagtagaacttggatcaaaactagtaatgagcgctgcattttggaaagcattgtgttgtacattggagtaatcttgcagcaaagagacactccaggtttccatatctacaatatgatcatgattagaattaaagatagcattatttcgtccattccagatagtcctgagtacgtcaaaaaacaaagagagatctcctttgctgaaagtatcacataacagagaaaatctttaatatcacaattgttggataaattcccatactattgtcccataaataaagttacaaggaaaataaattagacctctttataaagcctcaacagaccattataactcatagagttgtcggttctgttttcctaggcttaggtcttttatttcttaacaataaaaggaagcaaataaatatctcaagactctaacaactttcagctttacaaggaaaatatcccaacagattacaacaaactttctcagatcagaaacaaacacaacaacaacaacaacattataaataagtggttcaaccttccactttgagcaacacaccatttcggccagcagaaataaaaggcagcaacctttgtttttctttgtgtaacccacctcagaaacaagagagaaaaatagagagagttagtgagagatattgtaagaaaaaccaagagaaataaagtgaagagaaagagattacctgctgggttttgtagcatggaatctccatgaacttgtaaccggttttgacaatcatagtgaagaatcaagcgtctttgagggaagcttgacggagatgtactcttgatttcaaggggaactccgaaatcaaattttgttgtgttctcctttatttt

SEQ ID NO: 382417 - DNA, 1716 bp, Cannabis indica
cctttttcccttttttatttagactgtaaaaaagatagaattaaaaaaaaattcttttttttttttttttttttttggaaaaatccaacatcaaaacacacccaaaagaaattacaaaacaaaaacaaacaaatatttctagtgctttgagaaacacaaataaaggaatgagaagcataattctatttctagtgctttggggtccaatttagtcccctaaaagttggtctaaaaattatgcacacaatcaaagaaatacacaaacaaatccttacaaagatttaatcctagtaaatcaaatatcattaacaatttttgtgttcttccattggttcaattggtcaaataattgactcttttgaaaaatttcaaacacaattctatcctatgaaacttttgtctttgttttttattccaagaatttagttattacaaatataagagagagagaggccaagcttgaaataagggaaagtaccaattttccaacatataatttttaactaaaaatagaaacaaattggcctaattttccattgttcacattcattcaaacaaattaccattcatcacaaataatcatccatttccattaaacatttttctttttattatttctctctgcatgaaaaatctcataaacttattttttttcacgtaaaaaagtgaaaaaataataataaaaaaaaaatgttcactactttttctatgtaaaaatgagtgttctatagaagaaaaaaaaggctaagcataaaaaaaacacacaaaattcaaacatcaaacatggcgagtacaccatcaagcccgccaaagaaaccgtcgtcggggcggccgccggtgaaatttgctcgtcgaacgtcgagcggccgcatggcgagcctatctcgggacgacgatttagaaagcatatcaagcgaattctccacccaaaatgactacataaattacacggtgatgatgccgccgacgccagacaaccagccagtggccgaggagaattctggcggaggcggtgacggaggaggaacgaaaatggaccggagaatatcggtgatgaaatcgaataataataataataataacaagtcaatgttggtgagaacacaaactggggattttgatcacaaccgttggttgtttgagactaaagggaagtatgggattggaaatgcttattggtctgaagaagaagagacttatgaatcagatgttagtatgtctgatttcatggataagccatggaagcctctcactaggaaggtcaaggttcctggtggtgttcttagcccttacaggttcatacattatataattatatattattatcattataacaatatttattctctttaattactcattcataaccgaaacaatacttataattggtttgcgctaaataaatcaaaatgtgtaagacctgatattgaaatatgaataatatatgtaatattttttaacataaggtacttctaatttatcttgttaaagagttacgagtactagtggtagaggtgtatgttttattggatttcggatttttgagttcgggtgtatagaataagtaatctgaacccacccgtttgtgtgagtttttgggttttgggtgtaggtggatcaggttcaggttgaaccgggtccgggtgggttttgaccggtttaggctgaccttttttttctttcttttttttgaaaaatatcatttttatacatttt

SEQ ID NO: 382418 - DNA, 2104 bp, Cannabis indica
tatgtttctgagtgtgcaatcatactagcttgtcattttgattttgttttcgctttctagactttttgttatactgtttgtgattacttctcctctgcagattgttctttctggttttggcactggagaacaacatctaaaacttacaactattatgtttcagaacatctttccagctattgatattaacactgtgagttctctgagtttacgagtcaaattggacccaagtttattttgccgttatttttttgatctaaaagagtttctggaaacttatatggttttcatgataatgtttcaggtaaaacttgcttcctgccagagaattgtgttactcaattacaacaaagatactaaactcgttgactttcggcattattccattaggttgcagccagttggtgtctcccgtagaattagaaaatttgtgcagaaccatcaagtccctgatcttagaaatcttcaagatgttagtgactttattacaaagtaaggattctggattttgttttttcaaatgcgtacttagaaaagtaaatttcacttgcagaatggaagcatgttccaaaagcaaaccacttcatatatgcttattagaacattctctttcgaatgaataataaacaagtcttgtcttgtctttttcttgatatctgaagggccggttatggatcagaaagtgaaggagatgatgaagcagccacagtaactctggctagtgatattagcagggttaatcgagcttctactaaaagtgccatcaagcttcaagagattggaccgagaatgactcttcaactcatgaagatcgaggaaggattgtgttctggaggaactatcttcagtgaattcggtatattggttattttttttttcatctgttgttccccttagaagagaagaacatgaaagaaatcatattgcaaattacattttcgacctcatttcttggaagtgttctgttttcttgaggcatattgcactatttttgctctcctaaacccatgcttgaatttgattgtttgctcctttttaataggagatggtgatggcaagaaaaagcaaaaggcccaaaaagaagaaagcgaaaacgatgaagacgacgatgatgaggaaatggatgaagaagacgaccaggaagaagaaagtgaagaagaatttactgatgtcaaggaagactaatggcttagatatcatcataatggtgagcagttattctctccattcttataaaggtatgcgcgataccataaattttgagtgttttagctagctttcgaagagtttaggtagaaatgtaaagcgaccatctaagtagacggttccgctcattaccatgtatttttctaaatgtttgttttattcaagttaaggaagctcgattgtttttaagtggaaactatattttcttttgctttctatatccttttctcaatttttgttggtttgggccttggggaaaattggtagatgtgagactttatgtaggtgtaggtgattcccattgaacttgtataaagattataagaaaacttgttgcaaatttctgagtctacaagtatatttattaattaatgacacaagcatttaaaatgtagtgggagtgggacactataggaaattttctatgctttaagagcctatgaaaattgaggtttggttggtgacataagcatttgaaatgataaatgaaccaattttaatagtttttttaagctactttagtttaaaagtaatatttttgggattctttgtgtactaagtaaaatgactttttttaacttttaaaatcattttctttttttttttttgctctaaaaagacaacttcattaaagtaattatcaaagaaagtagtagttaaagcccaaataggaagaaatcttgcaactaatagaaatggttttaagagcactcacatcatatgctttaaaatttaaaatatttaaaaaattaaactaaaaacacgcgccatatcaaaagttctaaagtttaaatttttattttattttaaagcttctttaaaattcactatttatactctacattcatagaatattattcattactcaaaatatattttattaattatttgaaatttt

SEQ ID NO: 382419 - DNA, 2080 bp, Cannabis indica
atagtgtactaagttactatttcatgtgtatattggctttatttttacctttagtcttcctagaactgcattctttagtatattagcaaataagtcaatggtcctaactttttcattcctttaggaaaatcatgatagggaaaatatattagcatgacattgtgtttggtagggctttctggtaattttgccgtacatgtgctgaccctttcttttctttctttctctctctgtattaattatacatttatttgcatcacagaagtgcaaatagtaagagagtaggtagtaagtaagtgcatacatagtgacttcatagtcaataataacaaccacatatcatcaagaattgctattgtatctagtagcaccattttaaaatgacgtcttatgattagttagcggtattttttaaaatttattaccttaaattatatgaaacctgatacttaaaccttcttttggatggggttgattaatttaataatcctatgctgtctaaatttaataatgagcatggaagaagggacataaaaggcaacttagattaactgtaagatgtcatggtattgtatatggacagtgattgaaacaagcaaccataagttgttgttaggacctgtcttccattcttctgagtatgatttgctgcgtcagagcttttaatggtgtatggtgagaaaccaacagggagcaacacattaagtaatggcctagaataatggctttccatgatgctgatagagtcaacatttcccatcagcatccattaagtcaacttttcccacagtttccttatcaaaacatttttgtttaatatgcaggtttgtacaggtataagctgggagatgtagtgaaggtaatggggttccataactcaacccctgagctcaaattcgtctgccgcagaaatcttttgctcacagtcaacattgacaaaaatactgagaaagatttgcagctagctgtggaagaagcagccaagctgttagctggtgagaaacaagatttggttgactttactagtcatgttgacatgtccactgatccaggtcactatgtcatcttctgggagctaagtggtgatgccagtgaagaaattcttggcgaatgctgcaactgtttggacaaatctttcgtcgatgcaggctacatcagctcgcgcaaagttaacaccattggtgctcttgagctccgagtggttcgaaagggaacctttcagaaattaatggatcattacttagcattaggctctgctgttagccaatttaagacacctcggtatgttggaccaacaaacaatgtggttttacaaatcttgtgctctaatgttgttaaaacctacttgagtactgcttattgaaattagatatggaaaaggcagctttccggtccaccatattaatccattctacaaatatatagctttagtctcattttagtatctatttcttcacatatatataagtgtccatcaatatgctgcatctaaataaaattggtgtcgtttttctgttcaaatggtattagagagattacatattcttgtttcttctttccacttgctttgtgtctttttatgaaacttcatttcgtagcaaaatcctcctccttttaacaattaaagtgtattaatgtactcctttgtcaaataatgttgccccactctttaggggctcaagaactttgacttgtagtagagtaatgtagttttgtggggttaaggagtagtggtggcccatacatatcactgttggatagaaatttttgtaaaagaattggatatgaagaactcaactcattccacatgctggtgggaagtagccattacactgaggctaagtgacatatgacacatgccttttttaatggtttagtgcagagatatggtaagtgtggaccacttgaacggttgatgagaagaggagaggagagtagagaatcatcaatctctatggtataaaattaaaactaatcctaaaaataattgctatatgacaatgattcctctcattccccaatccctttaatccctacggcttaaattaatcatgttcctttgttaaatgaaattaaacac

SEQ ID NO: 382420 - DNA, 2241 bp, Cannabis indica
atatttatatatatatatatatatatggaacaaaacactatgtcttattttaaaaatttcttgttgtacattgcctatgtcttattttaaaaattgaaacccttgatgactctgaatttttttggagatatatttggtaccattttcttaaaaataaacactatttatatatatatatttatttatgtatatatacatgtatgtgaagtgaattatgatatgtaattttaatttagaaatggagcatatcaaaaatcaagaattgttgctcttaagagagagtttgtttgagaatcagttaggccctgtcaagtgacacgggtggacatcaaatatcaacttgttcctaaaataagtgaaagtggatattggtagcggtttggtgaagatgtctgctatttgatactctatctctacatatcgcacatcgagttgattggctgacactcgatcctgcacaaaatgaagatcgatttcaatgagttttgtgtgagcatgaaagacaagatttgaggctaacgagccagcactaaggttgtcacacgacaacataggatagttactcaacgacaaagataattcagtgaatagattgtatccaaatcagctcagatgtggccaaagcaaaggcagagataatttgaaactagaaaacatgggagtgcagtgaggtttggaatccagcatcttggttttgattaaaaaatctttggcatacttatgttgagtcaagaaaaaggtggaatcatctttgagatcctcaaacccaagaaagtagctgacaggtccaagtttctttagagcaagcagattatgcaacttttcaataatttgattgacttgagcttgatctgcacgagtgattagtatgtcatcaggatacataaggatgagaaaaagtttcgcattagtgttagtgaagaaaaaacttgtgtttgatttcaagttgaggaagccccactatagtagagaagatttgagcttatcaaaccaggcccttggggtttgtttgagtccatatagagcctttttaagtctacaaaacatggttgggaaaggcagggtctacaaagccatgaggttgatgcatgtaagcagtttctttgagtttcccattaaggaatgcattgtttatgtcaacctgctaaacttcccaattattagcggctacaatagttaaaataatacgaattgtgcatggctttattactggattgtaggtttctatgtagtccaaactaggggtctgttgaaaaccctttacaaccaaatgggtcttgtatctttcaactatgccatctttgttgtactttatctaatacacccattattactgactaggttttgcttctttttaaagaaactccacattcattgctttatttcacactagacttgcaagagaaaccttggttgttggtttagtaactaaagaggtggtggcaatattagattttggtttaaagataccaagcttgaatctagtaaccatgtggtgaagattttgtgtgatgtttggtgctaaagcaggggaatttgtgctggaacttgtcgtaacgactgatatttggagatagggagttttttgagttttgagttaaggacatggagttgtttgatgattgattgataactcaatggtggaatgagttaagatagagggagttggggaaggggtggcaggggtgcaaggtttttaggcatagtagttgtaggaagtgtataagcacatgtctcaactatagtgggagcaatttgagtacatgattgagaagtagtggtaaagagatttttgtatgaaaactcaaattcattgaatgtgacactacgagccacatacaccctaccactaggataaaaacacctgcaacctttggagtttagaaagtagcctaagaacaaacatttagatgatcgaaaggaaactttgtgatattcacaagatcttaatagaagaaaacaagaacacccaaaaaaattcaacatattatggtcaggtgtttaatgaaaaaacttttcaaagggagagactaagttgagaacaatggagggaagcttatttattaattaagttttaaatgtaaaggctgatggaaatattttaccaggatctagatttaccaacaagtatgtttcattaacattgaacctggatctctttctctccttcctttgatgttgattctccttcttgttgattggaatctcctacagtcttacacactatgattgagataccac

SEQ ID NO: 382421 - DNA, 930 bp, Cannabis indica
tgtctaatagacttttgcaagattgtaatcagtttacaatcttacaaaagtctagttatttaacagtactcacgaatttatcgtgagactgtttcaagcacaataattaacacaattttctttttattattattattaaaatgacaaactcaaacccagaattccctcaaatcaatttcattttttatgatctcaagaaataataataataataataataataaaaatgaagtacctgaaactcagttacatcacaaacacaaatctttccattgtagaagattgtaagtggctgattttgatttgtagtactacttctgttgttcatcatcatattactatttttattcgaatacccatcatcatcatcttcaattttcctacataataataacaacaacacaacatgttatatataattcattattaactttatatatatatatatacatacatatacatacataaaatatatagagagagaaattaagcttacatggaattgtgaatagggtagttagaattaagatcagcaactgaaaaagcagctgggacaagttgaagctccaaattgcaattcctcctcatatttcaacaactattatttcttacaaatatacttaatataatttagaataaagagagaaaaaaagaaaatatgaagaagaagaagatgtttttgagtttgataataaaaatggtgtttggtttgatttatatttatacatagaatccaacaaaagtttgtgagttgtaagaaagtggggcccactaaaacaaagcagtgatatgtatagactttcgaacacgtaaagcacaaacctttaactctctaaacaaacagctaataatataatattatacaacaaaaaaaaaaaaaacacaatttcatcacatgcatcacgttttttatttatttcttcttttaat

SEQ ID NO: 382422 - DNA, 3825 bp, Cannabis indica
cagatgtttagcgaagtagtagttatacactgcgaaatccacatacgaaatctctgggggattccaaagcactccaacacatggtcaataaacttccaacacaacttatcataggctttgaccagatcaatttttatagcaaagaaaccctctttacctttcttccggttaaaggaatgaataatttcttggacaataacattgttatcatggatattccttcccggaacaaaagcagcttgagtcggacagatgaacgagggaagcagaggcttaatcctgtttgctaaaattttggagatgactttgtaaaccacattgcacaaagagataggtctaaaatggttcgtttgggtcggattttggacctttgggataagcacaacatttgtggcattaattcctctatgcatatttcccgtcacaaagaagtctaaaaccgcatcacagaagtcagctcccactgaatcccaatagtgtttgtagaacagaaccgacatcccatcaggaccaggggccttatggttactcatggcgaaaagaactctcttgatttcatcagggctaggaccactaaccagggccaccgcatcttcgggagggattctttcaggaattaactgcgcgcaattgtactcaacattattgacagttcccgcgaaaatacccttaaaataatcaatgaattcacgtccaatagttcgtcgaccagtaatccagacattatccttattcaaaatactctcaaggcctccattttagaccatgatacatttggctatagctcatatatacaaaaataaataaaagagttgctttaagcttcacaatacacattataattatacatgaatgaaaccacttgcgtacacactgtttagaaaattattattattattttaaaagaaaccttggtttcattgaaacataattttagactctcactatttagggtgcagcactccagcgctttgtctagtggcataacgctttattactctcccacaattccattttcacaatcagtcaacacccacccccacgccaccccttgattgaaacaaatggtgggagaaccatcgacgagacgatttaaagcctgtatggaagattgtaacttccgattgtgagaaacagtaatagagtagaagctttccggatatagtagtttcatttgtcccgatgcatttactgagattttcatatggactgaagaataattaattaatagagaaagtatgaaatgagacaaacagtttttaacgtggttaggacgttaattagccttagtccacgagttaatcttattgagtaagcttgtacttgtaaatgccttaagaaatatacagaatgtatgttctcaagtttgcttgagcaaagtatgcaaaagagttcaacccttaatctatgagactaatggacatagattaacagagtatgtatagtaatttgagaattacattaagtttcccttctctctctattgcaaagttcagtaaagaatatttgtgggctttctcatgaagtccagcctgtggagaagacgatatgctgactagacagattgtattagagttgatttggttaacacagcgtacactaattgtgggtaattattttgaattaattgcacaatatttgttgtaggaagttttccctttaatcttgattcgatgctttgttgtgatcgacaattaaagtttccttatttatgtgcaggattataaagagaaactggaagggtcttccgggaacgtggtgtctcatctctctggtctcgtggtgctagacatgtattccaggctcagtttgctgaaggtggaagactttgcaagtgcagaaccacaacctgttcctggaaggtaatacccagttaggcttgactcattttgtctttaatgaggttcccactgatgggtcttgaatgttgatctggagtccacatgtccaatgccaaaaacgtagataacatttacccctaagcttccagaatattgtgtatagtggaagcttgcatcactctcttaatttaaaaatgtgaagattgttcttacatatattttcagacataaaaaaaaattaactaagagattataataaaaaattgacttaagatatcttatatcatacccaatatatatatatatatgaatatatatttatatacctattgtattagctcccatctatatatatttatatatctttaggacttctatgagcaatctagtagtgcaaagtgcaaaccaagtggaaccttttcacattaaacaaaaaaaaaaacttttcacatttctaaagaaagctaacttgtccctctacttagggatgaaattttggccgttggatttgaactcttttcatcacctacaacagtatacagtatgaatataatataaatataaatggatttggattgtggatgttgacatttgtgttgacttttttctttttaattatttatttagcatgttttggactactcataaaccagcataaataaagaattttgagttaaaacggcaaggaatacttttctctaaaccattctaaattttggactatagtgattcaaatttcaaatagaaataaaatatgcagtctattcttcattaaataaatatataccaaagtgattataatttaataacttctcaatgtgacaaaatgagtgaaaataataaattatcaggtgctcctactaattatttaggaaaaaaaaataccctcaaacaaatagaaaatatttaattattattctagaaatttaaattgggaaataaataattaaaattgaaacggccggtcactaatcattattgttgaagatggaaagctagaaacaaaatcatgagaataaaaaatatgtttctaaattcgtgattaatcgaaacattagtatgtaccattagtcatgctatttgggactgtaaaatagttatagaaaatttggaataaggtcaatattttggtgaacttactacttagcaaggttaattaactagggatctctttcgaataaggtcaatattgatctctttggtgccttagacaaataagagctttgccattgtgttgagggttgtctctttttcctaactttgaagcctcagcctatatatgtgcttattataattgtgatgcttctctttgtaatggagaggtttgactatggtggggcagtgacggacccaaaattaaattttagggtaggcttagttatgcatttaatgtaattcaaaacaataaataattagctaaatttaaataaaatgatagtttagcaacatcctccgtttatactagtcataagtttgaaccttgtactacattcgtttattctaataaataaaaaatagatacacatagaaaaaatggactatgaaattcaaaacatggtctcccgtgtaaatttaaagtatcttaaccaattattctagctatttgactgttatgtatatataaaaacaaaaattgtatatttatatattagccctccctcaacacccctaggtccgcctatgggtgggggtgtggtggttagaggatttcagggagctagctagggtggcctatttagaagttgtgttctttctagggcggttctcggcgaaagatggaagaatgtatggccatagactgttgagaaactcccaacttcatttttgcatcagttctgaatcttgattgtgtttttgtatcaatgctgaagacatgtgatgggttagtttccagttgtgctctaatttgtcccactctttgagagaggctaatatgacatacagtagaacctctatttaaaaatactctattcaagaataacct

SEQ ID NO: 382423 - DNA, 539 bp, Cannabis indica
aaaatgtaaaatattgtcaaatcaagtgggagttctttaaagaaaatatctttctaaatttgactctgttctaaattaacagaggttaaaaaaatgaggacaagaaaaatgaattaagaacttgaaggaaagtttaattaactgagtgaaaacatgtaattaaatgttctagtctttcatattcaattcaataaactatataatcaaatataacagtaatttctctaagtttatttagcataatgtatatatctatttatatatggtaatacgaccaataaaacatttgtgcaattcgatctaaagggaacgcagatccatatttgattttccatgaaagcatgtggctataaatgatgagtttagcctttctaaacttcttcgatacttgtggagttaatccactctttctccttgataaataaacccttatacataatgtatatatatatatctattctatataaagtgtgtctatataactaaatttttggtttatgagaaattaatgggtgtgactttttatttatatttaataa

SEQ ID NO: 382424 - DNA, 1895 bp, Cannabis indica
caagatcacatcgaggccattttcaatggactccctgctgaatatgatgtgtttgtaacctctgtcacaaccagaaaagatctttatactgtaccagaaatggaggctctcctcatggctcaatcagctcgcatagacaaaaatgccaaggctctcgacatcagcaaaagtgaggccaatcttgctcacaccagacccttccaatctggttttcccaacagaaatcaattctttggaacaccaccaggtttcaatcgtggcttccaatctcgccaatatgaatctatgcaacaaatgaatagaggaatgtaccaaccaggaagaggcaaccacaacaatggaggaaatcgaggtcattttccatctggccgtggacaaacagcctcaacaaattcaaagcctcaatgtcaattgtgccacaagatgggacacactgtgaagcaatgcttctataggtttgataaaaccttctctggacctgagtcatttaatcaaatgaatccagctgctaatcttgctgaaatgcaagcctatgttgcctcctcagaaactgtagctgatgacagttggtacccggatacaggagccacacaccacctcacaccagatgcctctaatcttgcttcaagcagcaactacacaggttctgaacaagtgctcatggggaatggcacaggtctcaacattgacagtataggtaactccactcttatctctccctttacttcaaaactttttcaaataaaaatgatgcagatttctgttcagcttgtgtctggcaacatcacaaattacctttttactctttttcctactacccaacatatcatgagccactccaacttattcactctgatctttgggggtccagctccaataaactccaccaatggctatagatattatatcagttttgtggatgcttattctaggtatacatggatatatatgctaaggactagagatgaggccttaccaactttcaccaagtttaaacccaaattgaactccaactaggctttaaaatcaaaacattacaatctgattggggtggggaatttcgagcctttaccaaccttctagaacaatgtggaattgttcatagactagcttgtcctcatacacatgaacagaatggggtagtagagagaaaacatagacatatagttgaaactggacttaccttacttgctcaagcttcacttcccttatcctattgggatgaagcttttagaactagtgtctatctcatcaatagaatgcccactgctacaattcagcatttatctcccttagaaaagctctttcatactcaacccgattacaacaccctcaaagtatttggttgtctatgctatcctaatctaagaccttacaacaaaaacaagcttcaatataggtctacaccatgtgtctttttaggctacagtatgtctcataagggttttaaatgcatgtcaaaagataaaaggctctatatatctagagatgtagtgtttcatgagtcatgttttccatatgctgaaacattgcatcataaaaacctcactcatttccctacatctactctcaatacaccacctctgtcatcacttctcaatgtccttcaacataaccccattccccctcccaacaacttcccaaccactcccactgtcactacagtacccgagtctccaaccttatccaccaactcctccaactcccctaccaaccctcccaccaatgatgtcatgcttgatatcccaattcaaactacacctgatatgcctagactcaccaccaccgaacctatacctgtcactgttgcatctcatgcccccactgttgctggtgttgacaccactgtttccccaaatgtcacctcggctccagctcaatctgcacccactaat

SEQ ID NO: 382425 - DNA, 1148 bp, Cannabis indica
taaataataaaaataaagatgctgatttcatttactgtttaaaattattatacaaaagtaaacaatttttagaaagaaataataatagaaaacatattaccatttctctaagcttgatagcaaaagtcctcgcatctaagttgctattcttgatctcagccatgaactcatctagagtttggggaatatcatttcttccttgtaattcatccttactgatgggttcttctagtacttgatatatcacttcagggaccttaccaaaataaataagtacataaataaaatttcttaagacaaacaaataagtttcataaaaaaaataataataaaataaagacaaacaaataagtaatttctaatcatcaaaggttgttggggaagttacattatatgagtcaatccttcttcccaaaatttttggtcctatctttttccccaagcaacctatcatcaagaacaaatatattattaggacttggctttaatattaataaaaaaacataataaacacgccatttatttattttattttactctttttttttaaggacatttactcaattttagatcgtaacaatctaccaagaagtacaccgaccatggcataacaaattaataaattagttaatacgcagttatcttatgagaaaaatatatgttatcttaatattttctctttggagtttgtgcttacaagttggttttagcataaaaactttggtggcctagaccatagcgatagccatgtggcttaactgaattttatccagacacctgcacttaggcacatgaaccatgcacgtgttgtacgtgtgcactcattactgaaagtgcaaaactttgtagattatgttggattattaattcttcaattgaataattgtttttttttctcaattataaaaataacagagatactatgcataactttttaagaattgttatttcaaaaaaaaaatcttagatatcttaagattcacaactgttaggcttttacttcttattatctgaaattattggaaataccaaaacttttactctgttccccaacaaataatttataactactaaaaacaagtttaagataattttaatatatatatatcttgagaggtaaaaaataccaatacaaactgttaataatg

SEQ ID NO: 382426 - DNA, 998 bp, Cannabis indica
taaaaattagaaagtagagcagccatttttatataatggttttcgtcacaagaagtgttttttatttttctttttaaatataccaataaacttaatttggactttagtgtggcccaaaacaattcaagagagagagagagagaatccaatgatattaattatgaaaatttattaaattgtggggataatccaactttatttccatatgaacttattaatgcaaaaaattcatgattacattgattgaactcatgagcctttttacataccaagtcacgtagcaatcaaactattatggccaccaaaaatcagaatctaacattaaaaaatactattcaccaaaaaataaataaaaaatacttataaattatcatttttaacatataatttctgggggataaagtttagtaaaaaagtaagattgtaaaattggacttgttttttctttttactataagttacttttgttataaatattaatgataccaaagatcattatttggcttagaaagttatctagaaagatttcaaactccattaccaaaacaaataatgtttttactataaaaaaaaatactcataataatatatatacaatgatactgttcaattgtatatgattattaagtaatgaaaaagtcttcattcacatatattttttttattttttattttttttaaaataaaaatggttgatattatagtatagtaagttcaaaccccaagaaacatgtaagctttacaaaagttactttaaaactttcggagaatataatgaaataaatatttggaattgttgattattagagattaatacaaagtaggacattgaccaatatcaaaatcatactgttcttaaaatttaaaaaaaaaattaaaaaaaaaaagtcaagaagaatgtactaatgtagtttgtaataagaataaaaaataaaaaataaaaaagtaatttctacccactaaggaaggtacataaaagaaaagaaagagcttttggt

SEQ ID NO: 382427 - DNA, 3199 bp, Cannabis indica
tttttttaaaaaaaaaaaaagcacatataagttataaccctaattaagatgaaacaaaaagattatacgactttggaataataatagtaaaaggcaacggaatattattgtatgtaagtgcttgtttgagtgcaactcacttttgagtttgggttaagagaaagggcatttattaggtactggacagggatatatgttatatatatgtcattgtttggctttcgtacattacttgtaatagatatttatactaaccttgatgtaatataacacctttacttttttattcgcaacttggtattgatatttggccttaagttgttattaggcttttcaaattaataagaaaatcataatatcacttaacaacattgaagtgttctgacatatatggtgattgactaaggtaaagaaataatgtgagtttgttagttttaccgaaatactcaattgggaaaaagggtcagtttggtttatgaagaagaaaataatatgtacaagcataattaaagtataacaagagttttcttaattttcaattcagatttacagtgaaaatgaattgggttgttagtttttgagtataatattttacttaaggattcctttggtataggtggtataaagattgtattgcattaaataataagttgtattatttaatacataacaaatggtatgtataagtataaaaaatttaggatcaaactcaatctccgacccgaatctagaccaaagtcaagatccaggacccgaacctagatcggaccagtacctgaactcaagactagacttaagacctagactcgagaccggattcggaactgagacccaggattcaaacccgaatctagacccgagacttggactcaacccataatcggtggtagtgtcgagtttattgaaaatatattataattttatacaatctattaatacaagtcaatactaaatataatattgtattaaataatattaatacaatacaatctaatctgacacaatataatacaatacaatagtacggcgtatcgatgaataattatatatagagtgcttatataattgttgtattaacaaagtgattaaattgaagaagtatatagtttttgcactgatcaaattaataattgattagtttaatcactcaaatgacagagacgtctccagaattgatacgaggagagaattagcagccagccatcaatgaaaataaagaatatttttcacaataaacatatggggcaaatcccactaatcgtattcgacgtgtaattgaagataaacacttaatagtatctaagtagtaaaagtacataaattgaaagaagaacaagtgcaccgagaccgtttctttcggcttaagtgtttgattgatgcaataataataaaatattattattattattattattattattattaagactcacaaagtccaaaactgattttgtcacattttgtatcattcaaccccgtatacatagaaattaagagaggcatcaccatttgtcttcaacattactcaagtgtgagataacatattcactcagaatacaccactatcatcatgacaaatcactctaaacttttccaactttgagtgcttgaatttcttatagccctctgccacaatgaactccacaaaagtattttgatatagatgacctctgcagcttgtaaatgaagtaataatattgtaattgcgttattggggcactgtttttatatattttgctgtaattgtgatgttttagtttggagtcaaaatgctaatgatggtaagtgcaacatcgaatgttaccactaaatcaggagtttattgctattactcaatgtgatcatattcctttatcaccatcaaaatcctagcaactacccatctccataaacaaagtaagattccatcaatcaatgattcattctagctactctccatatttccatatgccaacatattcgtataaatatatacataaatatatatatatttatagagattacttgtagaactacataatgatgcttcacttttttttcagctctttattagtgctacaacaaagagtcctgatgctgaaatggaattattatcattgagaggacttgataataatggaattattatcaattgtagctaaatcaagggctttcaaaaaagcaggtggataaagtaaaaatcctttgaatccaattacaatattgaaaagatactcgcaattaatcaacatatatacttgattaatacagtgaagtacatcaccttggttattggtgaagctgccctgttgaaagctgcggctgacaattttgttagccgacaagatgaaaatagacctgcaaacacaaaaggtcttatatacgcataactaaaaggttgacataaattatgcaatgtcagaaaatatctgctattcacttacattcatcatgatgtacccaagcttaactttttgtattaaccactttatgcaatactgtgaagtgaatatatgtaatatgcacaaatacatgcactcatacacttccatcacttacagtatcaaacaaatggtcaaacaattcggttatgtaaaataagtagagaataaaattgtggaatccccattccactcatcacatcagattcagataatgcagcgcaagggagaagaaagaaacaagtcacaaatgcccaaaattatatcaaatacacttttcgagttcagaaaaacatttgatacagaagaaaactctagacaagaaataatagctactaatgtcaaatatactgtacagcaaaaacttataattacaatgattgtaaatttcaaccagagctttagaaaatagagcagcaacactaagagttccagcacagcaccttcacctaaataagttatttccacgaaatttccagtggctaaagtcagcagtcaatctttaattcttacaaagaagataattccacttcctgattacagggacgatacgccacaaaggtaccgtcgcttgagaaggaaccaggattaaagcaggtgattcctgtgtatttgaatgccttctgcttacttctgtcccctaagactatctgcgcaggtacacaagtataatgcatatttttagaccattgctatgcacttatataaagccaaccattggatccttcatgtttcagtttccaaactaaaaattatttacttttatattaaaaaaaaaa

SEQ ID NO: 382428 - DNA, 1065 bp, Cannabis indica
agagagagagagagagttactcctttacaaaatttgattatatgttgctcatatatttatggttttggcatttgaactattagtcattagagagaccttgcaagctagaaaggacaactaatttacaaaatttttgtatggaaactgattgtttggcaatcattagattgatgaaggatataagaatgttgattgctagtcaaactctaagataacagaaacctatccctgtatataactgatttcaaaaagaaaaaaaatcctcaaatttcataaaacccacataacttaaattatggatatgatataacaaaatgttcaaatgatacagtatagaaaacattatgaagacacttgaaaccaatatcaataaattagggaggaaataatgttggacttacaatcttcttgagagaatctaatagtaggaaaagcatggtgtggaagaggatatgcccaataatttgtccaagttagtaactttagtaacctacaaattcaaccaaaattttataaattttaatatgtatagaggataacaatttgtaggcgatatgtagtggtgaaagccaatgaaccctattattggattggtttcctattgatttttactcaattatactcttactctctcacaaagtaaaagagaggaatgggttctgagtgagaggaaaaaaaagttgatttagctttgtggctttgtttctacatgtaagaatagatttttattttaaataattatgatgagggacatatacttctttattgctgtaatcttcaagaattgttgaactgaagcctgatttgtactttcttttctactcaagtgccattggcatggaagaaaagtaaaggcccttgagtgattatcgaattgtacttcttcaattttttaaatttggtgattcacgtaatacattttatttctcacgagatggtacaatagaaaaaggctaagtgtcaaagctctaattttaagagagaaaaccttgtgggtagttttctgaatataaaaaatgaagtaagggagctctccttttataggtgaaggatgtccttgaaaat

SEQ ID NO: 382429 - DNA, 3809 bp, Cannabis indica
ccatcttcttcgtattcgtcttcgccttctccttcgccattctccttcttcaattcaacttctctttcttcaattcaataatttatatattacataattgtgattccgatcgccattgatatttcaaaattgaaatcaatatgtctttgaacatgaaatccatacaacaagccctagccaagaccgctgccgtcattgagaagaccgttcagaccaccgtccaagaggtcaccggacctaagccactccaggactacgaactcctcgatcagatcggttctgccgggccagccctcgcatggaagctctactcggccaaggcggcgcgcgactctaatcgtccacaacagtatcccactgtgtgcgtatgggtacttgacaagaaagctctctctgaggcacgcgtccgcgctggtctctccaaggcggccgaggatgcgtttctggagatcattcgggccgatgccgcccgccttgtaaggcttaggcaccctggggtggtccatgtagtgcaggccctggatgagaataagaatgccatggcgatggtgactgagccattgttcgcatctgttgctaatgcgcttggcaatgtggagaatgtgaccaaggtgcctaaggagcttaagggaatggtaggtgccggactatctcaatttctcttcagtgagagctagctggtgttaaatttagctgtctttgttactgaatggtaatgctgattagagacaaaaggatttttgggttagggatctgaaccagaattgtgctaaccttgtgttgttttatatgttttcaaaattattattgttcctgaactgtcaatagtctatgcattatgctcaatattaataatcttatatgtagggtgtcctttgatatgtttgaattttttaagagtttggtttcaggttatggggcttttggaggtgaagcatgggttgctccagatagcagaatccttggagtttttacatagtaatgcacggcttatacatcgagcaatatcacccgaggttagaacttgttccctttgttttataccatttttctaatttttttggattattgaaacactaacccaaagaaacaaaaacaccctcgtgaaaaaaaaaatcctatcaagatacacgcaaggaatgcatagaaacactctgatacattgtacagcaggattatttgtaccttatttctattttgtgctatctatgcacgggttgcacattctacagcaaataacaatcaagttatttttctgcacttctgctactatatttcctttgcgatttttttttaccaataagatacttttctgaggacttgaaaacggaaacacactgattcttctgaccacttgaaaacggaaacacactgtttcttcgttctgaccacttgagttagcttcaagtggctgaagctatcttattactaagtgaaaagtgttgaaatattagattgtgaactaattccttgtgtatagcattgctggttggctgctcactctctttgtaggttttgctaaagatcacaaaatactgattactttttttttttgaaagcacaatatagtgattactttagttcatgatgctgtatatgtgtttcagaatgttcttattacatcaagtggagcttggaagctggctggatttggttttgcaatctccacagatcaggccacaagcgatgcagctagttctcaggctttccattatgctgtgagtgaaacctccattgaaatttatggaatgtaggattttttttttttttttagaatttataaagcttttgttatggttaaattattctttcttatttttcaatgcttgtgtttgttttaattattcctctagcctgtcaaacagttcttttcacaataacttcaaaggttttaaggctgtgggattgtgtgcttttttttagacaaggtccattttttgatcatatggtgctttctttttctaatgtcaagtttcagttttgtgagcagtattttaattcaagacttcattataagaacgaggcttttgtggctctcttgaattgatctgacacaaattttacaggaatacgatgttgaagactctttactaccacttcatccatcactaaattacactgctccagaacttgttagaagcaaatcgtctatagttcgatggtcgtctgatatattcagttttgcatgccttgcctaccacttgattactcacagatctttatttgattgtcacaataatgttaaaatggtaatttatctactttactttctttctatttactgtcaaaatattgaatgttcaactgtattatcagctttacattccttgctttcacttactcacaaatctctatttgaccgcgcactaaaatattaaaattaatttagttttctgtctagttactgcaaacaatttttggttaaattttcagtcttctacaaatataactcttgtagctatacctatgcggctatgccccttattttgttcatatgatgtcatgtcaatagtctaactagtttgacccaacttggttttgttaaattgtcctcttgttaaagactgtatgacgatccttaatattatttcgtatgttcaattcaatttggtattgctatttagtgtcattatacttctgttaagcttagcaactagaagcgctctcctcttcctcttgttattgttaatttgtaaatggaggaagtgctcttgcagatctattttactatgtattggtgattcaatgttaattgtaaattcttttgctccatcttatgcagtacatgaacaccttgacttacttatccagcgaagcattctcctcaattccatcagagttggttcctgacttgcaaaggatgctttctgcaaatgagtcctccaggccatctgcaatggattttacaggtaaaaggtcaatcttataatggggtcattccgaagtatcaatatactctaaagcctgcttatttctcggttttttcatcatgctaaatgggtactagtagtttggacttggaattagtgtggtggatggaacatgtcgtgtacaaatataatatatttaaattattatcgatgctctctctgtcacacacacacacaccttaattgataatggagtcgtctcaagtatcaaaacttaaaagcttgctcattttcgggatttgatgtgatggagcgcgtttttttttggaaagcatgtgatggaacatgtcttattgatgtcagatatgtatttaattgattctttctttgatggatcttgtaggttctccatttttccggaatgatactaggttgcgtgctcttcgcttcctcgaccacatgcttgtatgaatttttttagctctagtattatacatgcttttgggtgtcaagccctagagcataatgatagtgataattatggttgctgatatatcttctactttacgtgcaggaaagagataacatgcagaagtcagagttcttgaaagcgttgtctgatatgtggaaagattttgattctcgtgtattgcggtataaggtggagttcttttatcaaattttcaatgcttttttcatgttccatatagtctgtgcttctaaaaactttttgagggacatgaaagtgtgtagaaaatacaaagaaaaatagattttcattgataaagaaagcaaattgcaacaaagaacctggttatctgataatacctttttttttataattattattagttgctggaatatctgacagtaccttatttttacttttattatttgctggaatatctgatagtatatttagagcatgtttgatattgt

SEQ ID NO: 382430 - DNA, 2961 bp, Cannabis indica
gcgacggtccctgaaaaaaatcgcttttagaaccgccgcgaattttgatatttgtagtagtaaaagatgggattttggtggatctaggaaaggttgaatcggttataaattggcagaggccaaaaatagttactgaagtacgaagctttctcggttagcatattattactgacgctttgtggaaggattttctaagattgcttcgccattaactgagtcaactagaaaaaattagctatttgtgtggtcaaataagtgtgaagaaagcttccaaagaattgaagcagcgtttagttacaacactagtattagccctgccaaccgatcaagaaaaatttataaaaaccataaatttataatttcctttttttaatcaaaataagcctatcatgtaaaatgactacaataaaatatcatataatgaataaatcaaattagatcaattctacaaatcgaattcattgagagtcgacattaatattaggaattatttcacaaaaataataaaaaaattacaaaaatacggttttacagaattttaaatatttttactatttttttgattttatttacaaaaatacggtctttttatgttgtactcttattaataagtcgttgattttttgttatatatatgttattttttattattcttttgatgtttcttaaatgttattttcatgttacttttatgtagttttcttattattttcgtattgtttttatgaaaaaccgtaaaaaatgtaaaaaaaattctttaaatgtaaaaataattattttttacaaaaaaatagtatattatataattgtcctttaatattatcagtaatatccaaactcaaacctcattttacaatattatgggcatgtaataacactacgaaacaactgagaaatcttagagaaattacatctccaaactaacctaaaattatttaagcaagaggtaatataataacatatatttcccataatagcacttgtcactacttgagaattactctccacaatcacaaaaacaaactcttgaagagtggttcctagctacacaaattgtaactctaaaatatatatttaaactcaaattgttacaattgtaattccttcaatatataactctacatattttgatttgttattattattattaataatatatatattgagtggtggataggaggggagagtgatgagctggtgccagcatagagatatataaaatgaataataataagatatatttataggaaggggttaaacttaaaccacatggtatagacacaagagtgtgtttttgtgtgtacattcacatcacatgcccacaccatgtgaactaaacccttttgtctacatttcttaacctttttatctttcattttttttaaaaagaaaaaatatatatatactatatcatctcctctgtaaattaatatctccatctcaatcccactttattttctttttcatatttattgtttcccatatgcttatgttttttccttaccccaaaaattgacattccacccaattctttttttttttaccaatcaattcaactcttttattaatttgtcttcttttgctaataattatgaagataataacaatattacaaatctttttgaattttgtatagtatatagtatagcaattaatttattgatttactcataattttacctgaaattaaattaaccaatatatataaatataagactttggtaatattaataaaaatgttcatagtagcatttggttttatagtttattattataattattattattattattattattattattaagtagtaattaatcctcaaatatcatcctcttttaattttaagattttttcaatataaaaaaaattaataatagttggatatgtaactatatttaagtggtgtttaataatactcttttttattttttttttaaatcataaatttgaaagtaaaattttgttttttttaaatataaaaaaattttgtttttagaaagtaaaaatattttctttaattattctttttttttttttttatattggtaactcttcattttttattatttttgtttttatttaaatccaagtccagatccagagtaggatttgggtccagatcttgaaccagggattaggtttggggttcgagattcgggtctgggtctgagtctgggtcctgatccggggtttgggttcgagtcccgatctggggtcagggtaagaatttagggtttgcgtctagggccaaatcgattttgggtttggattcaggtctagggttcgagtttgggctcaggtctggatccagagtttgaatcttggtcagagtccatgttcggagtctaggttttgttcagagtccaggcccgaaatattaatgtaaaaaaaatacaaatatactataatttagaaaaatgtgtttaattttttttttttaaaagtaacttttttaaaaaaagttaaaatttttgattctgttttatagtatatatttttatttttctagttaagaaaataaaaatttgtgattaaaaaaatgttacatatatgacgaaataatttactaaaagaatataaagctatcctaaaagaggaagagaagagacaactatataagaactataagtggactaaaatacaagtattgctttacaatataagctaggtataggattctaggagagacgtatattaattaatatttacttaatgtctatggttcaaacttttttgaatgagagaataatatttatatatattatatttattactaaactaaaaaaaatataaaaattaaggactagttaaaattataagatattttttgtttttgggttggtgtggacatgatgatatatgttatattaaatgtagttatataatcactacaaaaaatcttaattttagtcacaacaaaacttgtgactaaaagtaaaaaaattgtgactaactat

SEQ ID NO: 382431 - DNA, 2364 bp, Cannabis indica
tcatatacaaatatatattttttatacgcatgggtctcttttggtttgatattagctagcctcaaatattggatgttttatacatacaccattattagttccacatatatatatataaatgtatatgtataattatataactaaaaaaaagaagaaaaaaaacagctagctaataatataaactactatttataatacataaatatacatatgtatgtagggttctaattacaagcaagacaaatggtcatccactatgatctttgaacaaatcatttcaaactgatcaagaaaaaagaaatgaaaattagtaacaataaggacacgataatagggttttttgaatttttctctccgtacagtgttcgtgctcttgtacctgaaatctgcaacggtcctttctgggccctctctgggccgtgtttgtgcggtgaaggggtgacgccctgtacgtccgaccaccactggtcatgggtagtggtccactacctacagacacgattttgtgtgtcttagggtttaataccctttcctatttggaattggcagaggagtcatttgtttattgcagagaatatcctagccttttgagatatcctctgcttcataacattctggtttctagtgctgacgtttggggggatattgctggtttaaaatctggttttttgctaatggcggcggcgatgacgattcctacagttgatgaaatcactcaggagacagagaatgtatgcttggacgattttgcaatcgatgtggttccggataatgagcttgctagggagacggtagcgaagtcagtggtgggaaaatttttctccaaaaaaatggtctctaatggtactttcaggagggctctctcgggtctttggaagctgagtccgggatggcgtttccaaacggtgaagcccaagaccttcatctttaggctgggaagttcgaaggaagtgaagtttgtcttggaaaatggcccgtggaacctctgtagtggctttcttatggtggcagctcttccggaggatggtaagtgggaatcggcggacctcaatgttctggatatctgggtgaaagccatgggtgttcctctccctttcatgactgaggcctgcattcaacagatggctagccgaatggggaaacttattcacgcaaacaaggttaggaaaaatggtgtggttatgaatgattatctacgttttcaggtccgtttgaaccttgcagtccctcttcttgctggagtgtctctgccggataatggcccaaagaaggtatggagttattttaaatatgaaaggctgcccattttttgtttcaaatgtggggttattggacatcttgatgccgattggttttagggaaaaagagaatggtcactgttcaggatgggcgttcgattcctttgtatggttcttggttaagggatgggtctcggttggcgaatgggtttgctttgttggaagtggaaaatatccatgaccgtagtaggctagagatgcttgatcctgttcttgaaacagcccctctctcggctagccaggatgcctctcctctggtggcggctgttgagaataacgaaggtaatactagagttgagactgagggtatggaaggagtggtatcccagagagctgacaactcgtttacggttgcgtataatgattatgttgacactacgaagtttcctacccagcacgtagtgcacgttgctaatttattcaaggaaaagcttggttcgattaagttcggagcaaatcgggaggaggaatcggctggggagaaccattcggggaaaattagaaaattgaagaaggctaaggtcattggtcctagaggcatcccgaaacctcctatatttggcagtaaagctcatggacttggtactagtgtggggtcaaaaaggaagaagtcatccaaggagctatctccagcaccacaatttgtggacgaaagccaaggtaatagttgtctaatatttgtggataaagtgggagttaaagatgtttttgctgagaatagtggagtacatgtctctgttgattctgttaatggtgaggatagtgaagatcaagccaaaaaaagccagagttttccttgattccttgaggtccgatgaggggtcttttgataccattccggaggatgatgatgtgggggcccaggcggagaggtgtaagttcctttcagacgtgaatcatgatcttggattggttggtgactcacggcggggccaggaagagagtggggaggcctctctggcatcggatgcgagaatcccgcaaagagagatcatcgctatggctgccataagggctgaggtgcaggatttttcatggccgaggaggcgggccgaaacatgccccc

SEQ ID NO: 382432 - DNA, 1623 bp, Cannabis indica
taaaaaaaaaaaggcaatatagactttgacttcttttttactatataatattattttttttctttgtattggagtctaattgtaatgagaatcacattggttttgatatgtaatcatcgttatgtaataagcattacattgtaatagattacaaaagtttaaaaaaagaaatacaatgtaatggacctatttattactattactattaccattacaatgaaccaaacatcacaataatgttatctgtaaatctgaactttgttacattatatttatatggttatcttttggtatgcagtggtttcttgctcaccctaagttcaacacaaactcattttatttaggcggggactcattttctggcaagatcatcccaatcattgctgaacaaattgctcagagtaaatgacatataaaattgtaaaaacaaaagcctaataaagttgtgaaacaaattaccaagttaggtaaattttgcaggtgttgaagccaacaacataccaaaaattaacttcaaggtacttttttaggaagaaaaaaacactagttcttttcttgggattaaaatcatagctaatatctatgaacaatttctcaatcttcagggttatttgcttgggaatccaatcacggattcaaaaattgaagacaattacaaagttaaatttgctcaccaattgggtcttatatccgatgagctctaccaggttatactaaagatttttcttttattgtaatgaatcatgactgttagaatagaaaatgattaagcaacaagttgttactattgctggtttgttattttctcagctgtctacatcttgagttagttagaagttgttaggagttagttaaagtttttcttcaacttctctctatattagttctccatatataaatgtcaagatcaagccaactgtattcagcggagcattatttctcatccttcatcttcatctctctctctcacctccattatttctttcttgctcaagtaaatttattcaataaactaatttttaacttagttaaaaatttgtggccaaaatcataactattttatctcaaaaaaaattatagtttaaattattaattagttacaaaaaaaattacaattttattgtgactctaaagactaacttgtaactaattaaatttctattataatttatttttgtgacacaagaagtttatataagacctaacctacattcttaaatccaagtttggttgattgattgattctcagtcattgaagaagacctgcaaaggacactacataggacaacacagtaatgatacactttgcgcaaagaatcttgaagcttactcaatggtatgaagattttttcttaatttttttttatatggaagtataattttataagacgtattatcattttttgataaattttaaataattaacattcttcgtgtgtttcaaaaaaaaaaaaaaaattcttcgtgtaaacattcaatttcactgataaaacaagttttaaacattttttttgttgctttttggtctaaatttataaaagaatttaataactacattgtagataggtttttttttttttttgttacagagtgattagaatcactcatgaatttacgacgctc

SEQ ID NO: 382433 - DNA, 2123 bp, Cannabis indica
ttcaatgaaatcaactacttttcaatgattctttattatcttctgtaattctttacaaggatattataacttataagacatgatattgagtctattattgagttcccagttttaaagttctaaccattgacttgagagtcagtggacaacagatgaaaaataggagaatacatattaaatacatacccaagaattcctaaaagtattggcaacccttcatcagtcccattgtacaaagctagttcttgaacactgaagaatctctgtgaatcgaaagcacaccagttaagcaatgatctatgaagatgaacctttgccttaaatataatataatcgctccgaaaaagtaaacacttcatcttatgtagtaaagctttagatggtttaaatgcattagattttcaggatcagctaaccaaaaagattttcaaacaactatgctgatgtagagttagccaatccaataaaatcattttcgaaggttattcttttctagacaacaaagtagaatctcttccattgaaatggagccagtttaaaacgagaaactcaattcatgttctgcctccaaattgggaaacccacatagggaaatttattcaaaacaaaacccagatgagctaaacagagaaagaattgaaaagcatatatatttacagacaggggaaaaagcttctctgacctgttgatgtttgggtttaatgtaaaatgtgaggaggaaagcaatgagagtgacaacgattgcaacaccaatggaatagcatgttgcaaaattcttaaaggccatttgactgcgctatttctccactttcagacttaaaagtgcaaacatttatcttacatcaatgaatcttgcttgctgtatctgaagaattgacctttccccggcaagtattgtggaagaaagaaaataaaacaataaataggatttatccccataattatgacatttatagagttttgccctttaatttttatctcctgcaaaaattcaccctaaattataaaaaatcatcgcaaacatcctttgtaattgcattctactccttttattaaaataatttgttaatatattactaacataacttaacataatgttaatctagtgtttgaaaaataatgtgatagttctgaaaattgtgatagtttaagaaattgtccacacttttaataggaaaagtaaaaaagaagagttctttgccatcaaaattgatcttgtgaaagcctataataagcttagttggcagtttgttgatcatgtgttgaggtgttttggggttctgaatagattctgcaattggatttctcaatgtctctcaactaccaccctcaatctttgtcttaacagtggccaaattggtagaattaggcccttttgtagtcttcggcaggacgaccctctctctccttatctgttcaactgggttgcagaaatgttatcaaggcttattgaggagtccctgagaaaaggtgttacaaagggtattagaattagtcgtggtgggctaatcatttctcatatcttttttgcaaatgatttaatcctggttggaaaacctaatgttggggaagctaaaggtatgtgggcttgtcttgagaaattttatgattggtctggtcaacaagtcaatgaacttaaaacttctatttttatccgtaaaaatacctctgagaatatgaagtttgagattagaatgtcctacagattggtggtccgaaaggcaacatcaaatacttaggtctccctttattccaaactagacataaggatgtaaattttaacctcaaactggataacccttactgctaaactgcaagggtggaaaacaaaaatgctatctaaggccgatcgtgcaactcttataaaatcagtgggtttggccaaggctatttatgccatgcaaactaaaaagctctctaatcgttttgttgtaaagattgatggcatggtttgagattttttgtggggttttgaaaaaggaaatcatgggatccattgaaggcttgggacaagctatgtctccctaaatcccgtggtggccttggcttccgaaaacaaaagaaatgaattaggccttcttgactaagtggggtggaaactgcttactggatgccaatctttg

SEQ ID NO: 382434 - DNA, 1617 bp, Cannabis indica
tttttaggggcatcactttccactttttcatgttaaggttattctaaactaaataactatcaaggtagtagttttagttttattaaattatatataatacgtgttaatttattttattgaaaattgggtctctctatcaagtgttcatctcgtggttttaggggtatttacttttggaatatgcctgctttgactgagatctttagagatgattatgtactataatttggtgaagaaactttaggacatttttggagaaatgtgagggatgtgatcttcctcgtgatggtaatgaaattattcgtaatcttgttaatagagtcctgaactaacaattgcttatggagttcgaaaggaagttaaatttaataaattacgtgtcacttcatttcctcgtcgtttaatgaggaaaacaaaaacatttcttcaacaagtacatttttgcaaccttgaatgggaagctagaccaaataaaaaaaatcaaactcatagagctttgtaacataattattttaaatatgatgttgtaactaaatattgtttcgaatagtattttgatttcgtaaatgttttcactattacattttataaatatatattatgttaaaaagaattagtagcatgagctcaaatattatttaaatgtatcatattattatttggttatttgtacaatttaatatcgaattatatatattttaaatttcagaaaaataatagtgtgtggtgacacctaccttaagttgtcattttcctttggtgagttgacaaaacaaggtcactatgaatctgttggactatgatattgtagcaatgtatttgtgtgtatattattattctatacatacttcacttcaaaaatggcaatgtattttgtttttaagcattataaataataatatatgcaaatactttggtaagtggtctagatctagatttatagtattgactaataaataaaatctctaaaatttattgcttttaaaaatgaaaaattatataacaaataaagtataataaaataaaaaccatggggaaaaagggtattttttttacattagtaatttttgtttttgtaatggtctgaaatctgatcattagattgtaaacgacaaatttgaatggattccaattagatgagaatgctcacatcacatgggtacaatacaatacaaagaccacacaagacacacataaaattgaaaagcattatttaaaataaataataataataaaaaaaaaatctaaacgcaaatagaaatccaggtatagcatattagcatagtatgatttttcttattaatctcatttccttttataacttaatgaataataatttggtaaatattttcatacatttaagacttgtaattaggacacatttttttatggaaatagtcatgtgggaacccaccccttatgggtaagaatttctgtttaaatgaaaaacgagacggaaacaagagttatttttttcctaaatgttaaacgggacaggaatggggatgatactccctctcgacggagacccatttagtattttattttatatttctaataataatttataatttataatttatatttgtatttttttttagtatattaatatctttt

SEQ ID NO: 382435 - DNA, 1555 bp, Cannabis indica
acacatttttgttttcaaaaatatatttaataaacttaatttttggttgccaaaattagtgagaagcataattgtgaactgatttatgttatacaaatactaaattagtactaattaagttgattccataataaatactaaaatagcatatatattcctttttaataatggaaagatactaaagaaaaataatcttttatccaccataaaaaaggaaaaagagaggtacttggagttggtgatcatagtgtatgtgtaaatgaagtgggagaaatttaagcaaagaatcttggaaggacaaagattgcgttggttatatatgtactatattgtgaaaaatccaaccataaggagggaaagtaagtgataataataacaattattctccaaaaacatgggctgactgttattttgggtacattagctaccactttgctaagtttttgcccccaaaagaaagtggaccatgtgtgaaaaggaacttgtgcagaagctttgggaaaaatagatttactttgagtctcatttatgatcccactaaatgaaccagacagagtttaggggagttagaaatcatttgggaattctataatataatatatattatcatctactactgttctagtggagattatttctaaagcaagtatatataatatatgtaaaattcagttgctaaaatgtctattatcttatcttgtaataattatattacaataggaattgatactttgattttgatattaattattaaggggaatgaactagggatatttggcaaaatagtctcttttaaaagtcactttacacaaaatattattttgataatttttcacaaatgcccatcctaacacctctgacgagtgacgcccattagaacaccctataaatagatttaaaagcgagatcatattgttaaaaaaataccaaaagaatgtcattataatactaataacattataaataaatttattttcaccaattacttaatttaactcaataatatattatttttaaaaaaaaaaaaaaaaactcaataatacattgttttgacaattttttttttttcgcattctagacaaattttgagaaattatatacgtcaaatcggaaattctaccttgctatatgaacgattatatgaaaatgtgaaatgaaatcgaacagatatatactatgaataaaggattgaaatatcttcagttattgatatttgagttttaatccacattgtagattccgatgcgataatcgagctttcaagctctctctatactctctttaaataaaatttattgtttgcacagaataagtgagtagctcggagaccgatgccctatgtttataattgagatagtctatcaatatctatctcacattaattgttaaaatgatttgacaatcaattcgggaaatatttagtaaattggaatctaaccatatttagaatattcattcttatcacattttgatttgtgatcatatacaatcagcgagataaagcaaaatcaatttaaataattttgtaccaatattagaaatattctaatattaa

SEQ ID NO: 382436 - DNA, 5059 bp, Cannabis indica
acgcgcgtggtaaactagaatatcagaaactctattttcggtactgtaaactattcggaatttttcaaaaatttacagggatcatactgtaactataacgaataccgctatgaaaaaaaatatttcggcatgtaatttcgaaaatgaaagttgactaagagattgtaataagagactctaattaacatttctcaactaccgaaaacaatattccaaagtaataaacccacattttttttttctcttttgacaaaaatttgccattgtttttttacaacgtattcaccattttttgttataagaaaaagtgagaacaaattttgcaaccttcgatttggagggtgccaattcccgagaatcaagttgttcgaaactcaatttgcctatatatatacagccctagtcattttcttcctctctcactgcttctttcattgatttttgatccttgtgagtttaacaacctcattctctctccttcaaaaatggtggctgatcacggtcccaaatccaacatttctttcgctggaacctttgccagtagcgctttcgcagcttgtacggccgaggtaatcaactttcatcatctcaatagaaattgcgatcgcattctcttcatttgttcaaattacttttcttttgatctactacttcctacttgctcttgtttttggctctgtgctttccgggaaaattttcaaagtcaacgactttcttctttatgtactggtatttgtgaagaacccagtttccgtaacttgtgtgtggaataagatttttgggctgtcaaaattttgtgaattgattgaagcatgttgtatgagaattcggttatgaattaccatgaatataagctggggttgtttttagtacctgctgtgagattatctgtgtgttaatttatgtatatctcagttcttacaaatttgttggtcttggaactaatgaagttttgatgggtaaatgaccttttctttaggaaatggaaactcagttcttttcagtttgaaggaaaatggccttggaaaatctgcatttttataagggtttaagataaaactgtattttggtctgattgaatgactatttgttgttggagtttactagttgcaaatctgtaaacttgaaaaagaagaaaaaatcttaattctaatgttagcctagttccttgctgaaaatctgaacaaccagttaagatctgattgacataactgtcttccacatatgttttgattgttcacacaacttctgttattcgtaccctttctagttttcaatctatatttgaacttgatgcagattgttagtattcccttggacactgctaaagttaggcttcagctccaaaagaaagccgttgatggaatggccttaccaaagtacaagggtctgctgggaacagttggcaccattgccagggaagaaggtctattagcactatggaaaggaattatacctgggttgcatcgtcaatgtatatatgggggcttaagagttggattgtatgatcctgtaggtttttgatgttctcttcacaattttatgaacttttatttatttaaatgcttgttgatatctgattccatcctgtgaactgtgggcttgacaggttaagaccttatatgtaggacaagactttgttggagatgttcctttaactaagaaaattcttgctgcattgacaactggtgagcagatttggacgtttataaaaaaattattttacaggcactgaactttttaactgcattttacagttttttctatagttggtatttatattccaattcaatcagaagttgatttttctttccgaactaagaataagaaagtaactgtatgtgagtatacatcacattgaactctcttgtaattttttttcttttgtttgaaccttgtcatgtggatgatcatcttcaaaataggtgcgctggcaattacagttgcaaatccaactgatcttgtaaaagttagacttcaatctgaaggaaagcttccccctggggtgccaagacgctattctggagcattgaatgcttattccactatagttagacaggttggctatttgagcctcattcacaaacgggcagtttgtctccatatagagttatttgttttctaattagacctttttgtccaatttgttttctgatttttaggagggctttggggctctatggactggaattggacccaatatagcaagaaatgctattattaatgctgctgagctagctagctatgatcaagtgaaggaggtaccttctttgctgtagatgtcttctcttgtcttttttagtacaatgtttgttctgtttctgaattatattatttcaatgcagtcgattttgaaactaccagggtttacagacaatgttgttacacatcttttcgctggtctgggggcaggtttctttgctgtctgtattggctcaccagttgatgtggtaacgtttctcaacttcagaaataattacttgtgtctggtattcctcggtagttaatttatgacatatttttgcatcatggacacttagaccatattgctgaggatgcatgatttcatatttatcattgcaaagagcatgtcaaactaagtttgaaaatatacgggacttgtttacatggagaatgggaaaattagaaggatgagactattttagtccatcttacacgagtgatagtctgcttctatgatcactcttccattttcctaaaatttcccctgagcctgaaatgggacacatgactttccttgtacttgtaatcttgttcaagttatagtctgtacatgagtatcgatatagtgaaaacatacatagtccttctgaatcccgtcaggtaaacacactacgcagaaactcgattataatcgatggtaggtggtcccagttgcctgcctcttttattttttattagtagtgcacgtccttatttcaaagctatgcagtaaattagcttttatcaatcactatttctttattcttttcaggttaagtcgagaatgatgggtgatccttcttacaaaagcacacttgactgtttcatcaaaactttaaagactgatgtatgtcatcttctgtaccttccatttttatatccaagttttctaacttcttaccatcattgagctttatacgttcaacatctggaattaacaaaggatcaacaatcaaactcatcttttttgttagatgataatcatattcaacttacattatttgttgtctgcagggtcctcttgctttttacaagggtttcttgccaaattttggacggctaggaacctggaatgtgattatgttcctcacgctagaacaggtaagcgttagattagatgtggatctgccaatcaatttgaatttcaatttattagaccaaacaaagacactttatagattgagatttacttcagcatcatcatatgaccatgttgaagaaaatgaaataaccttctgatttttcgtttcctaattctaatgtttttgttttgatgacaggccaagaagcttttcaaaaaagattagagtcatcttgattgatttctttggagataatctgagcctacaatttgatttctttagaacaagccctactgctaatggaacttttcgaatagaataataaagctttaagccattgtatttctctcaattttgttaagagggaaagaagacttcttcaatggagtggaaaaagataacatttttaattttattaaaaattgagtttacttgctaaaatttaaataatatatattaataatttcagtccaaaataaatatgtaacaaagaaaaattttattaaaaaaaatatgtatttaattttacattcatcacgtgtagtgacacttttactaaattgttatatgaatctacaaggaaatgcataatcattttatcttgtttgttaatttatttatgacataatcttgtttattaattttgaaactagtttgaatttgaaatgttaaacttgacaacattggtcttataaaaatcatataagaatttagcaccaaagaaaaataatgtaagagagttttatcttgtttacagaactagattgaaatgttaaaattgacggaataaaaattttgttattaaatttagcaaaaataaataaattatataagagctatataaagtaatattttgggtttcaaaagatatatataaagtaatattttggcctatttattttctttgtatcatctttctattttttttaattatattaatgcgacgattgttcatatactaaatcgtgttcttgaattttaatatgtgtcaattagtttcctttaaattttgacatatactaaatcgtgtttttaaaatttcatctatattaagctcttgttagtaaaattagatggaattccttatatccaaaaattttaatagtttttaaaaaatttcacgacctaaaacattcgagaatataataaattgagtacaaatcctaattatctttaaaaaaaaatacatcaaaaatatcaaattttaaaatttgatatactttagtgactttctctaccatctatcaactcaacacacaatcatggaaaaaattatagtcataatataaaatatttggagtgaacgtaattagaatttcatggaaatgtacctaaaaaagaaaagtggctgtaatagcaaattatgatcatgcccaatcttttttgttacattaccaagctacatttgtctcaagattctttaggtgcagaaaataatgttacaatcaagtagggctattcatccgatccaatccgcacttttttggtcaaacaacatccaatccgcactaagtgcggatttcattttttggatccaatcaatccgcacaatagctccaatctaatccaatccaatccgcaaaagtgcggattggatcgattactttggattggtactttttaatattaaattatttaatatttatgaaaaaaattattttttttacactacataactagtcaacaaataaaacaaactatagttatttatgtctccaacaatacattaaataataaaataacaaataacaaat

SEQ ID NO: 382437 - DNA, 2519 bp, Cannabis indica
aagtcgtatcttcaattgtcatttgttgcccaataattttgcaaatgggaagcacataaggcagaatgctccaccacaagactttatggcgttcaaaaattttcctatttcacaacttattccacagagaaggggcaacatcacactgaggagttctgtccaatgcttgaattaagtaggcagacttagtagaaaattcttcgtttgcttccttagtccaaacccactggtcttttccggcttccacgtttaagaatagtggatattatatttgcttcaaaaagatagtctaccttctgcatatcctaattaccattatcagttaggagatccgcaacccaagtatattcttctgtgtaggcatcctctttggcttagggataaattcttgaccatggcttatccagggatcctcccaaatacgagtattctttccatccttaattactttgtaggctcctttcttgaggatatgttttgttttgactacattcttctaaaactaggaatcagatcccttgcaggagctattgagaaagtctccacccccatgagctttcggaagacataaactatcccaagccctaaggaaaaggcccttgttaccttaatcactaccccaccaaaaattttctaccaaaccatcaattttagtagccaatttcttggagaatttagtggtttgcattgagtatactggaagagaaagccccactgatttcattagggtagcacgacctacttttaagagagactttgccatccacctctggagttttgaaacaaggttctccaatatgaaattgaaatcgacatccttctgtcttcctctacatagagggagacccaagtactttatatttttagatgggcacttcaagtccaaagcctccttaatgcctcaacgcatgatgtcacttgcattattacagaagaatatggaggtcttgagcttattaaatttttggccagaccacgaacagaagttgtctaaacagtcccagaaccccttggcttcctttatattagcacaacctaggaggatcaggtcatcagcaaaaaatatatgtgaaaatattgggccttttctgcttagcttaatgcctttgatcacacctttattcatagcgtcttccaataacctttaaaggatctcagatgcccagataaataaataaggagaaagagggtccccttgcctaattccacaagatggggtaattgtacccacatcaccaccattaatgcaaatattaagagtagtagaagaaatacactaatacacccaattgcaagagttgtcaaggaccttgaagatctttaagacatggtcaatgaactaccaacttagcttatcgtaagcctttcccagatcaattttgatcacaaaaaaccttcttttcctttcttgcccttaaaggagtaaatgacttcctatatgataacattattgtcttaaatattcctccctagcacaaatgcaacctaggttgggtaaataagtctcggcagaattggcttgattctattcaatgatttttgaaatcactttatagtttacattgcaaagcgatatcggccgatattgagagactttttgaggattctctcctttggggatgaggaccacattagtggcattgaaacctttgtgtaacttctcgcaacaaaataaaaatccaaatctgcctcatagaaatccgttcccactgtctcccaataatgtttgaagaataagacaggcataccattaggaccaggagctttaagactacccatagtaaaaaaaattgtttaatctctatttcatcaggtaatcttagtaacacatcctgctccctactagagatagagtcatgaatcaagtggtccatgctagccaacgggactgcacggggagccaagaaaatattacccaagtattccacaaaattctttcccaatgcttttccgagtagtgatccaatccctatttctgtacataatacagtcaatcgcatttcttcgattcctaataatggttgaaatgaagaagaaattagagtatttatcaccatcctttagccaagagatacgagatcgttggttccaataatttgcttgtctaatcaatgcctcattaagtgactttctgaaccgggactcctctttccaattgtgttgacccttgggttggtcttgtaacgacataagctctttctcaaggtcccaaaaagtggagtcaatagcaccaaattaacttctattccatcgaaggaggcctactcgcgtagcgccgacctttttgaacaaatttactggagcccagtgatgaacaacagtagaccaagcatgatttaccactaatttgcttctctcatctttagtccactaggcttcaaatttaaaatgtcatttaaaattatatttgattattgaatagaatgtgaattgtacatatattttagtacatcataaatatattgtacaattagaatatttaaatatcactccctgaagagaatgaatagacatgaaat

SEQ ID NO: 382438 - DNA, 1268 bp, Cannabis indica
ctcttttcttcgtttttttttttattttacgtgatgagtgagataccagaattgatttagtcaacttcttcttcttcttcttctgcattacttctttctggtttttaacttcattttccactttttgcaaagtcatgttgctttcttttataatattttaattaatatatattcgggtttttttttttttttttggtattatctggtgacaatcgaggctgtccgggtaccattttatgtgattgtcgctcctttttcttttttggatgcctttttggttgcttgaaaattaaattttgttttttggcattttggtttttgtcagagagagccaaacattaactctctctctctctctagcggtttcacaacattaactcttaactactatcttttaactctctctcattcacacacacagacactctggttaggtttttgggttgtggaatttttgtctgaattgagcagttatggtccgtaaacatggatggcagctacctgctcacacctttcaggtattttttttttcctctcttctctacatggtagtttcttcatattcttcttctttctattttgggattctcctttttccttctagggttgaaaaatagattaggggttgattcaaggaaaaactcacacttacttttctgagcgctgaaagttgagatgatccaagtttttgtatgagtttttgtttttatttttgggttcagtgctcaattagtacagggatttttcttgtaattttttgtttgttttatcattaaataatatatttatttctggattgggtgtagttaacttaacttgagtactcctcttgtaacttttggtacttgaaggttcctaatctcaagacatttcatgtgtgaagagtaatgctagtgtttaatgtagaacacatgaagcttccttttggcggttttgggtgtcatttacatatctaatatttattaggaatgtaaactcgtactagcagaagcagccaacgaaataatgaatttttttctttgggtactgcaaatgaatagccactattcagtcatcattttcttcaacttatgttttgctttgttgtaagtgtactttgaaaatgtatatcttttacttagcatttggcctggaatttttgtcagtaatatctatcaatgtgatatgttgattatttaatatctaaggtggtgtttggttgggagaattaaaaacataggaataggaatgagaatagaaataagaatgaaatggaataaaatttaaaa

SEQ ID NO: 382439 - DNA, 2788 bp, Cannabis indica
ttgagcgttagtggtgcatcagaatctgagttttcttcagtaagagacattttcctacgtttactgttagtggcattagccaactatagttttgactttcaattaaaatcgactgttattgttgattcaggtttctgcttcaatgatcgatttgtgctttgatgttcttggtatttcaaaggagaaaaaggatcctcgtgatgtgaaggggaaccgaggtatgtgtcaatgtcgtaactttaattgtggtgttactcgtgactgagttcccctttttgtgatatgctttacgtgtacattgtttaatttatatgatactaaatttacctaatgataaactaataagttgctttctacttctgcatgtagaactactagatgttttaccggaaaaaaggaagcttgaggatggtggttattcatctgatgctgatgagggagaagaggtacttgcaatctcatagtctaatctaattgctggattcactgtatcagcttatgagatcaattttactctattccaagtttgcttcttgttggttttctaatgtagtttttttttttcttttagtttgcactttgacgtggtttatactatccctataagccatctacaattcttggtgcaaataaaattcttgaaaccaacgtagaataattctgattggcattctatctgaaagaatataaaattgtgtttagctgagatagtattttcattgttttctactagtgttgtcttccaattctggggtctacccgatttagactttcaatttttatgttagtgttatatgaatacacagttggaacaacttaagctcgaatgcagtattcaattagagtcttctcacttcgtatcattgtaattttttaataatgccatgattatttcgcataaatctaaatctatttcttatttaaacactccagagactattttttaatctgccaaataatttgcagggttcgagttacaagaaacacaaaagaatggaaaagcacgaatatgatgaatggaaaacttcagtccttgaatcaaataagcaaagcaagaccaaatccaaaggtagaactttatcaacagcattccgtttgacttatttctcattcctcatcaagtagtgtcatcacctgttgaagttggccccgactttaaccatatttatatgcttttgccagttgcttttaagaagagcacgcaaactcgcctcagttttcttaaggaaacatcagagacccagaagttggaagctatttaacagcaagaagataaagatgctccatcttttttggaccccaaatgtgttgtggggtatatatacataaactacaattaggtgatgtatgttgcttcacgcaccatcatgttaccggtcaggctcagcagcttaaaagcttttacttcatatgtttcttcctgcaaatgaaactgaactgtatataattgcaatctttgtttgccatcaatattgataatttgcaattgcagttattcaatatgcttctgaataaagtggattttccttccttttttttgaaatttgtgtgagtttaaagaagaaacaaagttaaatcaactataactgaaaaatgagtgcggttaaattgaaatgggtatatagatatttgtatagaagccttcgagattttttggtataactaaagttctcgaacttttttgtttggccaaaatcttgtcaatcaattattgaaatcattgctaacaacataatgtttcagttgaatttcgtcacctcttttgaacagtttgctaatgtggtagttgtgtggtatgagagtttagacagaaaatacacatatatttgtggtttaatgacaaatttttgaaatatgtacttgtatttttggagctaacatttgtgtatatttaatgtcaattaattgatttgactaattcagtgagttacataagcttatactgcaactatgtttgtagccttatcaacaaaatattttaacagataaaataaactaaatttagcaaggtatgttcctagtggttgctaaggttattagacttaggcaatgcaatttgttaagtgagttcgtttcggttagttagaagctttactcatttcttgttatattcaattaactaatccagctatgtcactgagctatatatatatgctcctcgtacaaattcggatgatgaataatacaatctgagttctttcatacactctttctttctctctgttttcttccgcacactaatatggtattagagccttgattagctcttcgactctccaatggcgcggggtgagggtgttcaaactagaagcaccttcgataactccaatcgcttctcttttcttgatagaaatttttgatcctactctgataatgctcgaaatcccttcttcttatccaacaatgatcatgctggtgttagtttgatttcaaagatcttagaaggatgtgagcatcatagctcatggagacgagctatttgatagaataatcttagtgtagaaatattccattagttatttcccaaaataaataccagtaataaatttctcaaatgattttttttttctgaaaaacagtcacgaagttacaatattgagctttcgagaggctcgtctctttaaattctcaatctttcgagaggattggtctctccacaaagagtctactcttatccaattccaaactaatctaaatgaggttgccccctctctatttataagcattggtcttaaaaaaaattgggccacctaggattacaattcgaccaatagaattaaaacactaa

SEQ ID NO: 382440 - DNA, 2460 bp, Cannabis indica
cacgtagcaataacatcaaaaatatatattttagaacaacagaaaaatacactttgtattattgtaaaaaataatacacagtactttacctgtaaatagtaacgtcaaaagcaataatttttacgaaaataataaaaaacaacactacaattttatatataaaaaaccgtaaaaatattaaaatttgtaaaatgtaaaaatttggttatttttatatatttaagaataatccaaaaaaaaaaatggcacaaggggtgttttggtcatttgaaactagaatctctaacggtgatgttatgggctttgtttttgcttacgttagccgtttagtccattgtaactaatattctcttttattaaatatataaatgtaacggccgttgggtttggtgttaggcaccaaccacaacctaaaaccttcaaaaataaaatggcacacaattctcatacaagccaataaacccaaaaatttaaaaataaaaccttaattctctctcaattcccaaacacctcaatcactagagagagagctctttcctccatcaaccaccattgccggaatcgggccggtcaatttttcggggagagccattttaagatctccctagctaggtagctagcttctacattatttatcactaaggtacttattgaatatgtattaattgttacaaaaaagtttgaatgaattaataacaatgtatttgtttgtttgtttgtatttttaataatgaatttgatttgtataaagatgggagagatgaaaagctttcaattgggtgttattggtgccctattcctttctgtggcttcttctgtttctattgtcatttgcaacaaagctttgatgagcaatcttggcttcccatttggtaatactaatattgttatatcacatatatataaatatcattttcgatctctattttacaaaagttacttactcagaattaattcaatctagagatgttatgagaagactgattattgttcggtaaaggaaatgacaaaaatagagttggtttgtgatttgtagctacaacattgactagttggcatctgatggtgacatattgcacactacatgctgctcaaagattcaaactgtttgagaataagtcgattgacatgaaaactgttatgctttttggtattcttaatggtgtttctattggtcttctcaacttgagtttgggtttcaactctattggcttctaccaggtatatatacacacacattacctttgaaattaatgtgtcatgaaaaaaaatataatatatatattattataagaaatagttttttttttatttctgaactaggtggacgctaaacacagatttaacccgtttatattaaggattggggataattatacaatgaactattttttgctaaaaattttatgtttttatactcaaagatttcttttatttatatatttttatggtattttataaatataacaagaaaacggtataaaagtaacagaaaaataacaacaaaaaataatatataaataacaaaaaaattaacataaaaatacatcaaaataccttattttttataatatataaataacaaaaaattaatataaaaatacatcaaaatactgctaatttttataaatcatcataataatcgtaaaaatatttaaaattttgcagaagcgtattttaataaattttttggtatttttatgtatttgtgaaataataccatatattatatacacatttcaattttcatactaatttgttattaattattaattggtaaattcctgcagatgaccaagcttgccattataccattcactgtgttgttagaaacattatttctcaataaacaatttaggtaataattacattaattactttactataattgttttaaatgatttcatatatattgttaataatatttatatgtatataacttaatttgcagccaacaaataaagctatctctgttagttttactgtttggagttgggattgcctcagtgacagatctccaactcaatcttgttggaacaattatctctcttcttgccattgcaacaacctgtgttggccaaattgtatccttctttcattcattcatacatatatatatatatatatatatatttcaaatatgcacaaaatattatgagtgacatcttaaaatagcatatttttgttgtttttcctaattggatagtctgatctaggtggcaccacgtgagtgattaaaaaatttgtataaaactattgtttttaggtactgatcacttacgtaatatcacttgattcggatacatatctaatttcattagaaaacatttttcaaatgtttattattatttgttaagaatatagattcatgcaaggttgactctaaaattaattaggtctaaaataacaataaaattattatgatatttttaaaaattaattaaaaatatatttatttat

SEQ ID NO: 382441 - DNA, 4767 bp, Cannabis indica
aaaaaaaaaaagaaaaaactttaatatttatattgggattgaatatggtatagataatattatctcgtctccacttcgggtattgaaattatcccccaccactgtctcattaaccgctaagccaaaaaattatcgctccattaagggcgagtccctgcagttacccacatccgcaatataaattttcatctctattcatcgtacaaagaaccattactctgcactttttttctgttttctttttccgaaagtgtggatgaaagttgaaacttcactccggattccttttctttttagtttcttattatgagttatttaaaaaggaaataaaaaaataatacacatttatgagtattattattggttggtgaattgtagccatcttaacgcaaatgattacacttgcaccagtgaccttttaaaagagctttagtttcaggaatgatgattaaagttaagaaggatgcatgtaatgttaaagttggtggtggaatcaatctttctttctctttagctggtggtgaccccactggcatcgactctcaaggtcactgctaggaaccgcttaccataataatttacataaattaatccgaatgtatttagtcaacatatcatatgatatacgttgtcaaaccccttttctttgagcaagaaaataagttatttatgtataaaacgtcatgctcgcatcatttgatagatgcttccaatctctttgggaaatcaaaagttaaaacaaattccagattttaaggtagtagagctacccattaaaccttataccaaatgaaaatcagacaaaatataagtggttaatctcttaacgttactaaagcttgaggttaacttacccacgtagaaatcagctggggacaaatcatgtacttccatacattaacaggacctgaaacacaaatgtcttttgatattattcatcatgacaactactgacatttccaattagctgtgacggcactaccttttctttcttctattttttcattttttttttctttttagtttctttataaagagctgaaacaattattaattcataaagcctcctgtggacatgttaggaggcccctgtgatgatgcttgtccttgtgaaaccaactgtgaccgcccaggaccttgaacataagattgacccattcctgcaccaaccatttgttgctgctgtggaatctgttgttgctgcaactgttgcagctgcagttgctgaggaatttgctgctgttgctgcaattgttgctgttggatttgctgctgttgttggagttgcggaatttgttgttgttggagttgtggaatttgttgctgttgctgtagttggggaatctgttgttgctggagttgcggaagttgctgctgctgctgttggagttgtgggatctgctgctgttgttggagttgaggaatctgttgttgctgctgctgttgaagttgcggaatctgctgttgttggagttgtggaatttgctgctgttgctgttgcagttgtggtatctgctgctgctgttgttggagttgagcgtgctgctgctgttgttggagttggggatgttgctgctgttggagctgttgctgttgctgctgacttgatatttgcggcttaaatacaaccatgtcctggttgccgatacatgaaaaaaatagacataaatattacaggaaccttaagaatcaactatctttcgaaacattcaaaccaggttgtgcaataaaaggagtggcattattttgttccctgataattaaaactatcttttctcacccctggaaaaagcattccaattaagcggcaagctttgtcagaaacagatagcagcagcgtctgggatggtaattgaatgaccgcacactgaagaaagtaatattagaaaaagtaacatcaaacaaataaaaacaatataaatgcaagttccaaaaatatgcaagtagaagctcaaactttgaaaaatccacgaaactgaaaaaactgcaacttaatcaatgatcgggaaaaaagaaaccaaacttacaagcttcttttcttgcaactgaccaagaaacccgtgctgattcatggctcgaaaaaccaaaaagtctgccttcccaacatattgcctaatgtcaaaatgaaattaagtcaactaacagaaatctatgattttcgaagaggataaaagttaaaacatgaaacaattaaaaaaaaagtttgctgaagcttaatttacttgttgttcatatggtcttgagatattagcctaactatttgcattgtagctggccagtttgctgcaagtctgtggtattacagaaaagacaaaaatggcaataaataaaagtacccttcattacataaaataatcgcaataaaattttagtagcgatgaatacaacatttcagcaaagtaaaaatctgaaaaatgcaagcattaaatattatattaatatatatattaaaaaaattgccagttttgaagaaggaagcctccaaagcaaattaatgtcagtaagggtgaacatgtttaatttataagcagtacagagccgttagaattaggagagcttcatagctaaaattctatggaaacaagatatgataactgaaatctaattatgaaattaatgtatctgagtaacctgacacaactgcgatcattatcacaagattaacaatttacttctcagccaggctaaagttactctgactgagatttagaatccaaagttttcaaaagcaatcggaaaccattatcttttgaaacaagcatagtccgggaatttaagcaagttgatagacaatgtcagaagtttgcaacttcagttcaaccagttttcatttttaccgaaactacttaagcatttgctcacttctatgtacttaatttatcaatgaagcatttaaccatgaactatacatgacagattatttaataaattctacgaacttacgtctcagaagctgtagcattcctgtaaccctgaagaaaggatagcacgcatcagtttgtattggaaaaggtagtccaggtgatacaaataggttataatgtacaaatacattgaaacatgagcacgtaaaattgataggaacacatcataaagcagagctaaaacttacttcaaatatttgtaatacagaatagagaacacattaagaaagaagataaagaagaacaaaaaaaatctaaatcctacttcaaacctacaaaaaattgactacttagtaaaccttttacgggataaaataacttacttccaatctggttataaatacaggttgcccttgtctctgccctgacaaatttccctgcatatgtatggtgatatattggcaaagcaatcaaagaaacaatcatagcttctttggaaaagatatctttcttgataattcactaatgaaacaaataattagatatattattttccgaatttccctcttacagcatgcatgcacattctaattatgttttgtcaaagttatattttaaacatctcaactatgataacttgtaataaaaatccatctcccataacgacgagctctaaaccttactggatcacatatcctgatttttcacaccagtctaatacagaatactagagggtgatgtttggtttggactggtaaaatgactattcccgtgaagaattttaaatatactattctggtactttttttttaatttaaattatataaaaatatactcttttttttcgatttttcgaaaaagagaggtcttagacagaccaatctttgcccaaatgtacattagtataaactataaactttgcagatccaattccagtggcaccacatatattatgacttacctcccaaactttgacatatttggattgtgatgcttgtggagcattagatgcttgttgtgacagtggaatattagctgctgagccattattgttcacaccaagtgattgcaccccaggctgtacttgttgagacattccaggagtgggaatcatcgtgccagttccagatgagacaacagatgaaccaagaccattcatcatgttctgattcatacccattccactttgtaccatttgtgctcctgagagatttccttggctcatcgcaggtacagactgacccatactaacacctccttgaagattattcagtggttgagagaccccaatgtttgagtttccagacacattggaagtagctgctgtgaactgaccatggcttgggttttgtgtaacctgtgtatgaccttggttttgagggacctgtgtaagacttccaggccctgatattgaggtgataactgattgaccagttggcaatatgttctgagcaggtgtagaagatgtcattccacttgagatcatgtttgacatatgcatttggataggagtttgacccataggtaaggctgaagaatgcatagcttgacgtgcttgtgacagattatttaggatgttcacatttgcaggagcaggaccaacaggacgcatgggttgtggcacactactcactattgaaggttttaaatctggcccagtgtcagtatttgaaagcatgtcctgagaagcagaagatggtgaagaagtctgcaacgggactccttgggaagcagcacgggcaacagatggaaggtgcgaatgtgtgtaggtaggcccagaaatcatggaacttactgtacttggctcctgaagatacatttataatgtcatggctatttacacaccaattaaatataaagaacacaaacttcatcctttggaaaaataacaaaataaaaaaaa

SEQ ID NO: 382442 - DNA, 1872 bp, Cannabis indica
caatgaatattcattccatacaagtgttgcatcaactttgttgttatgtcacatgagttttggtattacatgaaaaatacaacatcatttagttagaaaaattggccagcagcactattatggacactgaaaatgtaaacatggaatatgttagctttatgtgtggttggttcacaaaatctttaatgctgctaggatcccacaaacatttaccaagtatgaaattggttagttgtatataactatttgggcaccctcttcttttaagctagtttttgggagtgagttctaccaaaatagttgtatcaagtggtatcaaagtcgtgcaccctcaagtgagactgatgtcctggaaagggtgacttgtggattagaccgagagtaggccaccgcagagtcaccatagagtgggtcgctgtgaacctccaaaaggggtgtcttgttaggatctcacattcatgaagtatggaattaattagtagtatataactatttaggcaccttcttcttttaggctaacttttgggagtaggttctactaaagtggttgcatcaagtgatatcaaagccatgcaccctcaagtaagattgatgtcgtgagaagggtgacctgtggattaggctgagagtaggcctccgcagagtcaccatagactggattgctatgaacctccaaagcgagtgtattgttagaatctcacattcaccaatgaattgattagtagtatataattacttgggcatcgtttcctctctaagctaaatttttaggagtgagtttcactaagtggttgtatcaaaaacatgttcaccttttataatgctttttttctcaacttcctcacttggaatttcctttaaatttatgcaggagttggtacaactaagagatgatggggtgctagagatagatacaaccatatctttggaaactacttggcatgctatggaagaactagtttccatgggtctagtccgcagcattggaatcaggtgagccaacgacattatgaaagttttgtgaattatgtcaactatttgaattattgtttgatatagttagtgactctctcactcactaaagaatgggtaaacaaatgttattctggctttacataatctatgttgtgagttaaatgcttagaattaagtaactatggtgtacataattgttatccaactattcaaacaacttctcagcaactatggtgtcgttctaactagagactgcttagcttactccaaaatcaagcctgctgtgaatcagatcgaaactcacccttacttccaacgcgattctcttgtgaaattctgtcaaaagcatggggtttttgtcactgctcacactcctttgggaggtgctacagccaacactgaattgtttggttcaatttcatgtctagatgatccaattctccaagtaagctaatttgtcaaaaaccaaaattgtatttgtttttcttctaattttaagttacaatgttggttcttgttaggatcttgcaaggaaatacaacaaaagtgtggcgcaaatcgttcttcgatggggaattcaacgcaatacggctgtaattccaaagacatctaaagtcaagagattgaaagataatttccaagtttttgactttgagcttaccaaagaggacatggatcttatcaaaactctggacaaggaacttcgaaccaatcaacctgccaagttttggggcatagatgtgtatgcataagcatgcttacaattggattcattcccatgtattagggcatctccaatggaaaaatctaaatttggtgttaaatcaacaccaaaaaactactatttcaacatttattttttttttcaatttcaacaacactaaaaattacaccaaa

SEQ ID NO: 382443 - DNA, 904 bp, Cannabis indica
atataaaaaaaaaaaaaaaaagttttacaacaaatatctttaaaatatacaaaaaaaaaaaaaaatgattactcatgaattataaacaaagatatttcacataaataatgttaaacatacaattattaactctatgatatacttgctctttgttcggaactattagtatttggtaacgaggggggtggtcggtcccactttgatgattttatttttgtgttttatttttgttttacttttgatattgtaaatttgtaattacaacccaaagtatcttcttgttcttcattttattatattccatttctattttttttttcaatgaagaagaaaaataacagattaaaaaaaaaggtgatatggttgaaatataataacatattttgataaattgatcatgatgaaaaaggtcacaatcttgttgtggtgaattttgaaatgcactttcaataataattaaattgaaaagcttaagaaaatagtgtgttttgaagtaaagaaatgttggcctttatttcacttcaccccaattcccaagttaatagaaaaggtcaacatttcttcgaatcaagctcactcacacactacaaattaaattaataaaaattaacaacaaaatcaaatccttggtttggccgtaccaaaattacaaacttcatttttcaattatttccgcttttgggccacattttacacctaaagcccaaaacatgttcaaattatttggtaggcaaatattttaagggaaatttacaaaaatactggaattttgattaacttttacaaaaatactgtcacacggaaatattttcaaaaatactgtgtttttataaaacaccagtaaaacacaaagcagaataactcaaaacaatagtagaacaccagtaaaacaccagtagaacac

SEQ ID NO: 382444 - DNA, 2684 bp, Cannabis indica
ctctctctctctctctcgtagttcgaatatcataatcagttaattgcattttcggtacgaataatatgaatttgaaccatgtttacaatgttattatagtcgtaatcgcataaacattgcaattgaatctgatgtttaattataagcggtgcgagagaaagtgtttggtgtttgctccgttggtttcaattttagagttttgtgtcgtgtgctattaaatttggctcctgtggctattgctttaacatagacaatataacagttctttcattggattaaagcttttgcgcattgcttataggtatagttgtatttcttttgggtccactgaacggtattttacaatgtcaattcaggttttgaggttttagagacggagcttcatttacttacttcacatggatactcgtttggatccgttggattgtcttgataccgacatgatgataaaaattctcacttatgtggaggaacattctgatctccttagcattagtgcagtgtcgcgatcctggcggcattttggtgagttagaaacttagaatgcctcgtttgtagattttttattttgatttgtaatatggagtacttttctctgagctaagtaagaaccagcaatgtaatttcacatatatcaatacattagggacattgtgttgaaaagagtatcttgaacccctccaaggttttgttgtagtcttagtgaatgaaaaatattgaggttaagaataaaattagatttcttttagtgagaagtcattcacttgagcgacattaatagtttttgaaatttgcaatattatgcagtggtggaaaatggcttttttaagcagttgtgcttgcgaatgtttgttgagttatctagagttgcccatacaatggtggtaaaacaatttgaaacagaagagggcatgggatttggatctacaagcaattggacggaacaagaaagcatggtgagagatcatagactctacgcttttctaaataagtgctgttcatcttttgttcctgagaattgcttagcaaaggcaattagtgcatccagcacagataattatcctgaagaaagcattgataatactctagaacctagagaaataatttctaggagaatctcatattggtcaagtacaggacaacgtaattgtgaggttcctgagacactgatatacaagttagcctccaatatttgtgtgatttccgaaatcagcattaagccatttgaaggtagtctttttatctggtcatatttttcaaaattcgtattgttgaaaatttattttcggatttaagttgtttttttgttgacaaattaaatgctttcttctgtcaatagctttcttccaggagggtctaccaatatattcagctagaggtatgcgatttcgattaggccatccaaagtcccccattgacttaaagaatttccctgtgaaagaaccctgtgatgataaatttatatggacctacacgtcggaagtgtttcagatggctcaggtatattcttgtgcctaagctacttactttaccgtactttctattttgaattttattgtattggctacgtgtctgtggcattattgctcatgtcttggcctgctgtgctggagactgttataaccagtttcctctatgtatgttgctatgtcttttgttaagtttgtgttttccctgaccactcataatgtgctctctcactcattggctgtctacattaaagaaataagacttttaatttacatttgaagttttttccccccgctcattaacatccgtacagggtaacacaactaagtgttgcaatatactaaagcttttaatgaaaaataaaatttacaaagatcacactttaggctatactgtatttggtttggtgtaatcgtaaccgtaatgaaatcaccattatgatttcattgtttgttttggttttgaaaattttgtaatcaccattttatatggataagcaatacacatacaactctatacctatttatcaccattacacaatttatataaaaacaaaatgatccttatacggtggagccagctgtttgttttaggggggggcaacaaatttttatttatataaataggatattgactaaaacatattaactttgttggagaagtttttttaaattttatagggataaaactaaaaaatatggggggataaatataaaaatattagaaataaaaattaaaaaatataaattatataaggataaaactactaaaaattaattttatggggaccaaactgaaattatttagaaatttctatataagagtaatttatcaaaagttcaaaacttccgccactgcttatactttagtaaggatatttatgtacatagaccattgatcaccattgccattccaaaaataaaccaaacttttataataccattccaaaaataagccaaaatttataataccattcccgttactattcttattacatgttttcaccattcccattagaatgactgaatgaacaaaacgctacaaaaaaaataaaaataaagcagcaggagaatgacaacgtgcattgtttggaaattttctctgatgaacagttgattttttttttattttggtgtacaagtaggtcattatttttgtgtcctttgtccttttgaacatgaaactagctgctggatcatttttatgtagctgct

SEQ ID NO: 382445 - DNA, 1594 bp, Cannabis indica
ctttttttttttttacatttatctaatacactattcaattatgatatcgaactactatgttgagataatagggtgtagtaggtcagttcccaaagtatcgatccactatgatattgtggtcatttcttctacaaccgacctcctatgcttacttgtaacatatatgatttgtcttttgtgtaaatcgacctcccatgctttttatagacatggtagggttagattgaacttgcttaaatgagatattttttgaacaccttaactatgatgtactctattatatataaataagaattaaaataataactattgatcgagatttttggcaacttaacaaatgagaagattatagagattgaagaggtcttaagagcaccacatacaaggttttacggattcaggtcttgaaacaaccatagtttacaagtcactgtattaaaattattcaaacttacaacaatggaatggaggttccttagaatttcagcaatgtttttatttaagaactgaaatttgaatccttgcacagtatgtaaatggtcctattttgtagggagtcatacgtaatggctggattaactaggcccaaaagtactatttatgttgtgaccttgctaacggagggtttacagaaaattaattatcttgttcctaatctctagcccagtgggttgacccattaaaaatggagctacagttgacatgtcatgtctggacgttgatggtgataggtgaacgtagagtcgcttatagacgcatgagaaatatttgtataagaatagtgggtgtgtgtcccaaagtttattatgctttatagaaatttcattttttattggtacagaggggacatgttacaatacttttctccttttcttgttgagacgtgtaagacctgcatgttggggatatcttgagatgcaagtagtccacgggcaccttgattcaagactatctcacccaaaaatctaatgattcaggatcatagtggttcaggaggataatcttcctatcccgtataacttgtatcatccagaactgaccaaatggatctagaagacattatcttagtgttgtaactcttaactaggaagctaattatggaagtatcaagggattcttggtccatgatagtaggtccagtttgacattctcatataaaacttagtaggttctcgtttccccttcaacacaaattaggtggtaacacgtgtcttcccaaaagtgtagcaaattataattttttttgggtgctaaaataaattacaccattatatcccttttcaaggattaattttatgtgctaacatatcttggtcaaccttaagatacgttagattaagaggaatgaaaacaaagaaataagagtatgaatcgttataggaataaaaaatagaattgaataaatttaagaataaataggatttgtctcgcctaaactatgaccattgtagagttttgtgttactaaattaggcatataatgatattttattatgattatcatcttactaccccaataatcccccgtatgtatatatattaaagggtaaataccattttagaccctgtgttttgcaaaagttacagattggacc

SEQ ID NO: 382446 - DNA, 1807 bp, Cannabis indica
cacctctatatagtgtgaagtaaaggaaataatcatgtgctctccttaattttttttcaatcatatgaaaataatattttaatttttatcttgatatatctgtattatttttatttttatgggttttaaagtataagtttgtaaaaatataatttattataaaaattaaataagttattttatgaaattttttttataaaaatattaaaaaaaatacgagaaaaacagtataagataactggttggttactctagaggtacatgattattcattgatttacatttttttttttataaaatatttttttacaaatagcataaaattccataaaatctataattttctcttttaaatttctttttgtattttattaattttctcaactctattaagggctggtcttcgcgggctatcccataagaaaaatatgcatccttagctaatagcaatagcaatgccttagtacaaaagatatcatattttcttacctacttttgtggactctggtttgagtagcttctatatgaatttaatcttctgtgaattttataacccaagtggtaaaaaataaaaatatatagtgaaatcttctattccttaaattatagatttgtattattaatgaatgaatagaataggaaaccttatattagtggagtccgacaaatggttaattgtaagaaggtcaaacttggccttgagtagactttgtctgggtcctggacagccaaagataagagaagagttgtttgtgtctataaaaaaattgaatcgaaatacatgtgaatatgtacaaagtatctaattaacaatctaaataaattattcaacatataaatctacacattccattagtaaaataacactacacatgcttttgttttgtacattgtcacactcacacatatagatctttctttatttgattgggatttttttaaacaaaaaacgactaacaagagtgtgacaaatagatgacttattatgacaattttattaaatcatttatgaacgattctcatagttattgggtgagaaactaaaatagtatctctttatttggcttttcttgtagtattaattattttttaaaatgatttaaaaaaacaaaattaaaatgatacttaactgggtataagtggtagtttctaataaattgacaaagtttgtagtttaatttatataagttagctgctatggtatagttttttctctctaaaccctaggcattttgtgtgtcgcaagggtcttcttttggtcttcctagcccataggggtgttcacaaagtatccgatctaatccaatctgcacgatccaatccaattcaatccaatccaattcgcaaaatgcggatatccgcacttgtgcggattggattggattgaaaaatctaaaatccgcacttgtgcggattggatgttgtttgacctcaaaaaataaccgatccaatccaatccgcacttaattatatatatattttaaaaattataatatgtaatatatactaattaaaaaaagccacaaagttctaatttcttaatatttttagtaatacattgagttggtgaattttatttattttgtaataaaaaacacaagaaaaataattcttattaacatagacacatacacatacacataaagtttaaatatatatatactagcttatttattttagtaattagatacatatatattttagtgtaaatctaaaaataagtatatatacattgatatatatgtatattggtttaatttgtatataaaaagagatggaaatagattattattggagattaagaaac

SEQ ID NO: 382447 - DNA, 1642 bp, Cannabis indica
tatctaaaatttaatatttttgtcaaaactcctaaattattttagtcattttgtaacgtaaaagtcagagataaataggaaaaattgtattttggtgagacattttaaatgatagtagaatgcagggacggacccaagtgtattagtttgggggttatagcccccactagcaaaaatattgccttttaaaaaattaaatgtaattttttaaatttgataattatagatcaaaatcgtaaaaaaagcccccataaaattaaataaatctagtaagaataattataatataggtataaatatttttgaatgataaataagctccacaaagtaaaatttatgggttcgtcgctggtagaatgtatctttagtgttctagcatcattcatcaatattatttaattgaaacaataaacttcaagcatcagcaccctttgtaaacaaggaaaagaaaactatgtataagctttaaataactaaatgattttatttatatgatgaatattcattatgaaaataatggtaattacttaatttggacaaataataggagtatagtatttaggcagatatttggagcaaaatgattgggccactttgtgggcccacgttgagagttgtaggaaccgaatccgaacccaaattgtgggaatgtttagtatgaacattgagatggtaatatccatggaaaagggaggtctcaaagaaaccatgggcatcagttgtcccaaacgacgtcgtttcttggtatcgaccccattcacgcataagcttgtcaacgacgtcaccagtgggtaagttgttgaaattattgtcagtcaaacacattcggtaacatccctggggtctccaagctgtccataaaacgatgccgtttacgtgagggtgagaccttgcctctcttaatatttcctccaaataccatgcctacaatacaagccatcagcccatcagttagattatattattaataagaccaatcattttaagaaattaataaaggtttaatttgccaaacatatataagcttctatttgaataaatttcactattatataaattgtgtcaaaacaaaaattaatgcatgaaagacactcaaaccacaatactctattgcattgccatatttatggacttgtagtgactgatagaggtacagtgagatattacgataagaattaattttaatatcttacttaattttagttttttgtctaagtctttgtaattattgtgctattgagagtggctcttattataaaaattttgctttatataacttctaattggtaatattgagctaatgataataatattaagcagctaagtacatttgttattaggacccgtcttaacttatttggaattttaagtttgaaaattctttttgggcctttatgcaaataattttttgcttaaataatatcaagtaattaagtgataatagtcatgaggagatcatatacttttattttttttttttcttgaaaaagaggtaaaatatgattattatgatttgaactatttaacaactttacacgtaaagtgaagatataaaattgaggaaattacactctataccctttttatattatccttttttatttttaccctcttttttaaagtctatcatttttactttttt

SEQ ID NO: 382448 - DNA, 3216 bp, Cannabis indica
ccggacccgaacctggactcagtcctagacctggacctaggatcaggacccaaactcgaactcaggacccggacccagacccggactcaaaacctgaacatagaccgaaacatggacccgaacctaaattcgagatcgggaccaggacctgggacccaaaactaatccctgacctcagacccagatctggacccaaactcgtgactcggaccacccatgactcgatcctagaacccaaaacttggacccaagacctagagctagactcggacctgagaatcggagttggactcagacccggacccgggacccagaccgtaatcggtagggctgaacatttagacccgaaaacccaaaaacccacccactcaccccgaccagctgctaaaaaaagctgaaaaattaaaaacccgtaggatcgggtcaggtccaacccgaaaatgggccacacaggtatcgagatcgagttttagaaaaaacacaccataattgtcaggttgtgatccgaaactcgaataagtattttttattattttttattacatttaaaaaaatattaagttattatctattaaatataatataataatactaacaactctaaaagtgaataatataatactgttttttacttttacttcaaaactttaacggtttaacccacctcctctttaagcttcatctcatctccttgccagtccgtcatctcagattctcatctccttcttcttctccggtagttggctcagtccggtgacggcgaggctctccctaacatccaaatcctcccaggcaccgactcctcctcctcctcctccaagaaagctctgcccgtgcccccagccgcccactgcttgtcctgtgcccacttctaccactttagtctttccatggtatggatcacctttatttgtattattttctctcatatgcctagaaacattacccatttatcttattgctcaaacaatatatatactgtaatagtacattgatatatatattaatcaatcacgttttaatattatagagaacaagatataaataattaattttatgaataatgatagcctaaaatctagtggcatttttaaaaataaaatttcattcggactaagtccaataaaacccgaactcgaccacaacatacctgcacaaatttaacccgaaatccgccagacccgaccacccgaaaattgggttgggttacacattttaaacacccgaaatcaaaaaattcgaacccaaccatccaaaaacctatcccgtgtgcagctctagtaatcggtgtttgagtcgagtgtattgaaaatagattataactttacataatatataccaaaaataatattatattaaataatactaatacaatacaatactacgtatcaaacaagctctaagattgttaattaacagagaaaccttgaatagaaacaaagcaatagtagtatagaataatctgatttatctagtggacgatatatacaagtgaatgtagatggtatagctagatgagttgtaacatgacaactaactaacaccaatacttattatatcctaattttgccgccactaatatcaatatttatcttactcataaatcttgacttgacttttgggtgagtagttaaataactctgtaccaactggctgtggaccttgaattttatttaaataggggcagaataatacataaacaaaatacaatataaggagagagcacttattttcttcaacataattaattatttttattttaattttagtacatacattaagaaaagaaaagaaaagaaatataaacataggaagagtccttcacgtgaaaatggaagaacatgtgaactgtaagtaatgtaatggggtgtggctcaattcaactctttgcatgcaaaatcacgctagaatgagtctcatatatatactacttgtgccaggtgtcattgatatataattgagtatcaaattttaaatactataaaatattatttattataatcatttacaagcaccactaataatatagcaatgctctaaatacagtgtggtatataccaaaccttggcttgcttcatggaaaggatactctcctatatatatatgggcatgtgaacacatcataattaatgctaacgtactttgtttggttgttatgaatagtgattatattagttgtaaaattttgttaaaaaaaaagaattaaattaatgttaaattgtgattgacttgacacctaattagctagattcctaataagttaatgtatcataaaagcaaaaaaaggtagtaccatacatatacctattgttttcaataaagtccctatacattaattctctctctgttgcaggtatcttatgttagtttactctttatttctaaactctaccaatatgggtttaatttggtcactaattttagaaatatagtgctgatcagtttagattttttcttagattactctttactacaaatatgtttttggttgttaatgcttctatccgaactattattactatcaaatcgtggtcttatctaaaagagtaaacgctttaaatgtaatgttttagagttagtcaatgtagaattgtgtcttttgataaattattattgcattttagaattgtactcgaaattttattgaagtaatgataccatgagctacactttataaattatgttttgaaatagaactatatgcacttcttacctaaaatattcaccctatgatattattatgtcaatcatattttcacattcaaaaagtaaaatttttatgtagttttaaattttggggttacaaacattagtttcttaccatattttgtttcaagagtatcatgttttgacacattgttgttgtgttatttcttgcccattagaccatgtttcaaataccagatcatcaagttgctggccacaaagcaagtaaaggaataattggccctctcatagacaattcagggcgtttttacaagcctcttcaaagtaacaaccgtggctcaaaagaggaatctttctataaaaaattctcttccaacactgaaatcccaaatcacatacgcaaattcttccctacttattatgggactcaacacattgaggcctctgatggatctggtcaacatccacatctagtcttggaagatattgtaacgtccccgcttcaagcctccattaggtccttacacccacagaatgaatggctcttat

SEQ ID NO: 382449 - DNA, 938 bp, Cannabis indica
tagtgaactgctagcggcaaccttgcccaatagggctccgctgaaactcaactgaagacttttagtctctactaagagcacctcactattattggagatgctcttaggggagactaaaagtatttagttccaataggcttccatcctttagcacaaagaagattgcttggagcctaagctaccactcacaatatacattatggacttttttgttcttagccggcaaaatagtgtctacaagaaagcatataaaaatatttcactagcatttattacatactcaaatctcaaatgaatttaactcaatcttaacatctcatacaattatccctcaaaggaattaagccccacgggaaggacctttaaagatgataagcaaaatcataaaaaatgaacaaatagtcaatgttctcctcttcatgatcacccccacaaagaggacaaatcatatcctcgattgtaattctagatcccacaactaatttatctgggggaaattacaaagaatacaccaccaagtaatttcatactctcgagtattctagagttccataatttgttccaaagaattggagagacattgcaaagggggctctttcgacaacttgtgtaacataggccgatttcgtcgaaaatttaccattattttcttttgtccacacctactttgttgggattttatgctctaaataaaacaattttaatataatcttatttactatcaataaaaaattagaaataatttaggtttacatgtagttttcataattatggttttgaatatacaaattctattaaattcagaacatttagttactcacgattacaatgatatcatcacagtagaaaataattgtgattatatgctttaaactagggttgagcataaaatctagaaaatcgaaaaaaccgttcaaaccgacctaccgaacaccgtt

SEQ ID NO: 382450 - DNA, 3445 bp, Cannabis indica
ttttttttctttcttttcaaatgattgcatatactgaacatggtggtggactagagcaggcataactgatatcttagaggctgatgcaaatcatattgcaaatatggctcgtgaaaatttggataagtatgtttattttgctggcactgttcagaagattttgaagaattgtgttgtattttgttttttgtatatcatgcaatgttcttatgtttgtctccaattattgatagttttgttcttcagggatggtccgttgcttgtggtagcatctggaagggataccatttgtgtttcaagcactataaagcgtttagctccagaaagtgtttttgttgtacaggttttgcttaaatttgttctcaatttgatattttacttctgcttatataatttgtttctttgtagcttctgaggaggacctgatgtgctattgttatctgtttctgtttactgggcctaaatatttttttctttctgaagacttattgtttgttgagtgtttgcttattaaataatacattggaattatgttgggtcagttgcttgatagatttatctttctcttaattaagttgcaattgcagtcatttgattttctaacttagttttctttctcattttagcaatgtggttttgatgtataggaaaatggaaatatcagggcatctcaagcgcattcttttctttggcttttgtgtttcagattcaacatcctaggacgcatctgaataggtttgatttggtcataactccccgtcatgattattacccattgacacctcatgcacagaagcaaattccatggtttttacgaaggtggattactccacgtgaaccacctggtaggaatgtggtgggtaccttcgacagaagagctaaatgcctagtctagtttcagattagttttgtagtcatcatgcaagtatatatcgagatcatttttttgtcgattttgttcaggttctcacccttggagctcttcaccaagctgactctgctgcactaaagaaagctgcttctgcctggcatgatgagttggcattgcttcccaaacctttggttgtggttaacattggaggcccttcaagtaattagtttgcatatataaattaattacgacttatttcacagggcctctattttattggatgtcattttgttgttcttgagcatgggtcatctccttttagtatttttggattttgttgataggtagggagtctgttttaagtcattcaagtttaactttattgtagttctctgatgcggcttggagaaatttgacagtagggactgcattatttttttgctattatgtatatagtacgataacttagtattgtgaaaatagtttttttttttccacagaaattgtttgagagctgaatgatattgttagagccttgtagcaccagaattttgccatattctctagttaagaattttctttactatacaaagaacattagccatataattataaggtcttgtatgctaggctatttcatatttaaagttgcatattaggcttcatttatctttatttctcactgtttgatcttgtatccctttttatttgaataatgatccatgatattttaaataggaaattgtcgttatgatgtggatcttgctaatcagttagcatgtatgttacaaaatgtccttccgagttgtggaagtgtgagaatatctttctctagacgaactcctaagaaggtatgatacaaatgcaccccctatgattataggttttattatgtagtatggacttatatcctgaatgtgtttgtcaacaggtgtcaaaagtttttgttaaagagttaagtactaatccgaaagtatacatttggaatggtgaaggtacttatcatttgatgcatgaacatccttatttcctacacttttgtagatgtatacgtaagtagtgttgagattattaattcatattctatgctactgcttaggtccaaatccacacttggggcatctagcttgggctgatgcttttgtaatcacagctgataccgtcagtatgttgagtgaggcttgcactacggggtatgttacaagaatgatgatgaggctaattgttgtctctaactatgcatctgttcttgatattgataaaattttgatacactgtttttggtctcagcaagcctgtttatgtaattggtgctgaacggtgtacatggaagtttgcagacttccagaagtctttacaggaacgaggagcagctcgaccatttactgggaaagaggatgtaagttgcagttattttatttttcttgtatatgttgctaatttaaggatctacagtttttgtgaaatatttcttgaaaaaattgttcacttgttaatttttttttcttctaaatctatcaattggaaaggatggatcttaaagaactctctcgagcatgattaattgaatcatgcatcctttgcagtatcaatggttcaatgcagctctagtttacacacataggaagcttttctacaatcagtttttatcaaataaaatgaatctatctatggttgctttcgaatgaagaactctctttgttagaacacgagttgggctgtattttttttcatgatgcatatcttgtgtggcagggatcacatgtgttatttgttaatagttagcatttacaatatggcgtgtaataagcgttgttatttaagttacttacagtgaaagttatttgaagatgttttatcattgtctcgaccaacatttaagcgatataaatttgattgattttgttgatagatgtcccaaagctggagctatcctcctcttaatgacactgcagaagctgcccatgtggtaaaaatggcactctctgaacgtggatggagtatacttacatagtggctggtcttacgaagtttttgctcagtctttttgtgtaagatgttaaatcctttttcttctttttcatctttcctcccaagagtagttttcccagttttgtttagcttaggtatttttgtattgattgagagtgaggctcatgagtagaacaccagcagaactgagtgtctattgtatcattgtatgtataatagatgagacaagttttgatctttttctcttcccaaaagaaaagagtaatgacgtgcacaatctatgcttaaacattacattgatatgataggttttttaaccaataggacatatagttttcaaaagtagtatcacttatattaatgtttgagggcatattttaagtgcaagttcaagaaagggtttataaatagggattatttcacaaaaacataaaaacaacaaaaaaaaattacaaaaatacggtttcacggaattttaaatacttttacgatttttttgattttatttacagaaaatatggtttttttatattgtaatcttgttaatttgttgttgattttatattgttttcgtattatttt

SEQ ID NO: 382451 - DNA, 3802 bp, Cannabis indica
agtgtattttgtagtagtgaaattttatgttatatgaggtggtcttgcaccttagtacctttgttttgtgtaaggtgttctttggttacaggagtggtggttgttgtgtacccttggttagttggtcaggccttgcgggtgtggtgcctccactactcgtacctccttatttttaaagctttgcaaaagcatagttgtacacaccatgcatgcacgccttgtacttgtgatcgtacccttgttaccttcatttccacaagaaaattgcactaagtgtagtcatgtttctatggaagttgcatactgagtggaaggcatgaaatgcctgtggagtgagcacttgggggtgcatgccaagtgactttgagagtaagtgcatgccaagtgacctgagaatggtgcattctgagtgactttgagaaagagcatgtcgagtgacttgagaatgagcatgtcaagtgacttaagaaggatgcataacgagtgacttgagaaagagcaagtcgagtgacttgagaatgagcacgtcaagtgacttgaggaggttgcatgccaagtgacttaagagtgtgcatgtcgagtgactttgagattggtgaatttcgagtgacttttgaagggtgcatgccgagtgactttgagaattgtacatgcccagtgactagcatggtgaccattgcaagtgacttgcatgtttaccatgtcgagtgacttgcatggtggcacttgcacggtggccatgccgagtgacttgcacggtgaccatgtcgagtgacttgtatggtggccataacgagtgactcgcatggagaccatgccgagttactttcatgatggccatgcttagtgatttgcatggtgactataaagagtgatcatgcatccctacccctccaagacaactctcttggcacggtctcgttaatctctcgattgtcggttaagtaatctcaaaagttatgagtgctaattttttagattaacagttattgtctttgcttcttgacaatttaatccacattaggagaactactacacacatgactcacataactggttggaaatatttgccttaaagatttagagacataatttctatgatgcaaagattaagttataattggataatgagagcttaaagtatgtccttaatcaatggaactttaatttaaggcatagaaaatgagttgagtacatgtaagattatgaatttaccttgtagtatcatcgtgaaagggttaatgtgatcattgatgtgttaagtaagaaacctcagggtgctttgacatgtatggctcttgaagaccagaaacaaaatattaactatgggtgattataaattgcagttctacaaagaaaaagaggtagcttgtgactctagcatggtatttatcaagttaagtaacattattggcaagctaataaattaagacttatatatctagaatagaatctatgatggtgaacatttatatatcaagaatagacagttaatgctaaaaggtattgataccaaaaggaaagattggatgttacaaatatttgtgatcttagaaggtctattatgatcaagggctatagttccaagcttattgtacattgtggtagtataaagattcctgacttgaagagataatactatttggaagttgtgaaggaggatgtggctagctttgaagctagatgtatggtttgttcacatgttattgtagagaaccaaagaacttcaggtttgcttcaacctttattgatactatagtagaatttggataagatcactatagaatttgtaacaaattaccattgaaatccttaaatcacgacatttcaagtctaattgttgatcttttgactaattttactcaatttatttaaatcaacaaggattacaagcttaccaaattagttcaactaaatgggatgccttcaagcatagttctcctagagattcttgttctacacaaagggtttggaaagtcttgccacaatctttggaaaaaatgagttgctcttgaccactgcttatcatacttaaacaaatggacaatttgagatgaccatacaaaccatgaagaacatgctttatgcttgtattttagattttgaaggtagttgtagaaaatacttgtcattaatagaattaagttatcacaatgttaccaagtagatatatgcatagctccttatgatgccttgtatgggggaccatgtagactacctttgtattgggggaaccagatgaacatattttgtgggccacaaattatcacttgtaccaccaagaagatcaagggaattcaggagaatctaaaattttctcaaagtcattagaagagttatgtcaaactcatggcaagttaagtttggtgactatattttcttgaaaattcctcctatgaacggtgtaatgaaattttgagtgaagtataagttagcccttggtgtgttagacctttcgaggttatcgagaaggttggggaggtcatatattgattaaataccagtgtggttggagcacatttataatgtgttccatgtgttgatgctaagaaaatattactcattgcatgtcttttagttagaggctattcctctttaagatatgttctgtatgaaggataacctgtcagaatttcggtgagagggtttaaagtgttaaggaacagagtgatttgctagtcaaggtcatatagcagaattataaagaagaagaggctacttgagaaatagagtcaaaaatatatataaagcatccctacttgtaatttaaaattttggaaggaaatttctttaggtaggaaagaatgtaaagtctcgatccaacaaaaaaaagaataaatatattatatattagtgggacggacccacaatttgacaatgaaccctctctttcttcttttccccctaaaccttctctctctctttctttcctttctcttactttctttctctttcattaaaacacccataaccgccacatgtggagcaccgacgacccagctccggtcaccatgggatcacgcgtgctaaagctaaacgaccacagatcggtggcgatctcacacctcaattttggcaattagagctgagacacactcgtatgggtggtgcaaagttttaacataaaaactttgagatgacattccaatcaactgtagccactatttgaaaaatggttggtactgttggaatcagtgtcgcgagaaaaacattctccaccaagtcattctgatcaactcgttattttttcacaatgagatttgtgtattccacccttttggaagaattttttggcgattttggtgcttgattgggctaacggtttgtacatttatgatctactcgtcaagtagatcattttgaaatatactactcttattttcaataacgtttccgatacaccaattttacttccatcgatcgtctttgtaaagtgcttagagtttaatataaagtgattttttagctaactaagttattcagagcttaagaatcaagggcctagaagtgtctccttcagagaaagtttgacgatgctgaggtaaagactcaactttttattggacttgattttatatgtgttgaatagcattagacatattctaatttttatgatttataaaatatttgaataattaacttaatctgtatattttttttttggactgttttggggcactaagtgtcaaatttatctttgtacaattatttatgtagattatgatttttgggtttattcaaattacagtcattgtgctgcagaatttttctaaaataaaaaaagaatatgttcttttgttat

SEQ ID NO: 382452 - DNA, 4726 bp, Cannabis indica
aagtgtttttgtaaatttgaattagtgctgtgctgtgctgtgctgatgtttatgatttataagggaagtgatcatatttagattacggtatttttggagtcaacgcatgattaattagagattaagctggggaaaaatgtcactttccttttagtttttgaagttttaacatttttacaattggcttatggctctttacaacaacacaaactattggttctctcaagggttggaaattgcttccattaacgtgatgtggtcaagaatctgttgggttctacttagtttcctgaaatttactttgttgtgagttgcacggaccatggctacttaagtctcatgaaattactcatatttggtcacggattgcaaaaatcttaattctgttttccttgttaatttttgattaactattttagaaaagggtcataaaagttttttattgatgttttgcttaacatagccaattaggctttctgctgcatataaatgagatgttaattaggctttctgctgcatataaatgagatgttggttgcttgttttgacagtgggtggtcttatgggctatttgaagagtggcagccagaagtcgttgttggcaggaggaatatcagcctctttactctattacgtttatactcagcttcccaccaaccctgtgttagcatcatctttgggacttggtaagaaatcttctcactttaatcaatctctttcgttattacctctgcatgaagaacacccaacttttatcttctttttgctaaaattttatcttcgaaacaagatgaagtgtgagcaaacaagcaggcattatgcataatcatctctagtagtttgcttcaccgattatataagagtaaatactttgctgctactaggtttactcctaattgttttcattatcccttgttatgccaggcttgtctgctgcactactagtagtgatgggttctcgttttaagagatcagggaagatatttcctgctggtgtcgtatccattatctcgtttataatgactggtggctacttgcatgggatcctacgcagtgctcactgaaaattgcttaatgtaaactggtgttagtgacttgttaaagtgatttactaactaagcatatgagctagtttttgtggtgtgtttttggcatgtagacttgtgttaagcgatatcgttttgttggaataaatctgccctggctctttttgcttaagtgctcttgtgaaaattatgtgtattctgtttgtaaaatctaagcaatcaaggctctatttttaaagagaacaattgaagaactcagaagttcgcaaagttagaaactgttgagaaagacatgatatctatacagagcattgagctcgagtttagtacaaggattgttacaagagaacagaattcatctacctgaaataaataccatgttaaatccaaatttacaaggctgtttagagataacaattgagttacaaacatgttgaaagagctctagattggtaacaaaaattattacaacaaacatacagcatacatccacttgtacaataaacataacatatattttcaagtagctaaacattgcttactgttaagctctaacaaggattagccatttctggttacatttgttaaagatggttgtgttgtgtctcactttaatcacaaagtaaagaggagtttttctgatgttttaactattggcccttcccctttatgtaagtttgttattaaacacgaaagtatacacttaatagtagtaaaaacataccaattcgttcagatgattcaaggagataatgtaatacatgaacaaattcccaaggcctattaaggatacaagttacaacactaagagaccatttgggttataagtccttgtaagacacaaatcaaaatacatcatcactactaagttcactttagtacagtcagacataagtttttttttacaagactacacttctccataagcaagtgaagatttcacaataaattcatacatagtttattcaaaggtaaaaaaaacaataggttaatattcctcctggaaccataaaaaccttgtcgaaagtgatgaaatcatcactgcaggacaaggtcagacaactgagtcattttctaccttcatcattggtgaagaaggatatgggctcttgcttaccagcctacaaaaaagaaaatgatacacatatgacatattagaggttgctggtgtaataaacattgaccatttatatggccaaggaatcaagacaattttcaaaatttcaatggtgctttatattggggtacctgttccggcgcttctccaagaaactctgaagggagtgccttcttgcaattggaaattctaaaccatgataaagaaaaaaggttagaggaaaatcaatcatgaaaatctctttaataacttctgcagcattactgctattttgtagcaaagtagggcaattattaccagcttgcagtttgttaagggaactcttctgagcggggcaaagctgggcaagaagagaacccactgcagccgcattttgaattgcaggagacctcggaggaactggtgaactagaggcattatcagcctccatattattcatattgctggacttaatggcagcagcagtggcagcagccatacgtataatttcattgacctaaagaaagcaacatcaattaggaacatgaatcatggggttgaaaaggctgaaattggaagagaatcataccttttcttcaggaattccatcaaagatcttgacacacccaccataaaagatggtaagctgagccgcaggtgcagtgtttgaagcagattttggcattgtttcagatctcaaacatcaaaagacaaagaaaccagtatatcatgtcagccgaatatgaattttttagtgaaagaagaaaagctcaaaggctcttttgctaatattatgtgtttaaatgaaaacaaatgctacccatgaggactgaggacagaggacatgagagaagagaacaaagtgatcttgaggatttttcaagattaagtaccagaaccaaaagcaaccaaactatagaatgtacaacttttactattgcagtaaacttagtgaaaggaacaaacaaatattatgtttttctttgcagctaacaaaatattatgtggtgattgaataatttgtggctgggttttgggattaagtcaaatattttgagtggagtctacagctttggaaattgagccgagagaataatacatactgaatctaaacactgtaactaaactagatagacaataattgagaagttatgaacctgggttgacccacaaaaaataagaaagaacctactatcctagcaaattgaacctgcctaatagaattaagtcaatgactactggaataaccctaaagtcaataggaactgtagtttggtttggcaagctaaaacctaaaacaaaccctttacctaaacctaaaaccaacccttcactcaaaacttgagcagaacatgtggcacataagtcgatttgtgggttctacaaagtagaaaaattctcctattttttcatttgcttgtcaaacttctgaaacccaacaaggaatttcaacagccaaataaacaaaacaaagaataattgatgattatgcaaagctgttctttcaagacacatcaaaacacataaaaaggcaataaatcagaaaacccacaaaagaacaatcaaaaccttaacataaaaatgattcttttactaagaactcgtcccatgtaaagagtacaatacctggattcagacaaagcctgagaaattgatttggagtcatcattcctgtccagctctttttcttcctctcccttcttcagctctacatgggaaattttaggctcctcttcaagccttacctcatcagaatcagatctgttctccatcaccattttcaaagcaaaaaaacttcacagaaagaagaccacacaacaaccagaaagaaaccacgtctaaactaaaggccggacctttatttgttttgctttaaaaggttacaaagaaagaaaacaaataataaaaaattactatgaataccgactatcacggggtagtcgttgtttacaatatttaattacaaattacaaattacacatgtatatataattatatattatactgttataacaccttccttctacttgtcctcaacagctcttcattcttctcaggtctctttcttgattcttccccacaccccaatttctatttaatttttattattattattattattattattatttaaaagaagttatttttaagaaattatagttttattttgtaatttacagccctttggattggccatggcatcgttttctcaattctgtgtggtcattttctcattaaattgtgcagagtacataaattctatctgtattcgatttttagcacatgtgtttttaatgtttcttctatttgatttttatatattttagagacaacatgattgtatttaggttttagcttataataaatattaatattttgcccacaaagtcatgttcttctgcctctgctggcatttgggtgtgaataatgatagagaccatgtgataaaatgattttcttattgttattcttaagaaaaatattatagggagcaatggtgctatttttgccctctattgatgagagaaatattacctgggttcgagtcccaagtaaaacataatgtaatatataaacgcttgaa

SEQ ID NO: 382453 - DNA, 1204 bp, Cannabis indica
actcaggacaagggaaagaaagtggtgatcgatcccgctgtcaaggctcgcgacttcctggctcttcaggataagttcgtgagcgatgagtccgtttccaaagtggaggggattcctaccgaggatttgctgcctcattctgccgaacttgccctgaaattcatgacagtgttttcacatgcctttgttgcaggttctaaggatctcaatcttctaaagaaacataactcagttcttcaagagagtctgaagaaagtgaaattagaagaggttgctaataaggagatcgaagatcttggaaaagacaagggtcaggtggatgaaaatgtcataactctagaggcacgagtcgctgaacttacccgtgatcttgagactgaaaaagagatcaggaagaaacataccaccctgaccaagatgcctgattttgatttcgcagtgttcggagtggaggcggttgaaatgattgatgcatttcgcatcatgtcacctatggagactcaaggattaggtagaaatgttttccatgacgatgccgaaaatgcgaatattgctgaagttgcagagggtacaagcatagtcatggacgatcccagcactcctatcgcttagtctttttcttttattttattgaacttccttttgagcgatacatgggtactcgcatttcaaacagcttattttactatgttattcgaacaatatatcttgtcgaggatacttcttttgttatgtattctttatcactaaattgacgtgcatttttagttaaagctgattttatccttgcataattctttgtcgatctgttcacaacttggtgtgatgaatgtttctaagtataaatatgcgaaaatactatcactttaaaatttttagaaattccaaaatttgagatttcattaaataatcaatagtacaatatcgatggttatgcctctatacttagtacatttatgaagtaaattaactaagtatatatatacatgcgagtactattgataataataatttaaactttctccattccaagcttgatgaagaattgagccgtcgagattagataatcggtaagtgttgggttttatgccctaaataaaactcatttcatataatcagatttactcattaataaagatcagaaataacattttatgttgcatggttcacatgatttatttcatgattatatgtatataatgta

SEQ ID NO: 382454 - DNA, 1569 bp, Cannabis indica
actgtctattttgatcttcagtcaaccttctccgcaccatcttcccacaatataagagtgtcaagaatgtgacaaagtaaagtagaggaatagcgataatgcaacctcccgatgcgaaattaacaagtgtctaaaacatccaaaacaaaaaaaaaaaaaacatgagttagatcagtatacacagcaaatggtggattctttatcaagcattctgacaatttatcatgtaaaaaaaagagataaaaacagatgtaatcgaatttcagtcgaatgaattagaatttcatgaaacatttacatctcataaacaactgaaaccgccgaagaatgaaaagaaaaatgttcagaagttactggtaaaaaatggaggggctttacctcccacaggtggcagtttaaactagtttttaagtttctctgccgcgtttctttaaattagagttaacaaatgacttgtaactatttaaaactacagattacttgagcagcaaattacagcaacatcaaatgaaaaattgtgctcaaatcagtgtttccacgatcacgtttaaagagattccgataaaacaatagtaattttagtttctcaaaagcactaaatggcacgtaaaattttagcaatttcaaacaaatgaagttaccaccatttcaatggtggaaaattcttggcattctatatttaaaatcctagacattccttagttaggcaactgatgttagcaggggatacggctatatatataaatataaatataattttaccaactggtttcaatttgcttttttgcaacaattatttcatatgaagtgtaaggcttttacccccatagctgcaacaagatgaactgcaggaacaaaaaactggtccactttgttcttttcagcatatccattaaatgctatgaccattgagaaagtgtgaatggtaacaaatgcaagagcaatgattgctgcaacacagaacaaggattttgtcaaaagatacgtcaagagcaccctaaataaaaaaatttaaaagtaacaacagcaaaatattaacatttacatcaagtaaacagtatactagagaaataaatgcataagaagactatgctaaattgactcaccagaaacaaggaaaaatggtatcttggagcagttatcaacaaaatatgttgctggtccaaatgctggtgtcaagaggctaagacagaaaaatacagcatgtgctaatccatggcccataccaccagctgcaaacaattgttacaaaatttatgagcaaaaacctgcatattatgaactagaagatgatatatgtttcaaagaaacagatgcaagtaacttttgaatgatagatcgactcttccttccataaactggttggcacacttagcagaaaatataatcttcaaatacagtatttaaaatgtttaactgatttaaaaaataaatcaagttttacatgagataaattatattcaatggctatgatttgaatatatatctgaaggagatgtcattagcaataactgtttcagcttttattccttgctaagatgtcaagaaacaaagcaccacacgcgacag

SEQ ID NO: 382455 - DNA, 2744 bp, Cannabis indica
ataaataataaataaaagtctaattctgaacttaaatcttaattatttgctaattctaatattaaaactaagcggtcattacagagttcatgacatttaaggaaatgacacaggacattaagtacttaatggtgactggatggaaatttacagggctaaaaaaattctaggcagatttaaaggggtcaatagctcaacaatttgtaatattaaaggatcattgcaacgaggtgttagctacaaatcttggtagcacaactaaccttcagagtgacctagttgatggaaagagaatatacatatgtgtgaaggcctgcaaggattgatttttaagagggtacataccactaataggtttagatgggtgtttcatggaagggtattaaaaaagagtaatgttggcaacagttgggatagatgggactatctacatattttcaatagttgttgttacagaaaaagagacaactaacagctagacatggttctttgagctatggaaggatgatttgacacccactaaccctagcacattcattgtgcagtgattagaaaaatggtctccaaaatgttgtggagtctatcttcaacaccctgggcagtctcttttatgtgagacacatgcatggaaactcaaaaaggactatccaagactcgagttgcaattgctttgggtagcagctggagccactacaccagcagagtttgactctagaatgcaagagtcattaaatgtgacattttaacaactcttgcattctaaatcaccaactagttacttacaaatggttggctgctaaatcaccaatagaatggacaaaaccacattttaaagaggggattaaatgtgatatgttactcaacaacatatgtaaaagtttcaaccatactattatggacgcaagggacaagcctattattactcttttagagagtataaagtttttgttaatgtgtcgatttcgcaagagaaaagaatttgtgctgaagtgaacatgcactgtccacaataattattgtgaagattgtcaaacaacatcaaaaagtttcacgacagtgtttagaaatatgagtcaatgaattaatgtttgaagttaggatgaacataaaaggtggttgtatggttgatttggataaacaaacatgcagttacagagtatttcagttgactataataacttatggacatactttggcgactatttcgtattacggacatcatccatgggattatattcatgcttacaaccaaaagtcagcatttacagctgcttatgaaggcatgattgtttatgcctagcctagacaaatggcccaaaataagtctcaattcaatttgccctccaggagagcacaacttacaaggcatacttagaaagaagagaacgagagcagttgatgagccaccaccaccaactacaactaaaaacaggagattcgtcctggttatgcattgctccaactgcaaacaagctggacacaccaaaacaaaatgtagaaaccaaagaattcggccccacaaccacatgtatttaatttacatattgctatctatttattagactttgcttctatgaataaatgaaactaaagtcataacaactatgtttaggtggagaagaacaaaggaggccgcccacaagaaaaaacccatctaaaaaactttgaagatgaggaagagaaaaaaaaatagttggcaagggaggcaagagagaataggacaggatccatgcacaggtagctccaattgtaaggtcttccaatccaacaacttaatataggagaccattgatttactttttgaattgtaaatgtatttttttatttttatttttgttatgtgagtattggatgtatgaattgtaagtaatatatgctacttctttttctttttttgaatgctaatttagggagttttaggtgttaggatgcacaatgggattatgtgaaaataaagagctactttttaatgttctcttttgggtttaagtgaacatcaggagcacaatcaaaaaattatttggtaacaaacaattatgcagcattgacaaataaaaaattggagcaaatatttgactttatttcattacattgtaactgatttttacataagttcatgatttcaaccagatgaaaataaaataactacaatacaaatctaaaagtttgattactttattttcaagaacaagaacacttgggttactgtcatcaaaacttttgttgtagtgagctccatctatgtttgtcaaatcaggaatttcatcaactttcgacatagatgacagttcatcttcaagcctccttatttttctcagcatgtctagtttaactacaacagcatgttcacacataagagagttgtaccattctcaaaaattacacccactctcatgctatcaaaataaaactacaaaaaaatattacttcttgtggaaaaatgagaagaaaaatgcaaacttacatgatacgggggggcatatcacgaatttcctgggttcgcactagtctactaggtcttcatcataactctctttgaggtcgacaacaacaattcacaataaggtgaaccattttctttcctcttctcttcttttcttcttcatcttatttgtcattctcttcttctcttcttcatcaatttctagctctaaaaaataagtttttgatttattttgattttgttatttagtttttattttcattttaattatttaattaattagtaaaaatatttttttttt

SEQ ID NO: 382456 - DNA, 1234 bp, Cannabis indica
aaaaaaaaaaaaaagacttaatttattggtgtgcacatagctagatagatagattcaattcaatttagttagctaggtccaatgtatatgtgagttagaactcacgtggaagtgacatattactgaacttggatcaactgttattgtcactctaacttgtccaccatttcttgtcggtccaagtttatacttgtatcttttttttatgctcaaatgtttatacttatattttgttaaggatgaatcagctagactagttaacatgtccttattactctcaggttttcccccaaaaatatgggaactatagtagtagtgtactgtcccgtccgagctatatatatgcttttataagatataacgagcaatacataacattacattataatgtttttactatcaagtttatatgtactttaaaactgtagcaactaattaatataagccaacgaatacaaatttaaatgatgatagagattttacttggtagaataatgacagttgataaaataattatgtaaaaatggtcccaacatgctttttgttctttctttataactttaatatccagcagggtttacaaggttgacaatgacttaaagtgttgataagatgaatactactcagaatatcaagtgtccaatatttcgtcgaatatttttctctcttttcctctttttccttgataatagttcttctagttttattatttaattatataaaaaatattaaaatgtaacaaatatagattaaggtgtttcgtaaataaattagataacttataatttatttaataccaaagattgtaacatggaagtggagttacaaattagtaactctaactcatttgtaacttttttggttaatcacattaatttcaagtataatagagtgagtaaatacgttatgatatccaaagatattatcatataattgttagatgatgttacaatactcgtttaattaagtgattaaattgagttggaaatgttagaaattgaatagaggtcgagaggagttacaaaactccatttttgtgtatgttgaaatagtgtagtcagcctacatgttgcgtaaacaggttttcagcaaaaaagcgttatcattgtagcaaaataaaagagaatgagttttaaagtgtacacttttcatcctccaagaagaaataggatcagtgactagtttcttgcctttaccctttgaggacaatggtgaagtgactggtgcaggggca

SEQ ID NO: 382457 - DNA, 1638 bp, Cannabis indica
gagtcaatatccatagtcgaagctcttggtggagaagaaggctgaacttccacctcgggataggcagccttaaaccttgctcgtaggccttcatcgactaggcgtactccttgcaactgattcccgagcgacatccacctgatgaaagatgataattaaggaaacgtcattaagccaaagaaacgcataggagaatgagtagtcctcaatgtattcgccctacttgattgtttaaactcgaggtttcatgaagctacaggctacacagaattagataaatttagactgcctaacaagtatgtgttataaatttagataagttcgtctcttcaaagctatgcgggtgatcaagaaaatcattgcaaaggtttgcagcaaaacgaaaaagggacttaaagatattcatgtaagaagtgtaaaagtgagacaaaatattaccctgaatgagtattgtgcatgcgagcaaataattcgagctttctcgtccttggacttattcgctccagcagaggatacatctgcacgaatacacaagagataactcaacttacttacctgaataagaacataaataagattatatatctatacttcaaagcttctaaggtgtatttatgttctactaacctcatctggcttacgacttgtctctctaacctctgcaacgataacatcagtatcaatattcctgttaactattggatctcccttgattccaacgaggcaatgctccttgctatgattcagccaatgaccagttctccctgttctaataattcgctggagttgattagtcttcacccaaataatctcctcgacacgcttgtatccccagaggtccaaactgaagaagtataaagatattcagattcttctgataaataagcaccaaaaggattgtcaaaagagtttataaaccggttaattaaatgataaaacatgataaatcataccattcgcgcccaagctccattgcacgcccagtgacccaaagaaaaatcagaccatcagtctgtagtgcaggaacattaagatttcgcatttcatcatcagccatagtcccatatggtagttccatatgaatatcccatggtgggtctgccataataactccaaattgtcctaaaatgtccattctgaagttacgaatgtcacaattgatccattgcggttcaccgagctccacttgtgaacaatattctgcacgctgaggctttaacggtttggaaggggcaagagctgaagcgcccattatcatgggtgacacatctggtgttggatcgagctcataatgaacatacttgcatgtctataaattgaaagacggtcattactccacgtagagatcataacatcaataatgataaccaatcaataaccgggtgaaattgatcacaaaagaagtaaaaaattatataccttcatgtgacggcaagtatccaagaaagaacaatctcctaaattgatgtcggtatgtggagcaattatcgtcgaaaatgaacctaaaagaagtttttcaaaaaacaatataagaaaggacatttactgaatataaacgaataactcatctcggaggttgcgtaacataatggcacactgtatggctcactaacctctcacatgccacaaggaaccaca

SEQ ID NO: 382458 - DNA, 1356 bp, Cannabis indica
taacaagactatattgagaggttacgttgtaaaactatcatatagtcttttccccaactaattatataattcaatagattattttgacctttttcttgtaacaaaaattataaagtttatgcttatcttattattcgacaatcaaggtgtgagtcatcaatcttaaatttagattgttagtattaatttatttattattattacatatcaataatagattttagtatatctagaaaatcaaacatcaaacattatctatcttttgtaaaaatttgtgctacaaaccaacaagaatagcctaaacaaaacaacaagaatagaaataagacttaaaatttccgcgtttgctaacccttcctaacaaaattatttaatcaaaatagaaataaaggctgtaatttaagggaggtgtcttttactgttattttgtttttttaattacaagtgaaatatattttttttaaaaaaatatgtacctattgaaactattttcatttttaattttaaaaatctttcaaacaaattttaaacatattttttttttcttaattatagtctattcctattctctttcatcaatatttaagactcagactcagacctacaccctaaacccagatcctgaccaagaaccaaaccccggacctcagtcttggagtcggaccttgaccccgactctaaccccaatcctgaccctaacctggacccagacccgaactcgaacctcgacccggacccagacctatacccaggctcgaagccggacccagacctgactcaaataaaaacaaaaaacaaaaaacaaaaatgaaaataaaatttacaaaacacactttctaaaaaacaaaagtagttacaaaacacattttgattttttaaaaacaaaaattctactttcactttagtgatttaaaaaatatatatattatctgttgattatggttacaagtttcatattccgggaagatagttgttactaggagtgttcatcaaaccactcaaaccacccgcaccacaccgcaccgcaaaaaaaatacgatttgattttttttgcggtgcgatcgcggtttgaatttttcctaaatcgcgtggtgcggtgtggtttgcagttttgaattgttaatatgcggctcaaaccgcaccgcaccgcatactataaaaataccaaattttatatttatttaagtccaatatgtgaaggcccaacctaagcccactaattattgtattgttgaaacttgaaacttttttttcatattttttcaagtcttatggtatttttgacaagtgttgcgcaagctttgttgtatttgtgataatttaattatttagtgatagtccaaaccgcaccacacc

SEQ ID NO: 382459 - DNA, 1581 bp, Cannabis indica
catttatctttgtatctctttctctctttcctaaaatctaataaatacatcaatcatatataataaaaaagagcattgctattaggcaccagtggtacctagcaccttctcgacatgttgcgttgcgattgactagcgatactccctaaaagctattatattaaattatgtgggacccgatacttagttgaaccaataacgatattgacacataggaaggtactaagcaccactggtgccctttagcaattttttttttttaaaatacatcctacagtactaaactaatttgcatggttattatggcactttggtcaattgtttatttgatcaataaaatggttgaataccttagccaaatataaaatagttgaataattatttgaatttccttgtagtattcagtagactatagcatgaaagaagataatgaattttgtaacattatatacatactaattaaaaggactcaaatttcttttataaatgtatgtcatattttgaagcaagcattttgtttttgtttagcaactgtgtttgtttagtgtttacagcgcatatatactcttaccacttaaagcagcatgtccgtacattgtggttgtaagtcaaggctacgaacatgccgagacaacctcgagcccttcaaagcctcgccagtcgggccacctctttttcccaaactaaaataatattattcttctgagcaaattcttatgaaataataaaatattaatacccacattcattcttgccacctgggacccacccacctagtctttaaagattagatacacccaccgacgacgaggtggcgcgtgaagtgaatagtactaattgtggtggtggtggtaaaggagcttcggggatcggggataatgaatcttgttactgcacaaagtaaactactgcaacatgattgtgacacagactgcctcatataactacaatctctttcctcacttctcgatttttgtactaaatataatatacaaatactaattacaaacttctttttcaattttcccatccaaaaaaaaaaacataaattttgtaaatttttaaaaatataggtatagtgtacgatacggacaacaaagtttctcctattctagttcactaggtgggtttacaaaacttttagagcaatttgcggcgaaaccccccttatgttttaatttttatacacttaacccccttattttttttttggtggcaaaaccctcttatgttttaatttttatacacttaatccctctatcttttgttttggtggcaaaacccttcagtttacttttctttgcaaatttaaagttttagttaaatattactgttaaatactaatcggattactagtactgtatcgacttcgaggttttaccgttacatatacaaaggtgtatacagtggtcattcagttgatatttaacggtaatatttaactggcgtgtcaaatttgcaaagaaaaataaacataagggggttttgccaccaaaaaaaagataagagggttaaagtgtaataaaaattaaaacataagggggttttgccaacaaaaaaaaagataagggggttaagtgt

SEQ ID NO: 382460 - DNA, 3241 bp, Cannabis indica
tttgcagtcaattttttgtcatctgtatgttacttatttaatgttatttagatgttatttttatgtaattttcttgttattttcatgttaaaaccgtgaaaaaagtaaaaaaaattctttaaatgtaaaaatgtaattcttttttacaaaaaaaatagtacgtaattaatgggtgatttcaaattgcaccctaaaaaaatagttgtattaatgtactatatatttttatattttttgtatttcggatacttaaatagttaattatgatatcaataatgatgtatacggtagttgtttaattatattactgtaattgttttttttaaaaaaaaaaattagaataatttaaactatttttatttttttaaaaaattgtagaatgtattaaataattacaacatattatattaaagaattaagaccaaaattatttcgaggttaaaaatataaaagtaatgaatcgataacctatatttttagagatggatcataacattttcaataattatatatcctcaatgataagtttattttaaaaaaactttgaattaagagaccttaaaaaaaaaaagaataattatgttaatttatgtaactagaattaaaactagcttgttgaaaaatttagaaagaaatcagttataataataataataacataataataataataataataataataaaagtcattgactaaaatttgtttataaaaggataagtggttaaagtgcatgttttggttttttgtgtgcatgcactagggctttgattgggttttctgaattaatattgttccaagacatattgttatatactgtagaatattatatatgggaagcagccctctatatatgctgtcatatatataatgtcatagtccattgatatatatgtttccattaatttgtattgctatgttatgccaactgagttgctcttagtggttgaagtggatttctacaagcatgcatgggaagtggacctgccactgatgcatgaacaaagttgataaatattattatttactctcattctctctcgtcgtgtttgttggttttttatttttttttatatataaataaccgccctacatatataaaattataaaatttatagtatcacgttccaatcttaaaggtggtcatgatatatttaccgttaattattatacatagttgctcatattgtccgtacgtatgaatagagtaatatgtatatatatttatgtagatatatatatatttatacttacatcatgatgacaaagagcaccaagattgcagaagaaatagtggatatatcgactactgattcccctgcatgcctggaattgacaacctgaaacaaagcagccacgaatttctgatacaatgtcataccatccatggcttcagaattccactccagagagcagaatagcacgagttgtaccattatgaacccaaccacagtcaacccaagaagtgttgaacgaacactagacagcagatggtcataccctatttccttacagtttcttaacaagtaaccaaactctcttctctttgttatctttcccaaactccaaattactaaacgaaggcacactggatacaaagtgttacctaaaaggatttgagaaatgaggatgagcaagatccctgaattttttttgaaaacaatcatgttttcgtttgtgggaacgaatccacagtttgcgaaggttgaaactatggtgaacactgaaaatgtttgtgttttgatgcctttggtgtttagtactttacttgctgaagaagatagagttatgtatgaagaaagtaaggcagaaccaactagatgaacaaataccaaataccccaaaaccacataacccaaatacttaatagagttattttttagagattcattattaatgtcgatgtctaagagattgttagaataacgatcattattattatctggacatgcggcatttgagatgctatgtagctcgattttggtgggatctactgctgtggtttggtgtttgggcaatttagacctttctatttggattcctagcatggaaacgaagacttctccacccaatagcattaaaatggtgagaataataagctgggaattggaaaaaacctccatttcgatggttgacatgcttgaaacagtagttgctgacacagaagtatagaacagatctaactgtttggggatcaaaggttgagaagttcttggctttgtgaatacactcaaagccaagtaacccaccaacgatatggttaagaagtaagtaagctggatgaaaagagggttagaacgaaagagtaagtggcgaaataaggtgctggtgcgtgatctgttaggggaatcactatacaaatcaagtttcttactgaaagaagcaaaattgttcatcatcaccatatgattagcacttaataattaatggtaaaaaaaggagaattaagagggtcaagagattagtggtacaagttgaggggtgctcttggtgttgggtatattggggtttaaataatggagtagcacctgatgctgctcttcatgaataattacctcaggacactctaactcttagtggcatttccctatttggatttgatttaattatctgcactaattagtggccatgacaatggccacttgtcagaattaattctgggccataattgttgagaagagaataaattttacatattgacaatgacaatatgagaatacactattacatttttatgtacacgtgatctattagctagtctttcatgatgagaatatgttttcggtcgtgtgatcatacacatccactatccaatagtgtggatgaatatagcctaggttgtccacaagttcaccatcattttggataaattttgatgtaacatacgtactattgctggtgttgacaaggtgctggctatataattcattccattcttagatatattgacttagacaatttatagttccttgagtttctatccctctaagaactagtgaaaatatgccttcttgaaaaacaaaagatatttgagtactcaaagctttgggtttgtaaaagcatttccaacgcctaatatattaatttgatgcaaaaatttgtttttttttttatctcattttaacgttgacaacatatagtgtgcagtatgcaatatatgtaatgtgtaattactgttcatatagatagttttacattattattaggctaattagcaatttttctcccgaactttgacat

SEQ ID NO: 382461 - DNA, 2498 bp, Cannabis indica
tttaatttaataaataacatagaaaatcactaaacacttacaacacaactaatcgatagatctctagatactttaagatgtctaatagcaatgctacatcagttagaactaataacaaaaatttgtaattattatttacactataggagaatatcttgaaaaaaaaagttggaaaccaccaccatcatcaccaaaacagatatctaagaagtactcgaagtccagccctaattctgatcgtttgccaattcgaaaccctgatcaatcctgggtgattgattggtggtggaatttgaaaattattgaatagggttaaggatgtggcagtactagtcatgaagcacccaaaaacaaaaaatcaaaaatcaaaaaaaggaaaaaatgaaaaaaagaaaataaagtaggtaaaataatggagaagaatcaaatcactacttaataataataataatgtatgtcgtcatgctcaacatcagccattcagatatgtaaggcatctttaataaaaacccttcttttgccctagctatagatcctttttctcttctttataaagatatttcattctctataaaaattactaaaataataaaaaagaagtcactttatatttatatatttgaataatttacgttataaatatttaattttaattttttactgtaataatatactataaaaaattatttttagttataacaaaatttatgactacttccctctcaaaaaaaaaaaaaaatttatgattacttataaaatatatgtgactaaaaataagtcttttggctaatattattagttacaaaaattataatatttattgtgactaaaattaaattagtaacaacttgtatttaaatactatgttttagtcataaataattactttatttgttgtgacttaaagattatcactaaaataaaattttttatagtgatacttaagttataattctaggaacttctgtaggtacttgattataaaatgctatgtaaattttcatgtgacaattctctaattggtcgtcattaaaattttatttttttatttaaaaagtaatttgaatataccaataagtaataaattaacacgtcaataataaattgacacttaacgatcaaatatttaccgtaatatattaaaaataaaacttagtattattatgtaaaaaatatatatttataaatcttttaatttgtatatttgagtggcattaaatgaagaggcaaaaactgtgtgctgtatatatatggcaaaagaagaaatataatgacaattatttattcttttgtatacgtacaaacaacaacaaatagtatcattttattcattattaattactttttttaaaatatatatataattaaattatttattacgtacgtacgtactagaaatattttggcattaaaataaaagtacgtaagatagcataaatatatatagctttaattaattgttcatctacacttttagttaattatttatgttacttttgctaattttaaaagtactcaattattatttgtcattttaagcttattaaagcaactctataaatggtcccttttaattaatcgagttattaattataattaacgggtatatatactaacttaattaattaataaccattttattaaaaactacttaactgggcatttatggactattattagtaatttttgagaggttatggaagttatagaatcgagtacaaaagttcataaaacattgaaaaaaatacatgctgaaaaataaactgtctttttaagtttcaaaatttcaaaattaatttggtaacaagtttccagttaccaattttttagcattaacagttcaaaactttctacattaactttatatcatttatataaagaaataagtctccaacaactatttaatcaaatttaaatcctattagtaactcaatttattaattaaagagtaatgatatgaagatgagtaaacattgttaattaaacaagaaaattcctttttctaaaataaaataaaataaaacatttgctttttgatcatgtacgtatatttatggaaaagaccaaacaagctttcaatgaactgaaacaagtaatacatttattttggatcaaactaaataattaaacatataaagagtagtatgtatatataatttatactactcaaactagaaaaaaaggttcagtcttttcactacaaaccctcataaatggaaatagtactccagctcagtccttttcattttacatcatcatacaataataataataataataataataataataataataataataataataataatgaatgaatgaatgaatgaagttttattttttttttattatttaagatttttgtcctccatagtataacctatgtattattgtgttccttgaatttttcagcccgttaaaaatagtctctaaactatttatagtgttgtaaatattgggttttatgccctaaataaaacttcatttcaatgtaa

SEQ ID NO: 382462 - DNA, 2713 bp, Cannabis indica
attgtttttttttttttttgaaattagcacttcaattcaattattttttaataaaaataatgttatttattgaataatatccgtaatattaaaaaaattaattacacaactaattttacaaataactaaaataaaaaattaaaagaggaatttgcgggtaatttaatatacacttaactttcttttttttttttttttggcaaaatccccttaagttttgcttttctttgtataaagttaaagtatcagttaaatattacatttaaataccaactgaattactactgtatcgatttcaaaattttattgttacatatacacatgtgtatacagtggtcatccagttgatatttaacgaatatttactggcatgttaaatttgacaaaaaaaaaaaaacttaaaaagaggttttaccactaaaaaaaattaagtatataaaattaaaacataaaaatattttgctgcaaattgctcaaacagaaaatataagtgagtataacatggtataataatacaactctacatattaaaacagtaggtagttgctagttgctacattaatagattcattatacatatataaatatatagtaattattatagttatgaatatatataatgagatcaccacacagctataatcttcccgacaaggacgtacgttgtcatcatgatgatcatgaactcatcatcatcatctacatcatcgtgtgcgtaaacatcactcatgatgatctgagcaagaagatactgagttgctgagcggagctagtcccagttgggttgatcatatgaaacgactcagagtccggagatccgatcactctctcaaacccagctctcatatacatcaaatctccatcgggaagtactcctgccccaacggacaccgactgcatatggttcagaaccgccacgtcggacaggctgagctgcctggctatggcgaacccgacctttctcccattacagtacatggtccacacggggacacgaaacagagaacattttttgtaattcatgttgttattaatattattattatcattactgcggtggcagcactcgagtgctattctgagcagtccgtactgcatctctctggccagatacgccgtgggaacggcgaattctagaagcatcatggggttgctgcggctgtgttcttgaaggcagaagctaacacggcctttcttgtaaccaaagaaggttccagtcaggcgcgtgggctcacgaccactagtactagtattaccagtagtactagtactagtggttgttgtgtcagaggagggcccgggggaggaggaagaggaggaggagatgaaggacgagccttcttcgaaagttgtttggtggaagccacagcaggcagggaccatgcactggacaagggcgcgcaaggagcggcgtgggaacctgacttggcgcgcgcagtctacgctcgttgcagtgtccatgatttggagagtttggcttcccaaatctatcatcctcatggtgggtgttgaattaagaatatttggaggaatggaattatagaataatttggattgtagatctgtggtggtatatataaggcggaaaaaagaaagaggaaaggtaaggaatggggccttattaggtagggcaaggaaataataattgtgcatccccacgagggcttgtggagccctcttgttttggaagcactcgtttgatcgaacactactactatagagaatagatctacatacatacacacacacttattgtccacccacccactcactcactcactcactctagtactactctttaccctacttattggtcaattatgatgactaattaagaatcattttgaacaaaatactatataaaaaagaaaatctcaagttcagcccactaatcactatcactactactatataatataattgataacactcttacactatgcttctatacgtaatgactaatgtgattatatcatatacgcacaccagacttacatggagcctaaaaagtgtttaagcttacctttaaatttcagaacagattatataaaattaaagatagaaacaaataattgttagacataatttgtgtagatgtctgttcattacttaataaacctgattttgaatctgattccttttattttttatttttatttatatatatgtataaattcactcttttgaaaaaaaaactacaaaatattagcataacaaactaccaataattttttttgaaaaaaaaaaatattatattaatatattatgtttattcatatttaatttataattaattcaaatttcaacataaaaaaattaaaatacaaaaattataaaatctcattatattattatttagatgctaaaatttatttcaatatatataataacttgatttgagatttaagtaaatatgtaatatatatatttttttaaaaaatattattttaaatttacatttatcacccgatcgatgcatgtagtcgatctttaatatacgctacagttgttctttgttaattaattattgactacactacaaaaaacactataattattgttaattaatatactagctatcaatctgcaatatgtaaatctcatgcactacactactatatataattgattacttagggtgtttaaaagttattgtctcactacaaaaaacagttatattgagtgataattttttaatcacaatataaatttt

SEQ ID NO: 382463 - DNA, 2859 bp, Cannabis indica
actggaaggaagaaaatggcatttggataggtaatgactgaaagaggggtacatatgatatcaagttttggatctattgtaagagtttattcagtcattattattattaacttgctcctaagctgaaaacaaaagaaaaaacagaaaatttataagagataaaacataaaaatatatatattactcttgttggccccccctatgtagctagccagtcaaatgaacaagacctgactttttgtactgtactatactatatgcatgtattatagccaatattattagcccacgcaccaaaggcagctggaatcttcaaattaaagtattatattccttctccaaactccatttgttttctttttatttttaccaaatctctctttattatactgggtacttctctactactactacttttcatttctatatagaaattatattatgagccagagctagtccatgcccacaacaagatcattgaagctcaaaccccctacataatacggttactaaatatttttataaattgtccttatatataatatggctggttctggtttggtacttcagttgcagaagcagttgggagattacacaacttcactgtttaatgaggtcagttaatttgcttattaatttgtgtttatgggttcctatatatattttgtactttttgatcttttaatttctttcttctttttcttttctgggttaatcttttgacgatgatgatgaatctttgttatttttggggaatatataaagggtttcttagatgatcaatttaaccaacttcagcaactccaagacgaaagtaacccagactttgtggttgaagtagtttcactattttttgaagattctgacaggcttcttaatgaactggccaaagctttgtgaggattataatattgtttaattttttaaatatcatgtaaggatatataaaccaattaataatttaaattctttaatttattatttgcacatctttctccttttgggaaaaacaaaaaaaataatggttgcaggaattatcagaatactgattttaggaaggtagatgcccatgttcaccagcttaagggtagcagctccaggtatttcatcactgcagatattagttttttttttcttttttctttctttcttaattcttataatttctttgtttatattctctcttaattacatatcattttggagggcatgtcactgtaagtaatagtacttgattggatcttgaaattaattattattaataattattagtccatatattcaaattttgttaagacctaggaattagatggacttaatttcatccagatctgatattgatatactgttagttcaaagttcaaactcatccacatatatatttacaaaaatagacaaacaaatatatccctttcatgagtttttgtcatccacaaatgatctattaattattcttttataaaaaataaaaaataaaaaatacttccttttgcacttttggaagacaggccacacaatttatctatcttgcaatttataatggtagtaatcctgaatcgaataaatgctaataaacatagttaataagtactatatattatggtaattaataataataatgagatcgatcgaaatgtttctctcttttcagtttgaatagtgttttatttttttgcttaattaatgatatatgcaatatataattctgtttaataatcatgatgacctaattaaaaaaaatactgggtgatttaattaacagcattggtgctcagagagttcaaagagtctgcattgctttccgtaaccactgtgaggcacagaacattgaagggtaatatatgtaatatatttaatttaactaataattaattaaatcttacttataactgtgttatacatacgtacatatatgtgggtatggtttcatgttgtgattaatatataatgtaaatgaaccaaatataaatatatgtgtgtatgtaacaggtgcttaaactgtttgcaacaagtgaaacaagagtatacccttgtcaaaaacaagcttgaaaccttgttacaaggtaactatattttatgcatacatgtgattatttaatacataatattagtgaatttgcttaagtaattaggtttatatatactaattaagttgggtatttatatatatattatagttggagcgacagcttttggcagcccggaggtcatcatttcctatgtagtcttatctgatcatatgtagatcctcatggagataacatatgacaatcataatcatcaccatcatcatcatcaagggagagtatagtaattagcttaattaatttatggtacttctccatgcgtctgtagattattgttaacatatatatatatatttatatatattgtctagtaaatagtctatcctatatatctagtcttggctggttgctacttaatttgaacttaattatttgtgcatcatttttctttctttgtaagcaagtaagaattttttggcataactctataacatcgaggatcccctttaaaatattaatacaaaagatgtcattacattatttcaacaaaatacactttaaagtttagaatattataaactatgaattctgatagctcgtctccacttaccaggtcagataatatgtatatttggtggggaagatccctaattcatggctaaccaaacatttttaacccctacccacaccacatagcactcgtgagtcacaaagactcatcaagaaaagcaataacataatattcagtggcgaaaatatgttatggtatggggtggccatggccccccctaatattttggggaattatttttaatatatatatataatttat

SEQ ID NO: 382464 - DNA, 4270 bp, Cannabis indica
cactactgtccatttcataacttcaactttttgaaggatttttctcttcccccgaattctgtaattttttttcttttgcattaaggatattatatttatggattcatggctggacaaacattcaggaagctcgtgttccattacaagtacgtgtcactcagaaaacaatggcttgccaatagaggaaggtcaaggtgatggtgtagttttttttttttaatttattttatttggggggggtttgtttcttttcactctggttgctaatttccttacatctttgtttattccattccttggattacagtcatgaaagatgaaatttccatttcttggattacatagtcgtgaaagttgaaactaccattttctgaaactgtggaaattttcacttatgatgcgttcataaatagacaacattcctcaagactgctacagtgattcttaagagttttgctggcattataatcttgttatgttggccttgaaatctgatgtacatattgagataaaagatgagggttattttttcctcttttcacttttatgacgttcatatttagactgttaggagtacttgggggacaaattgctcttgaatgaaatggttatttaacttggaacaattaggatcccaggtgtatgaataagagttaaaaatacaattaggttgatgatctaggttgtttttaaaacatgattagcttgttactcctatcagaagtcaccatggatatgttctggttatagaagacacaatattgattgtgtgatctaaatttacggtcctactagcttgttctagaatattgtttccatagtttgctgttgttgttattgttgttttaagtgatgtagcactaaagtgccataatactaatattagcatgcatgaaactccctaattgatgtgctctgttttgttgttgggattcttgctctttcatctaactctagtttttagtgggggctgtagctagtgttggaagactaggataatatacgtttggttatgtttgatcagttttctccattttacttgaccatcctaaatcctgaagttggcttaatgcaattctgattactgatattcataagatttcaaatgtctttacttttgtaaatgcaaaaaggttgcctgcaatatccttttaaatattctcagggattgttccttcgacaactgtccaaatggatttatattggaaagacgtagatggagattctgactgggtaagtacacctttacttcatttttcttgatctctttttgaatggcatctagaggtgctttggattatttttatttaattattttttcagaaattgggtttatttttcttttataagcaaaggacttcacttttctataacattagtataaagttgagttaccttcttacaggttagagcaaatgatatttatgatggtgttgaagaaggatatgaaagctccaaggatgagatatcttctgtttcttcgtacaatcctacaaaagatggtatcaatagaacctttggaagttctttttcattgcaatcatatgcagcaaggttgtcctttaaagatagtggatatcttgaaggagatcgtacaagtttgtcttcaaatcttgcagttcctcggctctctgcggctgaagtcatgtatgattctgggaatggtgagtcgtttttagtggctttatggttgagtagttttttattttccaagttctagaatgatgtttgtgaagccttttggcctttggcactaggggctatcattgcaattttaaatttttcttcacagaacaggacttcattttccatttttgtatgaggttgaacagcagtgttattgagtggcatgttttctttgcaacagatttgttatccccaaagtcatcttcccttgtctctccaagccagcagcagaagctgacgaggtcactttctgcagatgacgacacgggggcatcttcatcaccagctgccagagctgttgagcctctagcatgtattcttacacacttgtattctcttcaaatgttttgttaggacttattagatctttaaccctaatggtttctgctgtctagactctagaatcttcaaaagctaattttctgcaaacatttcctgcagcagaaggctttattcgaggaagatcctataacatccggatggacgaccgtgttatgcttagattttcccctaagaattctgactcaatttattattttagtgatatggtacacaatcttctgcttattgtatacttaattcagcccccttcaatcactcttgatttattcttcatccttggcaaattattgttaaacagattggtggaacccttactttcttccatgaagaaggagctagaagatgccttgaggtagttatggtatttgtgttgctaattattcactaacagaatccaaacaattgtacctcttaatatgatgctctattaagggattgctgttttccaggtttcaataacattggagacttcagagaccataggtcgaagacatgttcatccttctcgaaggaattaccccaacaattactaaaggttttacttctgagcctacaaaataattttggaagacatgatggttccattcattgatgattatcattcctattttggatttcttgaacatctgttgggcactatcttgtaggttcagagcgatcattacgaggtggttgccgatttggtgcaaacaagctttctcttctccattcccatggatgggcctatgtctttttccactccccatgtttctgtgcaatgggtccttagatttgaattctttaccaccccaaaaaatatagattggaccaggtattgtttgcattcatttgaatggacccttggaaaatacctacccttttcaatactatatgacacatatgactgcatagattatagttcaaacatttttaagagctatgtttggagtatttttcttctgtcatctgaaaatggattttgccttggcttcagatacgaacatcctcttcttgtagagggtagagacaaaagtgagtgggttcttcccattacagtacatgcacctccaccagtggcctccgctcctcataaccgaaatgacaagcttttctccttggaacccatgtgggtgcataactgaactgatttaaggtaaacaacttaaaaaatctcattggaaacatttctgttctcttccaatttttgtgtttgtatgtatgacattttccactcagttcaagaacaacagcaatgaaatgaatataaacattggttttagttatagtgaaaaattactaataataccagctgtagtctcactactcgctctctgaataatatattatatttgatatgatacaggtttttgtgtagaacaaaaggtccaaaagaagaacagctaaattccagaccagagctcatagaaactattttcagaaagaaaagaaaaagaaaattgtctcgagtgtaaaagcagaattttgtttagtatttgatgcggtggctctggaatggaaataatttttccttgattaaaggtctaatcattatgtacattctcctcaattatgttttttttttcttttctttttaattatgattatttaatttgagtgaagcttctcaattgacacataatacagttgcagaattttgtacataacgatccccttggatgggaaattatgctttaagactgctcggctatttgatttttggttattcaataagaaaagaaatatacagacggtagtgtaaacaaattaattttggtttattctgacaataataattttgatttattgatcataatattaaaatcacgttaaattaataaatttataccaaaataaaaaataaaaggatctggaattttcgatctcactatgaaaataaaattaggaaacagaccgcgcttcgcgtgcgtttttaaatcttaatatgagtaactatgttattaaactttcatttttctgaaaattaaattaatattaacaaatatattattatagtattgatttttaaaatataaataaaaattgacttaaaattttaaaaaaatatatattaggtgataaatttaaaaaatatttcaaaattgttatcgttttttaaatttaaaataattataaaatatttatgttttgatagaaaattatgaaatatctttccatatggatattgctaattgttacattgaattgcatttataataaaattaaaaaaatttaataaatatatatgtatattttaaaaattata

SEQ ID NO: 382465 - DNA, 3169 bp, Cannabis indica
ggaagtcaaaaagcaagtccatgatgcaaacactcttctgcaaaaagttgagatggaagacccgtctaatggatcggcgattgaacaagcgaaatcccagctcaatgaagctctcctcagggaagaaatacactggaaacaaaaatccagagtgcaatggctgcacgagggagataagtgctcaaaattctttatggcctccaccatagtccgtcgccgaaggaactatattcaatgcgtcaaggccacaatggacggggattggattagagaccagcaacaaattgccaattgctttatcaagaaactcagtgatggctttcgaaaccaaagggatggctcggcctcaactcctcccgatctcttccagaatgtaatcaatacggaggaaggaattagtctatgttcaattccgtctgagagtgagatggaagaggctctatctgaaatgggaaaagacaaggccccggggccagatggattccctccaagcttctataatcaccattgggacactgtccgttctgacttattccaagtgatctcccatttcttcaaccacaatgatctgccaaactacatcaatgatacatccattgttctaatcccgaagaaggactccccatcacttgtgacggactaccgccctattgcgttgtgcaacactacctacaaagtaatttcgaagattattgccactcgattgcgaccttttctacaaaagattatctctcccaaccaagcggcatttgtcaaaggccgatacattgccgagaacactatgattgcgcgggaaattatacactctatgaaaaagaggaaaggaaaagggggcttcatgcttatcaagatcgatctcgagaaggcctatgatagaatgagttgggaatttgtcatcaagattctcggtctgttggggttccctaataatttcctgcagtggatcaaaacttgcatttcgatctcagcagttaaagtactactcaatgggtccattgcggggaaattcacacccgatcaaggcttgagacaaggagatccgctctccccctccctttttatccttgcggccgaaactttatcaagattgctgttttccaaagaaaaggctggccttctaaagggatttaaactatctagaagaggttcgccaattactcatctaatgttcgcggatgacattatcctattcgggcaagctaccatcaaagaagcaagatcatttctagactgcctcaacatgtattgcaattggtcgggccaagcagttaatggggccaagtcttcaatcttcttttcgaagggagtttcaccaagaaaagcccaagctatctctcagctgctaggaatgaagaaaatgaataataaagctacatacctcggcctgcccctattccgatcgctcaaaagaacggaggacactaatcatcttgtggacagagtacttcagcgtgttcaaggttggaaggctagacttctttctagtgctggaaagacctgcttagtcaaatccgtgggatcaacgctttcaaactatgtaaattcttcagatgttatcccgatcactacagctaacaaaattgacagagctcttagagacttctggtggggagacacggacgacaaaagaacactccacactgtctcatgggaaaaactttgcacccccaaggtggcggggggtctcggatttcgatcgactctggctactaataaggcgttacttttgaaatgggcctggaaaattctaatggatgagaatagcctatgggggaagctaatgaagcacaaatacttcccaaaccaaagtttcttggacttggaaatcaagcattcggactccctaatatggaaggccattctcagggggcgtcctcttctcatggaaggtctctgtagaagaattggggatggtagaaccacctccatctggtttgatccttgggtgccgggcgggtgtcgccaaccaataccccgagttgacgccaccgggggaattagcttggtcagtaacttcatcagacacaacgagtgggacgttgctttaattagacaatggttcaattcagatgactctagaaggatcctcaacatctcacttccaacgaatccttcgaaggattcctggctatggttgcccgaaccgaatggtgaattctctttaaaatcggcctaccgtttgtcgttgaacatagataccaaccgacctgagtacaccaaatggaaaacagtttggggagtgaggattcacaatcgccttaagatgttatggtggaaaatactgtctaatagccttcttaccaaagctaggcttagtatggtgtttgccttggataacactctctgcccgctttgcaacatcgacgaagagaactctcttcacctgctatggaactgtgaacttgcgcgggccatttggtttggctgcatgtggcaagtgcgtacaaacgtgactacagctgcaagttgggaggaatggctgatatggttctcagatgaagataaacgtcctaacagaatgcacatacacctgttcttggggggagcagcaactgtgttcgaagaaatatggagagctagaaacaaactaacacatgacaacacacaggatcctctaccagttttgatccatcgcataaatcaacgcctcatggaaattacttcaattcatgaaggacactgctctgatcaaatgtcctggtttcctccccctccaggttggataatgtgcaacacagatatttctttgggaaattcggagtcggcaggggcagctatttttcgcaatgacaaaggtaacacgctaaagatccatactttcaattcccattacttggactcactttcaggggaagtctatgccctcgtcaaaggagctgaaatggctgccgagttgggcttcaagaaagtcattttccaaagtgactccatcaatgcgatcaatgcgattcagtgcaaccaatcctccttatcgatcaatcaccataacatccaaagccttctgctcaaattccacagtgcagtaaccgccctcaacttgtgggaggctcattggatccgaagaaacttgaatggtgtggcccatgatgcggctcgctgggcaaatcggcacagaatgtttgggtgcttcgatttggccaattttggtggttccctgtatccttgggat

SEQ ID NO: 382466 - DNA, 3995 bp, Cannabis indica
tatgtgacattcattgtgcacaacaaaggaaaaactatatcaaggcaacaacttctcatataaacacccacatatatacatacaagtcccaaacaagtgtgcaagaaactattgcaatatcccccacgatttcatcctgaggtaatacaccctcctctccaagacaatgaaagactcatccttacaatcaatcaatagttagtgcctaaacgctccctactctgaccctaaactaaaaaaaaaatgagctcaaatgggggtcacagttgtagtttagtctcgaagggggatcacagctatagtttggtctcgaaggggggtcacaaatgtagtttggtctcgaagggagtcatggttgtattttggtctggaaggagggtcacgatcatattttagtctcgaagggggtcacggttgtagttttgtctcgaaggggtcaggattgtggtttgacctcgggggtgacatcccgacaaccacatggtggtctcgggtggggcacctacaaatcccaatctcagggtgtattaaaacaacaataacaacaacaaaggggtcaattcgaggtgaatctcgaccttccatctcgagataaagcaaaataccaatcccaacttattgtagctccatcttaggatagccaatcccgagcccctatggtgtcatcttagagggaacctcctagccttagggtacacaccccgaccctcgagtagatgtgtctcgagtgacaaaaataattgatccaactaagggtaactcaagattccgcaattttggagtataccttgaacctctaaatggtcgtgccaaaatgtccatggttccatgtgacaaagtggcccatatcaacaatgaaaattacacacttcaaaattttactaagtatttaaaggaaaaacagtacattaagtgtaatatatgtaacacccccgagaagtagactaagacgccaattgccaccaacccatgaagctgcattttggtcgtctctgggtactacacccttgacctccataagatggtctcgagtagtgcacctcgaactccacttggtgatctcgggggtggtacacccccacatccactaaagaaaatggcaatctcggactaccccgagacaactccatctcagggtaagaaataggtcttggggtataggtctcagaaggggatcttttggaccacgggggcctatcttggggtaccataccctgacttccatgtggtagtctcgaagtggtacaccccgacccccacatggtggtctcggggttgtgtacacccattaccccaacctggctcaacattcaaaaaaaaacttaccccgagagaaccccatctcggggtgagatggcctatcttagggtatacccaaatgtttgaagtggtcaaggcggaccccccaaggaggtatctcagggtagcgaccctgaccccatgaagtggtgttgtggcttggaaaaaactaggtgactcaaagtcacaactacaacactctctaagcaatgatcgttcaacaattttttccaaggtacatactaccttcacaaacacatttttctcaattttatgagaatgtaaacaagaatagagggaaaactaaaattctccatgttcttgatgttcctccaaagctcaaggacacttgccaccaaaatttctaaaatcaatcattccttcacaccaaatttcatcaaatcaaaatcaaaaacacattacccatagcctatgctacaaaacccaaccatcaaacactcatattttgttaaaaactaaaaaaatccaatgattcaatgccatttttggtcatgataaaaactaccaagaagaagtgccaaaaactatatcaaatttcaaatatcaagcaaggaaattgcaagaggaaatacagagaacttacccgctatgaagatggaaaccttaaagcttccaaggattattataatgctataagtaatttatttattttgtctttgtaaatatttagattatttcttttgtaaataatttattttttcttgcaaagagaaaaattatcattgagatatgctgtaaaaatataaaaagtgagaattacgttttgggtttaaaatgtaattctagtataagcatgtcattctcagcaccgtaccacaaagtcatcaacaactaaattgaagcgcaggctacaccaaaaggtttctaccgtgtagtcatactgctaaaaacttgagcgcaaatatttatccaaatttcgacaataatgacatggcaaaaatgatgacacgtggtacgagaatactaagattaaattgatgaagaatgtgtaaagtcatgaccgttagtcatgatcgattgcatgactgttggaagagaagtttgacggtcatctttcccctagcttaggctaggtgactactccaaagggatggtagactagcaccctcgtaaacagaataaacaatcaccacacacttacgggagtcaaactagtgtagagggtatatactactacccctacctcaaatgtaatgatctataaggggttagtctaggggtacatcccttaccccctaaagggttagtctaggcatacaccccttaccccgaaaggggttagtcttgttgggaaaaacaataaacttcaagcgcagcgaaataacaaagaaacaaagcaaagcaatttactcagtttggtaaaactaccaaacccataaagagagatatatttcacttatcacttcaaaattacatatactctctatctcaatctctctacccaaaccccaatacaccctttgcttcttcctcactctcaccacataacaaactcacacacttctcttttcacaactcactatttttctctctccacacacaccctctctctctctcacacacacaaaacacatatttataaagttacaaaacttgggcaccaagacaacttggagaccaagacattccaaagcttccttaagaagagttttcaaaacttggcaaccaagagtttaattaataattacccaaaaagaaattgcaactttataaatatagataaataaataaagaaagaaataatttgagtcaaactctaacaagtctgagggtacaccccttactatgcacatcatcaaaggttaagtggaaggggtctcgggggtgtcaccccgagatggcaactgacaccctcttcatgttaggtctcaggggtgtcacctttaaatattagcttctacccctagagggggttaacggtcataccacaccctagggtgaccctcattgtcaatggctagttcaaatatttaaatcttgcaagaaactcaaagacggttacaaacccgcaaaaatagtaggatattaccatgagaaccgaatttcaaccacctctaaaaaccaaggagacaattgagatagctctatattggtcgtgtctcctgaactgagaaacactgatattttcccctgtataaaaggtcagccatgacctaggaaacagatctaaaaatttgagtacttaaagaaaaagaaaaactctatcattgttatctttcgcattcaagagtctgttcttgactttgcaactctaattaataaaatacaagtggagtaggctattatcgacatctgaggttaaacttctttaaattctggtgtcgttatttacatttatgattcattttttagtttaaatctcatttattatgattctacgttagttggttaaaaattcagtcaacataatatgtaccacttgattttattttcttccttaaaaaatgttgttgtttgaaaaagaaataatgacttattatagtaaaaattaaacaaaagttgtcatattaaaggaaaatgattattctctagactatttattgaaacaaataccaactgataagataagggtccagagtccattaaattaaagtatattaaagaaaaattataatagctggccttaaattataggattatgttaataaatatatggctaattagtaattttcccc

SEQ ID NO: 382467 - DNA, 1533 bp, Cannabis indica
gccaaatttttgtaacagtcttgttgcaggatgttctaattgaattgaacctgctcactgtttcctgatgaacctaatttattaagttattaagttaataaatatgaatgtcaatatttttaatctatactttctctgttcttgtagaaaagttagatctgcaatggatcaatgcagaccttcattttgctttcataactctagtagcttatgttattttcatgtgaatcatctgcttttgtataaaagcatgctaaaatgcaaacatgtgtgtaatctacttatttatttgcttttgtagagtaacaatgaaaagctgttggaaaatccataccttcagatgcgagggatcctacagctggcaaatgatctagggagtgggttatagtctagttgtgcaatgtgttggatattatttttctttgagttggattcaatacatggcttagtggcttcctatcatgactactgatgctcttcctttagtaacaaacattatatcttccaagtttgaaatatgtagctgggatacgaatgaacggtttctgtgaagcacgaagtgctgacctggattgggaagatactttactctttctaaacacttttttttttgagttgaatgaatgtggtgctgacggagaaataataacaaaaagagtagaccatcacgaggactgctcaggtgtttgttgatatcggaaatttatttagggtcatagcctgtgggtttcagaatcaatttttctggaaaatggtgactacactgacatctgcttccaagtttccacatctactctgtacatttgtgtgttgatttgtgatggaactcctttgtggtgagatctataaagtttcatattcaactgaacgttcatgaagatagtaattagaagtgttgacttagaacaaccagtagtagtcttcttttaatggatgatgcaagtcaagagcttcagcatttcttcaggtacaactctttattaacatccaaagttctatattcaaaagctattgtgtgtatcactttaagatccacttgcatcaattatatgattttcatgttttctggtgaccgattagttatttagtctacttgcacatttgaagacaatctaattattcattttctcatgaatttattagtattttctgttttaatgtgacagcagttggtagccattgcctttgcatacagactttattggagagtttccaaagatccattctttgtacaggatctgatctttttccgagccttcgttttattttggatttctgaaggtggccctcgttctcaccggttgtgtaagtgtagctagataatttgaatttcaagtttttcaccttgtggcgattcaccatcttggaatcggcaaagacagaatcatggtttttttaggtttagtggcaaaagtgatggtgattgaccatagattggatgacaaacactctttgataccatttttaggggcaaccacaagatgtcgatttttaaggacatcttcatagtctcttttattttccttttttttt

SEQ ID NO: 382468 - DNA, 1375 bp, Cannabis indica
aattgggcatctcaattacaattgtctataacgcatattgagacggatgcattgagagtttccactactttgaaatcagctacaagtgatttatctagtttttcaaactttattttcgatgttcgttgtcttttatcctttttccttggtgttttagtatcccatgttaaaagaactgctaatcaagcagctcatttgctttagggttgaatgacgacatatgttggataggagaaataccttatcctattttctctgttgttgtaaatgacttcaatttataattacagtgattattctcaaaaaaaaaaaaaatattgcgttgttctatttattattatcactgattaagataatttataactcctaatttttatttatttttgaaacaattttttttttatatactttcgaataaaattaaattgtttttggactttttaagttaatttacccacattggagtgaaaatgcttaaattatactaataaataaatataacatggacttatttttttatttatttatttatttttgtcaattttaacacaaatttcacattcataatagtataattaataatcatttccacgcctactcttctttaaaaaataaaaaatatataaattattggtaagttgaaaaatattttcttttaatattcattaatcaaaaatacactcatattatattttattataatatactcatttttatgagtgggttgtccaatatactcacactctctatttaagtctagtatataatttgcattaatttaaagaatctaatattagggacatcatctataaaagtgagtatatcttaaagaatataaaaattaaggttaaaattaaaacaagtaaaataaaatagatatacaatgtaattttctccataaattaggggatggaagtcttcaaaagttagaaatgggttttgaccaacccaaaattgtctagtatggtgggcattttggagaccatggtgtgttttggttggaatgttagagaccaagtcttgaggttgagtgcatatcaaatttttgttgtacacttggggactttggaattgatcaaattatgcataaaaggactagggaaagacttcttcaataattctttttttctttgaaatattttggttttacccttttgttctatcttttgctggtataagattacaaaaagagaaacgatgcaaaaatgatcaaatagctatgggcctatatttaacatgatatgggcctccaaatcatgacataggtgggccggacaactagaaaagtcaatatagtgtcttttcttttgggaaatttacatggtatactaatttttactatttttttacaaaaatactgtccggcggtattttt

SEQ ID NO: 382469 - DNA, 2294 bp, Cannabis indica
aaaaaaaaaaaaacaaattacagatttttacccataaaacctgtgttccaacgtgggtttaatgttttataattatggtgattttgttgttacttgctcccaaaatgaaggttctttcatattttcagttacaaaagaacatagggggctcttcttctatcaactatcaagcactctttcggcccatctttttgtgattgttttaaatttatttttcaaccaatattcgtgctgagttggtgaattatgttactattagatatttgttgttaaaacttaaaagtatgcttgatagtagtaaattcttaatcaagtcgtatatctcataggtggaagacatgatcaaagttggtggaaatataaggagtggacttggtgttcgtccaagagcacgagatgaatgaacgacatgttttcttttaatcattcacgaattcttgaatacatgtgagcacttttgggattgggacattccaggttcacgataatgagaaaaataattatcaccttgtctatttcagtgtgtttcccacgacttttttacatctcccacgtgtctttcagattacaaatactcgctactccagagagcaagtctatctgagtaacattagtattttcttggtgtcttgttttgaacgtacactttatacttttaacaattttcaaccgcagtaatgagtgaaacaggtgaattatatgccaacccgtacatagaatatcttgcttcttgcttcctacagactgatgtctgtccactttccaatgtgttgagaccaatcgtgtatcacgactgcttgtgttggcgtttctctctaggtaaggcaattcagtcaaattgggctatcattagttttctcaagtcatgagaagcccccttcttcgactattgcttttcttactttttggtggaaatcttgtggtctctgcagtttcctagaaagattaaacgtttcatttagagcacattattcccactgcagcaacactacataattatcatgtttcttgtccaacaacttgtgccctttgtagtaatgactatgaggattttttgctgccttgttcttgtgctactttcagggctgtactttgaagttgagcaatgctgatatgtgggcggatgttaaatattctctgttcttcctgcagctttgtcatcaaattgttctgttaaacaaagttaaacagggcttcttttcaggacatcctcgagttatcgtggactggtcctcttgttatttatctgaatggttacggatatgccatttgtgttcgatatctaataagagacccgagacttagattcaccacccaatttgttcagaataggggcgttgccttagatttactttacatgcttaatgggtgttggtgcaattgtgtgagatttggataggtatcatgtttcctgctaagtgagtggagggcttcttgttttaagagacgtgaaaacattagcttttagtttaagcttccattagcttcttagttgtgatattcaactttttgttatagaaagtgatactgaagtaaggtttcagaaaatagtcaatttgtacaatctaattcaatatgcaaagtgggaatatatggatttgtgtaaatttgattgaaaattattaccaaataattaatatatatgtagaggaggtcaggtggccaatggtaacaacattaaaggcaaaaaaaatattagacaaacgagtgcatcagattcctctccaacattttggtttgaagctcaaagagcaaagtacaaccaaaggatgtaatgataacgtgcaactattctaatatttttcaaaggagtttttggagattccttcagaatggggaggtattgattggattgagcttgcccaagtaaaactcccatctcaagggctccagtatgagcgacacggctaaattaaaggggctatatgttcagttgcaagtactgaaagactatttgaccaagttgctccctattgcaacataataataaaaaaaagttacaacacttgtatttttcgcgaaaaatgaaggaagatttatgaggatatgcatattaataactttttgaatataaagttatttagctctttaccttattttttaactagtaaagagaccgcgcttcgcgtgcggctatttatataaattttaaattatatgtataaatattaattgaacaataaaattatatatttattttttattgtcgagtgaatttcgcaacaccaaaatgtattatttaattgatataaaagagaattttcagggaaatgacaagtacgagtattcgacct

SEQ ID NO: 382470 - DNA, 1524 bp, Cannabis indica
tatatatatagtgtaattttcggttgttcatgtaaccaaaggtgataattttgttgataaaaaaatttgtgatggttaattttacaaaacactcacaatttcaggtggcatcgttgcaatcagaattagcaatggtgcaaactcaattgatgaacagtagatttgcatttgcaaatgcaattcaaaactcacaacaacaggagcaacaacaacatcatcaacaacaacaacatcatcagttgcaacaacataatgttgggatgttgcagcctgcctactctaacaactcctcaacctcgaacaataacctcatcaacatcacaaatttcccctccaatttcgatcttgcagcgactgctgctaccacaaccctttcttctcagagtttagagcctctccaactttctcgaccttcaaacgacgatgaggaggaggaggaagagagtcagattccccatattttccataatgaaatgcttcaccgtagctaatatattcagaatataattaaattaaaatatataataattatatgttgttcaaaatctcataataactagtatctttcaacttatataaaactctagcctcttttaattatttatatttttgtaagtaataataatgcattttaacatatgtgatatggatattataatgcttacaaaatatatgactcataaacttttaattgaaataattttgtaaattagatgcttggtaagttttttttatttaattattttgcttaattatgatctttctcgttctcggattgatatgagtgcaaaccgtgcaaataaatatgaggtcttgtataatttaatataatattatcgctaatcaattgcataaagtgtcacttctagaaagagttaggcactattaatgtccaataccaatactttttgattgtacagttcgaattatgtgtaaaatttgtatgtaatttgagtgtgtacaaatcataattatttatttaattaatattgataatttctagtttttacatcttaaattatatgtgtgaagatatttattaaaattttcatatatttctcagtataagaagtcacaagttagaaatttttaaatatgatatcagggttcgtttggcacgccgtataagggtcgtattgtattaaataataaataacactatgtttggataaaacaatgtattgtattaattattacagccaaaattttaaaaacaatgtgttgttacagattcacttatttacccttaagttgtataacactaatcacagggtttgacaaatatacccttacatcagatacaacaaatatcaagactaaagaacataaagacagttacaaagacagttacaactgaagcagttataaaaacagttacaaatatcactagggctctgccctagatcagaacacagaacagtatataaaaggaggtgcttttctcagatacaaaaaggaataatatacagagcaaaataagagatacaacaaaagtaaatagtcacagccagagagaacaataga

SEQ ID NO: 382471 - DNA, 1426 bp, Cannabis indica
atttttatttatttatttaatgcagtttgtgctccgattgggatatgctacggccgcgtagccaataatctaccacccacaaacgacgtcgttaaactcctccaatcaaatggaatatctaacattcgtctcttcaacaccgactccgccctactccgatcattctccggcaccggaataaaactaatgatcggcgtacccaacgaaatcctcccattcctcgccacatctccgccgtccgccgccattgactggctcagattcaacatcttcgaccacatttccgccgatcaaatccgatacatcgctgtaggcaacgaggttttccttaaagactccttctacgcacctcatctcgttcccaccattctcaatctccacatagctcttcaaaccctaggtctcgccgattcaatcaagatatcctcgcctcaagccgcgtccgtactatccacatcgtacccgccttcctcagcttccttcgatccctccctccgtttcgccatgattcctctcctccagttcctcaccgagaccggatcgccgttcatggtaaatctctatccttacttcagttacatcaacagtaaaccagaagaggtttcgttggattacgctctgttcagatctgaaccggaccgtacggttcgagacggtgcgtttgagtacagtaatgtgtacgatgcgagtattgacgcgttggtttacgcgatggagaaggaaggttttggaggagttacggtggcggtgacggagactggttggccgaagagtggtggagaagcggcgaacgttgaaaacgcggcggtttttaacggtaatgtggtggcgcgtgcggttagaaacgccgggactcctagaagacccggcgtcggagttgaggtttacttgtttgatctttttgatgagaatggaaaagttggcgaagagtttgagaagcattttgggatttttgggcttgatggggtaaaggcttatgggcttgattttaattaagacaggcccaagttcaagcccaaaaagtaaggaggaaaaatgttagttttgtgatttttcagttctttagtttacaagtgtaatttaggttgagcttcataaaagatatatagaaatgtttgataattaagagttagagtgggtgagactgtagtagaaccatgcctatttaataaaataaatgaataaaatgatttattaggacttttgattttaaattattactatcatattcatttcatgcctcacaatttttgctcaactgttcacaaacatgacatatttgttaagtattgtgtaacgtaagaaatactaacgtacgaaaatttgttgtattttaagtagcaccaagtatccatatatatttgggtatactttaattaaaaaaatttaagcttttatgttttatttattttttttttttctattt

SEQ ID NO: 382472 - DNA, 1690 bp, Cannabis indica
cttcagatgcatcaacgagccagtttggtgctgatgaagtggcagaaaacagtgattctggtcagaattttgactcatctgagggactctaagcaacatggttgtggtcaaaaatcttcaaattctataaaaagggatacttctcttgagcctttggaacagaaacgcgacattctcaatagtgactttgctagccattggcaaaatttgcaatatggacggttttgccaaaattctcggtattcagctcctatgatatcaccagttatggtgcctcctgtttacttacagggacgagcaccatgggaaggtcctggaagaccactaactgcgaacatgaatctctttacccagcttatgagcggtgggcctcgttttgttcctgttgcacctctccaaaccatgtctaatagacctactggtgtttatcaacgatatgttgaggaaaatgccaagatatcgcagtgggactgggacatacctgccaaatcctgtaagatagatttcgtatccttttattcttgtggattaccattacttttgtcttcatttgttttttttttttaaattgtgtaggatagaatttctcattcattatattttctattgtgtgaacttttttttaatttttttttatagtgtatttgttacattagtttccttttttttttgtgaagatttttatttattcttttttggtcatctaaatttgcttcagaaggtttcggtaagggatcgccattcttctggtacaagaagggggaattacagttatgatagaaatgaccaccatggtgatagagaggggaactggaatgtccaaaaaacgcgaccttctgggcgtacccacagtaggggccaggctgaaaaaccaaatgcaagattggatcgtttgacaacaagtgacagccgaagtgaaaggccatggggctcacataggcatgactccttccctgcgtaccaatctcaaaatggtcctattcgcccaaatactacacaggcttcccctaacaatgtgccatatagcatgtatccattgccagggatgaacccaagcggcgcaacaaatggaccgaacatgcctgtggttatggtgtattcttatgaccacaattctggctacggaacacccgcagagcaggttgagtttggctctcttggacctatgggttatccaaatgaagtatcacaaataaatgagggaagtcgagtgagtggtacattcgaggaacaaagatttcatggtaactctgctcaacagtcttcacctgatcatccttcttcacctcacaaacagaggtagttaatttggctgtatgcaaattagctaatcttttatacaaagtagattaaagaaaaaaaaaaagtgtccagcgctgaagcgcatttgtatcgttattttcttacattcttatagctgccaatttttggatagaaatagtagctgctgatggccggccaaacattttacatttttttccaaaagcaattctggttgtggtgatttctctccatctcttcagaaagggtccacttgccaaatcatgtcacatttgtctggcttgtaatattattcccattgctcgtctattggccatgtgattattttgctgggatttttttttgtgatgctgttcattttattcttcaggggagtttgattgcgttgccaaagcagttgctttgaagt

SEQ ID NO: 382473 - DNA, 2145 bp, Cannabis indica
aaagataactgctggtattttgacagtgggtgttcacgacatatgattggttcctgtgaatctttacgcaatttttatgcatctaaagcagggtttgtcacttttggtgatggaattaaaggggagattatggggcaaggagatttaaatctctccgatgtatctcttttgacagaagttttgcttgtagaaggattaaaagcaaatctaatcagcattagtcacctttgtggtgctgattatgatgttagtttcactaagtctcagtgtttagttacatctcatggaaaatcaatcctcacaggcaccagaacagctaatcactattatgtcctgacgagtcaagtgaaatgtcatagagtgtttctggacaaacctgatttatggcattacagacttggccacctaaactatagaaatctaaagaaaatagtgaccataaaagcagttcgtggagttcctgaatttcgtatgggaaaagatcggttgtgtggcccttatcaacaaggtaaacaaatcgagtcctctcaccgtcctatcaatgctcaacttacctccggagttctagaactactgcatattaatttaatgggttgcatgcaaactactactattgctagaaaaaggtgtgtgatggtgtgtgtggatgatttctccaaattcacttgggtaaactttctaaaagaaaagtcaaatactttcggtgctttctctgccctttgtctgaaactacagactaagaaagatgttacagttggcaaggtatattgtgtgagaagcaatcatggcaaggaatttgaaaatgacatttttgcacagttctgtgataaaatgggaattagtcatgagttctcaactcccaaaactccctaacaaaatggaatagtggaacgaaaaaataagacatttcatgatcatgtctcaggttatgctttgtgctaagggtttcgctattcgattttgggctgaggctgtgaatatagcttgttatatttgtaactgtgtccatttgagaattggaactactcaaacttcttatgaactgtggaaaggaagactcctaacctgagtcatttgcacatcttcggttgcatttactacatcttaaatgatcaagatcatctaggaaaattcaatgttcaaggtgatgaaggaatttttctatgatattctattaacagccgtgtctatcgagtgtataacaaaaaaacttacacaatgatggagtcaatgaatgtgaaatttgatgatttggaggttttagacactatccctgaggatgaagaaccacttgatccacatatctcaatgatgcctttagctcttaatgttcaagacacgcctgaaaccccaagacctccttcatctagagatttattagtgtcatctgagaacacagctagtacatcagcagatgcaccagctactgaagtcacttccaaatctcaaatcatcagtaaggatcctgataatacttctcatgctcggctatatatgaagggtcctccaacctggattcaaaaagctcatcctcctgccattgtgattggggatccgaatgccaccatcgtaacacgacgtaaagttttaaatgtcatttcatttgcttgttatgtttcactagtagaacctcaaaatgtcattgaggctcttctagatgaattatggaataatgctatgtaggatgagatgtggcaatttaagaggaaaaaagtgtggatattgatgcccaaaccagatggtgtcaacattattgggaccaagtggatttttaaaaacaaatctgatgaatttgacactgtttttaggaacaagaccaaacttgtggctcaaaggtataatcaagttgagggagttgactttgaggaaacttttgttccagtggctagacttgagtctatccagttactgcttgttgtggcatctttattgaagttcaaactacaccaaatggatgtaaagagtgcctttctgaatggttttctccaagaagaggtgtatgtgaaatagccaaaaggttttgaggatcccaaatatcctgaccatgtgtataaactcaagaagtccttggatgtgctcaagcaagctcctagagcatggtatgatagtgtaacaccctaactagcataggcgtattacgtgatt

SEQ ID NO: 382474 - DNA, 2848 bp, Cannabis indica
aatataaaaaaaaatacaaaaaaaataatgtactgtgtatttataccatatgtttaaggagttgattaaattgggtccatatgttaaatttaaggatgattacccaaatttcccttgtaaaatctaataattactccatagtacatcccatttcaattaatttccaaaggcacctgtagatacttttgtttgggcctgtagaatgagtgggtctattcttcacatagtcagagttggttgaaattattgggctttggaagtaaatccaagttgtgctggtcttttctttgtcttctcacatgtccttttgtgggtaatctctttagtctcatctcttacattttgttttgtgttttctttgattatttcaataataataattgcaaacagtcattccagcttataattttaaagctcatctactctatacagtcaaatgaaagcctacatctttttccttatgtttaacttttatacataaaaataaatctacataacctctttctttagttatcagtctctttctctacagagttaattagtgaatgaaattagtatagacaaaagtgtataacatataaccccactagtccatatcccctaactcaataattttcttttttttttgaataattatgagaatgaaaattggaaaacaaatttcctcttttaaccaaataaataaaaagagaaggaaataattaacattagtcctggaaaacatgtagggatagcattgctccttttaatttcataaacaagaatctcatgattgaacaacacaaacaatctcataaacattacaggtcccccccatacctctatcattgctacaaaaacttagcaagttgacccaatagatatcacaccaaacctctttaatatacgtacattttcaaattcaatgaaccttatttcaatctttttactaacaccccaatgcaatatttaattattattatgttactcctattatatattgcaagttttattgttaaaattcacaacttaattgcttaaattttacgtctcaacccaccattgtgccaccttataattatctcaaaatacctaataactactttgtttaactataaatttctcaataacagcatgtataataatatgatatagtattaatttattatgctagctagctttactatagcctttcaaaaaggttccttttcttctctctctctctctctctctctctctctctctcacattataaatttagacctttattgaattactttgttgaaacgtgaaagtgatgtgttccaaattaatgaaaatggcaagcatgcccaagaaatagtataactatatacaaacacagacacacgacaatccaatataagttctctctttaatttccacacctagctaataagactaatctaactgtagcagtatatataaatatttatataatttccacaattagtaataaaatgtgacatgtatttaatgatgaggctaaagctaggtcttgattttattattgatacatccattattgaataacgaatatgccatagcagaatgaaacactcactgaaagatacatacataatattaatattatacatgatcattatatatgatctaagtggagtctccatgtttgtgtgatgagcttatatatatatatagatatttatttatttattataatatataccacgtacgtacgtaggacatctaatgtccatactttctgaagcactaatatatatatatatatataggtatatatatttatatatatatatacactccaaaatcgaagcatccaattccagagaagttaccacaaaaatcatgaccactgtcgtttagaagccaaaaagcatataaattttgtatattatgaattattatattatatataaaagaaacctcaaaaaatttatgtgtgtttgtgttttctttcttttctttataaaggtagttgcatgcattgatctaatatatatattatatcaatcgccaaaaaattggaatgaaacaatcgttttcagccgtcggattgcgattgatttagatccaacggagacaatatatcaatctctctggaaatgaaattatatatcattagtcattatctcatgaaaatatatatatagagagttagtgctcctttttttctttatgaatatattaaataactattctttttatgtttcctaagttatatttatcttttggatatatagatatagtatcttccgtgtcacaatccaattacttttactcaatctttaaaactcaaatcaatctacacttctatagcaccctctccttaattaatttgtattgattaataattaatttatgtaaacttttttcaaaaggcttaattgtacaataattatatatatttatatggcttcctctaattggtggctttttgtaagttttcttgacatgtgtttgattttctagaaaaatgtcaagatatttgtgtgtgtgtggtgataagaaaagaaagaagagtctttaaaagaaaattaaattgaaaaaagaaagagtcaaagggagagagaagattgtggttgacgatgcttataactttgctagcttaatattattatgagcattgttattgggcaccagtggtgcctagctataacatcattaaaacgtgttgctttacgattaattagagatactctctaaaagttattatattatattgtatgggacccgacactaaattacatattaacacgtaagaaggtacttagtaccctgatattttttaacatttctctgtctattattaattactagagaacaaccacgtgcaaggcacgttctatctttttttgagttttttttt

SEQ ID NO: 382475 - DNA, 925 bp, Cannabis indica
ccaaaaaaaaataaatcaactaaaaattagtgagtgtcaatgtcattgtccatgaaaagaatgtaagctatatatatatatatacataaataaaaataggtatagtagagtcaatttaaaagggtccacaactaattaaaagaactttattataagagaaccctactctattatctcatttccatttttagataaggacttgtttggtttggtttgaataattagggcttttgaaatggttaagtcattttcaccaatataactggcttgcaagtaagggtgttgggttggggtccaatccaatccaaattttcaaggttaagactatatacactaaattttgaactaatgcccttctcaattattgatattctttaatgatttttttatttatttatttattttggggaatattgtttttttatttttattttcaaagatctaattttgatgcccattttagtcttggataatgtcttaaaatccaatacccacttactactatattatctccataaaagctgtattttttcttagttggtatttggtactttgaggatttttatgttcggttggtggcatttaattccttgcttatccaaaaattaaaaataaagaacaaaaatagcataaaatgttataggtacaacatagttttaatagataattttaatcttaatttttttaatatgatagtatagaaatttagtataatttataatatagaaacaaatttaagtaactaattttataagtatataaaataaaatagacaagtatgattttttgttaagggaaacataatgttattaggagaattactttatatgttgtttttttaatttttttttttaaatttacggtttgggtttctaaagtggttgcagcgctagttgcaatataaatttttatgtagaattctgta

SEQ ID NO: 382476 - DNA, 1898 bp, Cannabis indica
tcttacaaatttgttttttggaaaataatcttttacttttattaaaacaaatacgtacgtaaagttttattataaattatttacactacacaatttatttatttattttgttacgtaagttcatataataatatcaccgtaatatgagttgttattgaaaataatgctatcatatgttataaaaattaacacgtcagtcagtgagtacatcaatttaaaatttgagaaaaaattaaaaaaaaattgtttgtgtggaaaggggcttatcaagtttacaaaaaaaataaaaataaaaagggcttatcaagtgaccaatgagataagtaagtgagagttttgatagggggatctgctactctctaacttttggtaatggctatctattagtatccagtatatattttgttttgatatttggcaatattggcatgataaggcctaattggactttcaaattttacatataaggacactttctctccattatggtcttcactatcaggaatataaggacacaaactttttactaatttttttaatattccctaaatgcattatgccattatttaaatcttgctcatattcttatgtaacacttgtgtcacctttagcctttttctattgttattattgtaacgttgggtaaatgttacagttacaccttattttgaataattaaacggtacactatattttaatattccagaggtccaagttcgaatctgagcgagttatttcactctccttcttctcctatgagtgagttagcactagtaatggcaattgctttaagaataaaaataagagtgatgtttgtttatttttgcaatgataatgaaaataaatggtatataacaaaagaataattagtatttttgctctctgaattttcggtactatttaattttgtcccatttgtaggggtattcacggattggtttggtctgaattttcataatttttgaatcaaaccagtataacggttttttgaatattacaaaccaaaccagaccaaaaaatttctcaaaccaaaccattaagaacggtttggtttggtttgaggataaacttatctttttagtcattatcttctattatctacaaatagactaaattaaaattattaaatctaataaaacctaactcatttttagcctaaataaaccataaaagataaaataacattctacccaatgaaatgactattctacccctccaccaatcacttaggttaaataaagcccaagggtattttggacattttctaactacctcgactaaaccgacttctcaacattataaactaattgggtataattctaatataactcaacttttatcttcgtgacatttctgaccacttgtcgagttttcacgaccgccgaaccctaaaatattttattccaaaaatagtatatacattacccacataattcgataaaatctccgtaattaataaattacactttattcattcatttaatcacatatttaataaaatatgtccaaattaacataatcataatttttaggatattacatagggcctccgtttagcacatgatttaccattcaggtcgaccgacacatttgaatttagaaacaaggtaagattagcgtaaaatatgtatttgatgtgtgtatgtatgtaaattacatgttggtcatgttagttatgcactacaaaacactggtacagtagtggtatgcaatgcattagtacagtgtataatgattaagggtatataatagtgttaccaacactagtacggaatgagtacttaatgcatgtggtaccatactcagtgttacccgggagtacggttcaaccctaccaacactagtacgggacgcgtatttaagtgtatgaggtacagaggtcgtacttctattaagaa

SEQ ID NO: 382477 - DNA, 1353 bp, Cannabis indica
cacttttttcttatatataaaaaaaagaataatatgatacatgacattacactatagttaatataagtatgaaaaaaacctctacatctatggctaaaaaagtgcagagacaaaaaaagtgtcaccactgtacaaattttctatgtatataaatttgtggtatatgaacaaatatccaaataatgagctttcaaagataaaaatacaagacttcatgtatggagaaaaaatattgttttaaattcaagcttatcaactaaataatatccaatggtgataagaagcatcaacaccattcttgcatctcaataacacaaactgcgagcttgattaattttattttcttgcatataaccttatcatcatattgtaaatattagtctgaacacaatagttcttatgattcttcatccatctaaaaatttgcgtacaatgctcaagcaatcctctccttgccatttcctaaaaatacacaaattaaattcagcatacaaaaaccaaaactttttcctttttgaaaaaaaagaaaagagtcaattaccctaatgagaagaggaaaattctcccttgaaagtcggccgacccagtgactcaaaatgccatcgatatcttcccaatgtcggagctggtaaaccttatcgatgacttctgataaggtccaatccctctcaaactggtcaccaataacatgcaaacattgccattttgggatatcatattttctgaagctggtgaggtgaatggtggcctagtgttttccctgatcatagtcaacagattcatgcttcttattgtcaatgaaggtggagaaggaggaggagtctttggcggagatgttgcagccgagtgatatttgaggaggtggagactcagtagcaaagaatgatgagatatggtggttttagtctacgtatctgaatgaaagaaaagataaaatatgaaaatacaaaaatatggcatatgttaaactacaaaaatataaatatttgtaaaaatccataacccaaatatattaaaaaaatgtcataaaaagtaaaacttttaaaaattctctctatttgtaaaaactcataaccctaatacattaaaaaaatgggggtaagttaaaatatactcttttttttttattcagttaactaaaaatagccttattttaaattcaattgaaatgtacccccttaagtccattattgattatacccttacataagggtactgttcaaggaggtgacttaggtgaggaaggtttttttcattacataagagtataatcgggatataacaaataaaagagggtataaataaaaatgaaatgggttaataaaaaaaggagaaatttacatggtatactaa

SEQ ID NO: 382478 - DNA, 918 bp, Cannabis indica
aaaaaaaaaaaaaaaacattgcaatcttatcctatcctatcccaaaggacaaaaaagaagtaattactagtgcaaaaatttaatgactttacctaattttaccaagtcgaactgttgaagtaccaaaatggtcagcatctatataaattaaatttttaaatgttttaccaaaattaatttatttttgattgaaaaattaaaaaactaattaataattaaaagcagagaaagaaaaactggagagtaattattcaatcatttatcccattacgtcattacagatccgtttactacttttcccgccgttccaaaaacattagtaacgttacgttaaaagtcaacaagtgtaacaatggtaggggtacccggcattgaccgttacttctcagtcaacataaaatttcaaaatataatcatgaagggtaatttggtcatttaactttgtaattacttgttttatcgaagcaaattgtggattaaaaagcttacaccattctgcaccgtcagcctaatccgcacgcgcaatatattttccgaacacagtaagtaatctccgccacgtgccaattatccaaacgacgacgtttccaacacgtgtcttcaccatatcctcttgaatacccaagactaaagaacgcacgtgccacctgctatttctaactttctcttctaaatacggctcacttgcccaccgtggtaaaaacaataaaaatagacagcattttttttttctttctgagatatgattttttattttttattttttcaatgaaaaacgacgttatgatcttgtagagggttgatttttaatatttggaactatgaaaataaccgaaatttattattttctttaggtaaattgcggcataaatacttaatgttttcgtattttatgcacttaaatacctaatatttatt

SEQ ID NO: 382479 - DNA, 1771 bp, Cannabis indica
tatatatatatatatatgatatccataaatgtatactatggatataacatacatacatacatatgagaggtagctcctaatttttccttgctggggaacaaaaaagataaataagagtattcaagggaccaatagaccatactgtatgctctagtctgactttttggattccacagaaatgcaatttattgcatcttattctatatatttgaatgtatgtacaaagaaatgatatccggtgttgaattttcgtaatcttgtttaattaatattcctcttaacaaaactatacaaaattgcaactcgactagcttcctctcccgtgtcaaaattgagctaactatgagagacgagagaccagctagaaatcaacctagcagcacttgtggtcgatcaccattacccgtgtgcatacccagatgctcaggctagaatccttctcaacgagtgatgctccctccagcctactcctatctggaaaacaaaattaaattaacctcttttacttgggtggaatcgggtttagagagctcgagtttgttcctcacttccatactcgaagatgcttgtctagtcatgaaaatcctcatatggcgaggttccacttgaagaatcactttcaaatggggtggtctctcttggtgatgagggaagtgattctttctgttgggaggaggaagctgaaacagaacaaggtatgcacaaaatcaactcaatgtaggtatggaggtatattaggacacaatcttgctttacattggaaacatcatatgcttggccattacaaacctttttgtgctctagagtggaacttttttgtgtggcgcctgataagcctcttaacctttgttattgtgagttgcctagcaaagggagacaactctacatcacttccactccaatcaccttgtaaatcagtgtctgcttcacccctcatcttcctcaggacaaatgcctttgctttgcgtcgttgagtattaaatagacctctaattgaagtgacaaagccatcacctgatccatcacttggacgcttaagccaagtcaatgggtactgatcagatttgcctgcctgaccttcattgtcactgaaattaagatcactatcggctacattagacccagtgggttctcttctctctgactatgtgctttgtctttaaacttcttgccctgtaaaaatatagtaacaattacggatttaacttgctcaattaaaattgaagttttatacttgtaagtgcgcccttaaaattcataatatattataacatactgaacagtcatatatgatgatcataggcttaacagcaaatcattaactgctggggattacattatacagaaatatcccttggaatttccattatgaattcatttcatcccatagtaacataccaagaagaaacaacaacctagccaagtactctggcattaactctgagtagaaggccatgaatgataacaagatcattatacgaacaaaaatgtatctatctcgacattaaagtttagtacctgatcctaagagttgatttaagcataaaaaaaaggtttttggcccccgaactctattgtgcccctgaatttttttaaccttgagcccttaactattcacaatgttgtaaattggtcattccgtcaagatttgtcacacgtggcaaacaaaatgatggcatggctgctttgctagttaccacccaactccacgtgtataatttaaaattaaaaaaaatatgagtagaacttctatgcaagaatacacttggga

SEQ ID NO: 382480 - DNA, 1408 bp, Cannabis indica
cttcgataagcaaaacacacagtacaaaaaacggagagagaagaacaatggagaaatggacagagcagaaatgtcagtgagagagctaaatcaacagtatactcaacaccgcaagaacccaaacaaagtacataaaaaacaaacttagaataacccatcttagatctcaatccaaccaagcccaatgaacacaaaaacagaaagaaagaatgggagaagagaagatgaaacagaaagaaagaaaatgttatattattattaatataacaaggcctctcttccttctttctcttctctaaaaaggccttggaagtgttatgtgtttttttttgggtgtttatataatgtgttttggctcctagaaaatgcctataggaagatttaagtactgttccaactacaacaaatatgcggcttggccttggtcttggccttgggattgtgtaaaataagtaaaagaaaggtcaaaagacaaatagcattattataaggtaccaagtcccaccactgtattttcctgtatatttaaataaattataattctaatatttaccacatttactatagttaatagaatttatatatataaaatttacttactctacatataatattattaggtgtctcttagcaatttttgaaaggaaaaggaaagaattaggacgactcagcaacagctgctgtcactccttaacgcttgcttggccaatgtagtgtgggggcaaatgaaaatgaaaatggctcaattaatccaatacagtttctaatatatatatatatatatatatatatatataaaattacctaactggtaatcattacaactttttcaattttatggaccttaaacattgtaattattggcattggtaaaataggagtgttaataatctaccaagaaagcaaacattacaacttacaatttacattttacattttataaaaaaaaaaccccttttgcttttcattgtttattatttataactaaaatgagaaattttgatacatgtataataaattacaagaaaacaatgataaccgttcaaagattgtttgtatttaccaaagtgtcctttgaggtttgattaagggagtgacagcttagatcaaatgcttctcgtgtattgtatgctttttatttatttatttatttgtatttattttcatcaagttaatgaacatttgttgaaaatttatgcatttacacgttagatttgtctcaaacatgactataaattttagaagatgaagatggcgatggctacacatgaaaataaatatataaataaataatatcaaatttagttatatctattattacaatatgaaaaaaaaaagaacaaactttcaaaaaaaaatatattaattaatgaattaaatgttgatttttttttttttttttgttcag

SEQ ID NO: 382481 - DNA, 1371 bp, Cannabis indica
gtttttcacttaatatttattcaagccctcactcagctaaatttctagcttcgtcactgtatattacatattcataaacagataaaaaagttttttattgagtatacctgtgttcttccaacccatatgctcttgaggatccatgccttgttccttgagattcccagccaactcccgccatagctcatggcttctcaaagcgaggtcccatatatcactaccaggagtcttgtgtgccatccataagtaaccctgccctaaaacaatcgaaatgccaaaacaaaagattaaagagtccctacaacagccaatcaaacacagactacagtacaccttttctttcactaaattttctcagcaaccaaacaaacaaactagaaaatatacaaatttgagataaagaagaaaaatacgcaccagcaccagtggcacctgagcaaggaacggctttgtcgaccacggcgacagacagatccgacccgagaaggaattgtcgggcgatggtcaacccgataactccagctccaactacgacgacatcaaaagtctgagctgatgcagatatcggattcagagcggggcgagaaaatgaatcgggtcgggttttgatggcggtgaatgagaggcatttcttggtcaatttggaggcaaacaaggttgattggtaaccgaaagtggaagaaggggttgaatgtggagaaaaaacgacgtagttttgaagtaagtaaggatttgaggtagtaaaggttgaagacatagccattgctacagtacttttctttggttgttttgaaatgaaaggtgacactgtgaaaccggtcaacgaccttttgatttgctttgcgtccctatttattgtttattacagtaattaattacagatttaagttttaaaaacgacaacatttataatacccggcgcaagcaaaggcgatataaaacgacaatgcttatttatatagaaagagaaaatgtgatctttaattaaaacgacaggaaacattgcagaagagagaataaataactaaaaacgacaggcagaatagctcaatcgaaagaaattcttaatttcaaatgtctattatggtctattacacatatttttcttttgaaaaagaaaatgtctactgcatattcctttggagctttcagtttcatcttttaaattttatgaacgtttattttattatttttttcccttcacatagataagcatcagtaattataatcaacaataattataagtgatgtactagcaatcaaaatatgtatggtacctatactatccctctctaattacacaaacaagttaatgagttcttcccatttctttttaaatgaacaaatgctaatgattattagatacaattt

SEQ ID NO: 382482 - DNA, 1869 bp, Cannabis indica
aacggtacacaaaattggaagcacaggggtgacctacatttccaggtaatgctgatactcttttaaactttactttgttgacatgccaaaatgaaaagagggttggggggtggggggaagggaaggagggattgtggaccagggtggagaattgtttggctaggttaaacagaaacccttattaattataataaatgtcaaaatagtgatggtgctttgtgaaattgaatgctcaacataagtgagagttagtgtgattgaagaacagatagattttttaatgcattaatatttgttattcttgcaagtatactttattcaaaataagtaattagtaagcaattaaaagctttacagtattaaagctagtttcttatggtctgcactgcagtggtgcattgacacattctgtgaaagctcttgacatttccctcaagattgacacagaattggcacttaaagttgggagacgcaccaaaagggcatgatctttcttgatgtaatcgtgtcctcatattagcggtttataggtcaaataataatgttgttcatgttctgagaacactaagatcacaatgacgtggacagacagtttatactcgaaaggaattcgtcaataatgtaaaacaaaagctttatattgcaaaggaaaggaaatgtctattaagaaatgaggacatgacagacccttttggtagttgataagtgggatacaggtacgccataatatcctcactagtcactacacgtggcttcgttacctcttagaactagaagaggcagctttgtcttttgaaatgtcggtttgattttatttgttgtgttcagttttcgtattatatagagctttaatttttcaaaagagcttttatagactctatgttattcctagataaagtagaattcctcacagaaagtttgtaccgatagattttttttgttttgaaaaaaaaaggaatagatagtaaaaaaaaaaagaaaaaagaaaaatagagtgatggttttgttttcattgtaaaattgcacattacgtttttatttggtgttgcatgattgtctcaaatctggggaaggtagctctactaaaatcaagaaataacttgatctgattgggattttaatttaatcaaaaaaatagtcactagacttgaaaactataattaaagatatatattttcatatgtggggtatcgaattaacacaattttcattttggttctaaatggagggtggtggtttgtgttgccgtgttatatttttgttcgtgttatttgtgttgacatatttaactggtcaactttaacctccatatattgtgtcaaaaatttcaatcctaacctgacccattgtattctggtgttgacatgttgtgttcgtgtgtcgatagttcttaaattacaatacatgttgatcaacatgattagtatttcatatttaatttttatatatatttttaattatattattttttttaactcatttaaataatatactatctaaaaatatatcaagtagtaaacaaataatattgattaattaaaataatttattataaattatcaatacaataaataaaagtataaattatctattatatttttataagcaatttttattttgggatattggctgctaaaccatctgaactttacgattggtaacacttaaccacaaaaatcaattttttgatggctaaactacccaaatcctacttccgttttgctctgcacacttctgtccaaaaattatagttaaatgtcacggtatactgtccaaatttttagtggtccacgtaatattagttttaaaaaataattataaataattaaaaaattaaagaatttttttttctttttacttttttaattt

SEQ ID NO: 382483 - DNA, 2260 bp, Cannabis indica
taaaataattccaacaatatgtggatggacatatagtaaaagtactatgtataattcaattatgcatgactggatcgatataaataaacatattttatcaacatctctgttgacctcacttttagttaacgacatttagttaaattaaagaaattaagaatgattaaataataaatatggataagatttaagtaaagaaataccaaaattataaaggttcaaacccttgatgatggcaatatcctactctcctttagtttgtattgacttgtgaggtgagaaccaaggagtccttgatctcccttgaaagctcttacaatgatttctgagttttacactcttgaatctataactctctcttatgattttctcacgtgtgttttatgtatcaagttcctgtccctgaatagtgagatgactccactatttatagggatgaattacattaataggttttccgaaaataataagaaataaaatgagaaaattgtttactttgtatgattacaataagaaaataggaaactagacaagtttccttttttccttgatactgcgtatctatcccatgaaattagggatattatcgtgttttgtaaacatggagatacatgggatctctgaaaatgtccaattcgcattctatggtcgactcatgtgagctgcccacatgttggatgttggttgggtgttctcgcacgccttactcggatgttccaacttcttctgactttgaatatcaaatctcccggtacggttcattacgagtggaatctcccatcaaggtcatagaatctgttccacatgtcacccagataggtaccacatcactctatgtagaaatttggataaaatttgcccccaagtctgcgcggtaacttcttggtcgcacgtggacttattcgatcatgaagttgattagatgggtgatgcgtatctgacttttactcttgatctgacgtggctgatcgaacatctcttcaatgtctgaagcattttatgccttatctttgaagtgtaccttctgacatgtacacggttgtacaacactgcacgcatgacatctatcttattcaatgagtataaacgttctttttcggaggaaaaacccaaaaatttgaattttaaattactttcagccctttatccacctttataaggaataaaaatttgttttacactcttttagcaatttttaatcttgcataactagagcaaaatctttcttttttttcctcaaaactttcaaagacaccttttgctgaaaaactcaattgctggaaccgttcaagcatatccaagagtttgcgaatagtgagtaagttatcctttctcctctttatgcaatttctttcatatacatgcattattttttaaattttttctctattgtaaaattttgggtttttgaatcttttcttgattggtctgagatttaggaggtattagggtttttaaccttaattgatatacgcactggtcttttaggcttctaatttcttacaattttgtctagaaattatttgagattattcattcgtaagcttctgaatatcaatattcttttaaacttgtttagggatttcattattggaatgaagttccttcattttttcctttgaatcaacttggtcgacatatcagatattttttccttttatacatctgtccagctctcacattttgtcttccttcttttgtagatgaaccctagtgagttctagggaggtaaacattacatcaactaggatctccttcaacttctctatgaaactcatcctcgactccatgcaaactcgtctttgtccagcaaaagctcttctacttcaagctttaacgattgggaagttaacagtgatcactcggaatctttagagccagtggtgcaacatcattagtatctcgaccaaataagtggagaaggataagatcggttcatctaggaattaaacaagggatagagtcgttatctccctagttcgtggacgtacaaggtctgacctgatactactgatacgttgtcgaaggcctcacgaattccttcagccagacatacttgttgggttttgtgtcctaaataaaactcatttcaatataattagatttactaattaataaagatcaaaaatcacattttatgttgcatggtacacatgatttatttcatgattatatttaatgtataaattctatgaagtctagaacatatgtatttgtttatgattatagtattgtcagcacagtggaatataatcatgat

SEQ ID NO: 382484 - DNA, 880 bp, Cannabis indica
ataaaatttagtatacgtgccttgcacgtatttttttgctagtatatatatatatgtgtgaagttgaacaattgaaatgccaaataatggtctctaataatatatttctgtctttagtttttgccggttgtgaatgagtcttgctccgttggtcattggagagtacacaatagtacacaacaactcatctatttattatcatgaaaatagtgagacttgtgagaggattttactattagaaaagaaagccctatcctcatcaagccaccacacccaaaaatatttgaggataaattttattaatgtatttatatgaggctcaaaactcatgtgacgttctattaatttattatagcaccaatatatcgaactatataataatatatatagtatatctatatatgaattatgtctactctagtatcttccacaaggtgaagatggtgtaatataattcccacacacaaaaatgtttagctctgttattccgtctcatgaactccgtcggttgtaaggtgcttaacacgttcacacgtagttgtcaattagttgccaatttaacaattttttttattttttatttttaaaaaaagcttttaaatatatatgtacttatatactctaatgtttggaatgataatatacctgttgatagattaattccaaagtataataataataataataataataataataataaatatatttattaattatatatcaattaaagtaataataaatatttaaaatttaatatttataataattttttacatatatttatgtgtaagtattattgaaaaagttatatttttttttttgaaggaaaatggtaaactttattagaatgaactttcaaccattacaatagataaaa

SEQ ID NO: 382485 - DNA, 1602 bp, Cannabis indica
cggagatcaggctcaactctctccatcgatcaggcacctcattctctgttacagcagctacggtctggtgggctttgaaaccacccgtttcttcttcgccatgagagaaaacagggagcttcacacgcctttttattagaaatataatagttgaaacttactatttttgactctttcttgtgcaactcataaagagctctctcaatggaaccagattctcctagcaaagaaaactggaaaataaaattgatacaggccactattagaaccatatcatgggaccataagacttaacatgtttcttgatataccaaaacttatagtcaaacttaataacccaaagacacgaccaagaagaatttattcaccaaaaaaaagtaaagagggcctatacttgcatatttacatatgttatgaagagtaataattatagtattgaatgtatacatacatactacttaaaaatataaacaaaagagacttcatgtattaatctccattaaatctagatttttttttaagagttcagtttacatcactttatgtaatagactatctgacaagaaccttagaccatgattcacaagtgtaattttttactaaaaatagctatgaaccatgacaaggcatagcagaacatcaacaacagcatgaccattgtcaaaaccacagtttgaacatatgaaattaataaatctataattatagccgaaatttcaaagcaataattgagtaactaataaaatttatatttgtgttatcagtcaagggaaagaataagctacctaaatgcaactctgacagtaaatacaaactgaactcaataaggcaacacttatttatgttgcatttatttatgctgcttaattaggcaacatttacaaagatgggaaatagcaggatggcaaatgaccaatagaggagtgatcagttctgaaactttctgatctttcaatatgggatgcttcataattcaaatgcaaatgccttttaccaaaaaaatatagacaataattaagaagaacttacaaaagctttaaatatagacatctcatacatacaacaccctggtcagaagagaactattttaaccaaaaagaaaaatctgcaggtatgtcacatacacactgcacaaggcacatacttaaacaccaaatatcagattgaaagcaataaggaatgtcggcaagaaattcaggacacatgtgatttgaagttccaaccacatgtttagaaagtaaaaccaagtacttagttccatatacaactaaagttttcatagacccaaatagatttattttaagttcaaatggtccaaagagcattcattatgaatttcagattcatggtactcaaaaagaaactgttaaggtttaaaattattaataaatagagctaagttttatatatatataggacagtatttggcacacaattaccagtacattaaataaattgttgagaataaatatgtactacttatttatgtactacacgacttaaagggttgcatttatttatgtactaagaatgcttccataaaaattttaaaaaaagcaatggggtttcaaaaaagaatagaaaaagaaattgctttgtcaa

SEQ ID NO: 382486 - DNA, 2786 bp, Cannabis indica
ttttttttctttttttaatatatgtataagtaatatattgtacaccaaggtatataatatacataaaatcgaagataaataaaatatttataagaaaaaaaaactatatatacattacaagccaaattaatatataatcaagaatacccatattcttggacattaatttgctaatataaattaataaattaattatttctatcttaattttcatatatatatataaatcaaagaacaaatttttgaagaactacaaaaaaaaaaaaaattacaaaccaacacaatttcttgaggtagttactccaccatctacaactaaattatgcccactaacatatctagattcatcactagcaagataaagagctgcctcagcaatatcccttgctttcagtgttggacctttcaaattagcaagtcctctaacaaaatcctccattttctcaacttctctctcactacaaggcatcccattcccacctccaaatctcatacattcatcatcaccatcatggccatcgtcgccaccgtccgatcgccacgcattcacaagcataggagtcgccacaccgaaaggcgaaatacaattaaccctaacaccataccgccccagctcgcaggccgcgtttttagtcaacccgactattgcgtgcttcgaggcggtataggcgtgcgggcctagcccgcccatgactccagcaacgctggcggtggatataatacatccgccgccaccccgccggatcatggctcgggcggcgtgtttcatgccaagggcgacgcccttgacattgacacgcatgacgcaatcgaattcgtctgcgtcgaattccattatgctctttcttcctttggattggcttccgagaattccggcattgttgaacagaatatccagctggccataacgtgacacggtggactctattaaattctccacgtcatcttcggagctgacgtcacaatggagaaatgttaccgatgaacctagggtttcggcgaggattttaccggcggtgtcttctacgtcggcgattactaccttagcgccgtgtttggcgaagagttttactgttgcttctcctattcctctcgctcctcctgtaacgatagccacttttccttccaatctaaaataaataaataaaagttattaaaacgacaatttgaaaaaggtaaaacgacaaagaaaaagtgtattgttgactagtttatatatatatatatatagtagggagaaagatgaatttttttagctgtaaacaatgtgggactaaatgattctttcaagacagagagattgtgtgttaccttctgggaattggggtattgttttctcttgctaaaatatgaattccatgaagaggttgctcaggcatgacttgggctgccatggtttcagtttgcatgtacatgattatatatatatatatatatagagagagagagagagagagagagagattttgaagagtttgaattgagaatgataaagagagagagaggaaatattgttattgtggaatgaaggaatggaggaatgaaaagggattttatagggagccgaaatatgaacagttttgagtggggcccacaattccatgagtagtggactctcttctctatttccaagcaacctcctttgagattgattttcaattcaattaatgttggactttgctttttcacagcaaaatttaatattttaaagggtacactactcccttattataatcaatgttttatacattaatgaaagaatctctagtacactcacaaaatatggattgttttggtactctttatttttttttttttttttttgaagattgtgcatgtgtaattatttaagattgttcataaatttttagagaactttaaataattttgagtactaaaaataaattaaaatttaaaaagttgtttaccatgtgtatataaaaaaattacgtgtgaaataaatatttgaacattatagtaaattattcaaaaaaaaatttacactttataattgaccctaaataacttcaacgtacactttcattaatagaaaaaagataaattaaaaaaactctgttgaatatcaaacttaataagagtctaatggaatattctaaaaaggatgtactatagactttctcaatattaattatatgtataccatctattaatatgttttctctaatttattatgagaatacaatattaggtgttcctacggtgcactcataaaaataaaactaccaatatatatattgaatttttgataatcgaatagttataatttaattgttttttacaatttatttcacacgtataaaaaataaaagaagtatgcgagcaatttttaaatttattttcaacgcgttaaattattttaaacttttcaaaaaattacatgatataactatgatatatactatcatataaaaaattaatatcaaagctatatgaatattaaaacacgaagaatatgaatctatacacctttttatgaggggtacaaagtaccataaaatttctccaaaatattttacacaatatttagagctaaattaagagaaggaagatgtatgtatatgttgacgctaaaaagtagttctggtaacgtggacatcaatgtttgacatgtgacaagaaagatgacatctcggaggtaagtagtcccgaatcttagcaagtcgacctgggagggatccctagccctatgcccaggttgactttaggaactttaggatggaagttcaaacttcgataacttgttttcaactcactatctttcagta
